United States Patent Application Publication US 2024/0327476 A1 - sequence listing, part 114

SEQ ID NO: 217424 - DNA, 4338 bp, synthetic construct
  misc_feature 1..4338: note = Description of Artificial Sequence: Synthetic coding sequence
  source 1..4338: mol_type = other DNA
atgcaaggcccaccactccttacagccgcacacctcctgtgcgtctgtaccgccgctttggctgtagcgccagggcctagatttctcgtgactgcaccaggaatcattagacccggagggaatgttacgataggtgtggagctgctcgagcattgtccctctcaagttacggtgaaggctgagctcctgaagacagcgagtaacctcaccgtcagtgttctcgaggccgagggggtttttgagaaaggaagctttaaaacacttactttgccttcactccctctgaattccgcggatgagatttatgaactccgggttacagggagaacccaggatgaaattctgttttcgaattctacaaggttgagtttcgagactaaacgcatctctgtattcattcagaccgataaggccttatataaacctaaacaagaagtaaagtttcggattgttactcttttctccgactttaaaccatataaaaccagtctgaacatccttatcaaggaccctaaatccaatctcatccagcaatggttaagccagcagtcggatctcggtgttatctccaagacatttcagctatcctcacaccccatcctgggcgactggagtatccaggttcaggtgaacgaccaaacatactatcagagtttccaagtgtctgagtatgttctacccaagttcgaggttaccctacagactccattgtattgcagtatgaattcgaaacacctgaacggcacgattacagcaaaatacacctacggtaaacccgtgaagggcgacgtgacattgacctttctcccgctctccttctggggcaaaaagaagaacatcaccaaaacattcaagataaacggaagcgccaactttagcttcaatgatgaggaaatgaagaacgtgatggatagctcgaacggcctttctgaatacctcgacctgtcgtcccccggacccgttgaaatcctcaccacggttacagagagtgtgacagggattagtcgtaatgtttctacaaacgtcttttttaaacagcatgattatattattgagtttttcgattatacaaccgtcctgaaaccatctttgaactttaccgcaaccgtcaaggtcactagggccgatgggaaccagctcacactcgaagagcgcaggaataacgtggtgataacagtgacacagagaaattataccgaatattggtcaggcagcaatagcgggaaccaaaaaatggaggccgtccagaaaattaactacactgtgcctcagagcggtacattcaaaattgagttccctatccttgaggacagcagcgagttacagctgaaggcttacttcttgggcagcaaatcctccatggccgtccattcccttttcaagagtccatccaagacctacattcagctcaagactcgagatgaaaatatcaaggttggctcaccgtttgaattggtggtcagtgggaacaaacgcctcaaagagctgagttacatggttgtctcccggggacaactcgtcgccgtcgggaaacaaaattctaccatgttctcgttaactcctgaaaactcctggacccccaaagcgtgtgtcatcgtttattacatcgaggacgacggagaaatcatcagcgacgttctgaaaataccggtacaactggtgttcaaaaacaaaatcaagctgtattggtccaaagtgaaggctgaaccctccgaaaaggtgagtctacgcatcagtgtcacccagccagactccatcgtggggatcgttgccgtggacaagtcggtgaaccttatgaatgcgagcaacgatatcaccatggagaacgtggtccacgaactagagctgtacaatacaggctattatctggggatgtttatgaacagcttcgcagtgttccaagaatgtggactgtgggtgcttaccgatgccaacttaaccaaagattacattgatggggtctacgacaacgcagaatacgctgaaaggttcatggaggagaacgaggggcacatagtcgatattcacgactttagccttggcagtagcccccatgtgcgtaaacatttccccgagacatggatctggcttgacaccaatatgggatatcgcatttatcaagaatttgaggttacagtccctgactctattacgtcttgggttgctacaggcttcgtcatctccgaggatctcggactgggattgaccactacgcctgtcgagctacaggccttccaaccattcttcattttcctgaacctcccttacagcgttatacgtggagaggagtttgccctggaaatcacaatcttcaactatttgaaggatgccactgaggttaaggtgatcattgaaaagtccgataagttcgacatcctgatgacctccaacgaaatcaatgctaccggccaccagcagacacttctagtgcccagcgaggatggagccactgtgctctttcctatcaggccaacacatcttggcgaaatacctattaccgtcactgctctgtcccccaccgccagtgatgccgttactcagatgatactggtgaaggcagaaggcattgagaaatcatactcccagagtatcctgttggatctgactgacaaccgcctacagtctaccttgaagaccctgtccttcagcttccctccaaacaccgtaacagggagtgagcgcgtccagatcaccgccataggcgatgtcctgggcccatctatcaatggcttagcatctctaatacgaatgccatacggttgtggcgagcagaatatgataaattttgcccctaatatatacattctggattacctcacaaaaaagaagcaacttactgataatctaaaagagaaagctctgtccttcatgcgtcagggttaccaaagagaactactgtatcagcgggaggatggaagctttagcgctttcggcaactatgatccatctgggagtacgtggctgtccgcctttgttctccggtgttttctggaagctgacccatacatcgacatcgaccagaacgttttgcatagaacctacacgtggttaaagggccaccagaagtccaacggcgaattctgggaccccggtagagtaatccacagtgagctccaggggggaaataaaagcccggttaccttgactgcatatatcgttaccagcctgctgggttatcggaaataccaacccaacatagatgtgcaggagtctattcatttcctggagtcagagttcagcagaggcatctcagacaactatactctagctctgattacatatgcacttagctcagtcggatcccccaaagccaaagaggcgcttaatatgctgacttggcgcgctgagcaggagggcggaatgcagttctgggtctcaagcgagagtaagttaagtgacagctggcaacccagatcactggacattgaagttgcggcttatgctttgctgtcccatttcctccagtttcagacatccgaaggaattcccattatgaggtggttgtccaggcagcggaacagtctgggcggttttgctagcacacaggacaccaccgtggctctgaaagctctatccgaatttgccgctttaatgaacacagaaaggaccaacatacaggtcacggtgaccggaccttcatccccgtcacccgtcaagtttcttatcgatacacacaatcggctgctgctccagacagccgagctcgccgttgttcagcctacggccgtgaatattagcgccaatgggttcggcttcgcaatatgccagctgaatgtggtgtacaatgtgaaagcatctgggtcgtcccggaggcggcgtagtatacagaatcaggaggctttcgacctcgatgtagctgtcaaagaaaacaaagacgacttgaaccatgtggacttgaatgtctgcacgtccttctctggacctgggcgatcaggcatggccctcatggaggttaatctgctttccgggttcatggtgccaagcgaggcaatctctctgtctgaaacagtgaagaaagtagagtatgatcatggaaagctgaatctgtatcttgattctgtgaatgagacccagttctgcgtcaatattccggctgtgagaaactttaaggtgtcaaacacccaagacgcatctgtaagtatcgtggattattacgagcccagacgtcaggccgttcgttcttacaattcagaagtaaaactgtcaagctgtgacctgtgctcagatgtccagggatgtaggccctgcgaagacggcgcttcaggatctcaccaccattcttccgtgatcttcatcttttgctttaagttgctgtacttcatggagttatggctgtag

SEQ ID NO: 217425 - DNA, 4107 bp, synthetic construct
  misc_feature 1..4107: note = Description of Artificial Sequence: Synthetic coding sequence
  source 1..4107: mol_type = other DNA
atgcaggggccaccattacttacagctgcccacttactgtgcgtgtgtaccgcggctcttgcagtggctccagggcctcgcttcctcgtgacagcccctggcattatccgccctggcggaaacgttactataggcgtcgagctgctcgaacattgcccctctcaggtcactgtaaaagcagagctgctgaaaacggcctctaatcttactgttagcgtgctggaggcggagggtgtctttgagaaagggagtttcaagacactgacattaccatcagatcctaagtctaatctgattcaacaatggctcagccagcagagcgacctgggcgtcatctcaaaaacgttccagctctcaagtcatcctattctgggggattggtctattcaggtgcaggttaacgatcagacctactaccagtcctttcaggtgagcgagtatgtgctgcctaagttcgaagtcacgctccagacaccactgtactgctccatgaatagtaaacacctgaacggtacgatcactgcgaagtacacctacggaaaacctgtgaaaggcgacgtgaccctcacgttcctgcccctgagcttttggggcaaaaagaaaaacattaccaaaacttttaaaattaacggatctgccaacttctcctttaatgatgaagagatgaaaaacgtgatggactcatctaacggcctcagtgaatacctggatctcagctctccaggccctgttgagatcttgacgacagtcacagagagcgtgaccggaattagccggaatgtatcaaccaatgtattctttaagcagcatgattacattatagaatttttcgactatacaactgtgctcaagccttccctgaatttcactgcaacagtgaaagtgactcgggctgacggaaaccagctgacattggaggagcgacgcaacaacgtcgtgattactgtgacgcagcggaattataccgagtactggtccgggagtaattcaggtaatcagaaaatggaggcggtccaaaaaataaactatactgtccctcagagcggcacattcaagattgagtttcccattttagaagattcaagtgagctacaactcaaagcgtacttcttggggtcgaaatctagtatggctgtgcacagtttgttcaaatccccgtcaaagacgtatatccaattgaagacccgcgacgaaaacatcaaggtcgggagtccgttcgagctagtggtgagcggcaacaagagactaaaagaactgtcgtacatggttgtgtccaggggacagttagtggccgtggggaagcagaattcgactatgttctccctaacgccggaaaatagctggacccccaaggcttgtgtgatcgtgtactacattgaggacgatggcgagatcatctcagatgtgctcaagatccctgtgcagttagtgtttaaaaataagattaagttatactggagcaaagttaaagcagagcccagcgaaaaagttagcctgagaatcagcgtgactcagcctgactctatcgtgggaattgtcgccgtcgataaatccgtgaatctaatgaacgcgtctaatgacatcacgatggagaacgttgtacacgaactcgaattatataatacgggctactatctggggatgttcatgaattcctttgccgtcttccaggaatgcggactgtgggtcctgacagacgctaacctgacaaaggactatatcgatggggtttatgacaatgcagaatacgccgagcgctttatggaggagaacgagggtcacatcgtggacatacatgattttagtctgggttctagtcctcatgtgcgaaagcatttccctgagacatggatttggttggatactaatatgggctatcgtatctatcaggagttcgaagtgactgtccctgactcaatcacgtcttgggtggccaccggtttcgtcatctctgaggacctcggcctgggactgactactactcccgtcgaactgcaggcatttcaaccattcttcatcttcctaaacctgccatactctgtcataagaggcgaagagtttgcgctggaaatcacaatcttcaattacctgaaagacgcgacagaggtcaaggtaatcattgagaagtcagacaaatttgatattctgatgacttcaaatgaaatcaacgccaccggccaccagcaaacgctgctggttccgtccgaggacggagccactgtactgtttccaattaggcccacccatctgggcgaaattccaattaccgtgacagcactgagccccacagcaagtgacgcagtaacgcagatgatattggtgaaagctgaagggattgagaagagctacagccagtcaatactgctcgatctgactgacaatcggttacagagtaccctcaagaccctctcattttcttttcccccaaacactgtgacaggaagcgagcgcgtgcagataacagccatcggggatgtcctgggcccatcaattaacggtctggccagtctcatcagaatgccctacggatgcggagaacaaaatatgatcaattttgctcccaacatatatatccttgattatctgaccaagaaaaaacagctgaccgacaatttgaaggaaaaagctttgtcattcatgaggcagggttaccagcgagaactattgtaccagcgagaggacggcagcttctccgcttttgggaattatgatccatcgggctctacctggttatccgcgttcgtgctgagatgctttttagaagccgacccatacattgatattgaccaaaatgtgctgcatagaacctacacttggctaaagggccatcaaaaaagcaacggggagttttgggatcctggccgagtaattcattctgaactgcaaggcggaaacaagtcaccagtgaccttaacagcttacattgttacaagcctgctaggttaccggaagtaccagcctaacatcgatgttcaggaatccatccacttcctagagtcagaattcagtagggggattagcgacaattataccctcgcccttataacatatgcactttcttctgtggggtcaccaaaagctaaagaggctcttaacatgctgacctggcgtgctgagcaggaggggggaatgcagttctgggtaagtagcgagtcaaaactctccgattcttggcagcccaggagtttggatatagaagtggcagcatacgctctgctgagccattttctgcagtttcagacaagcgagggaattcccattatgcgatggctttcacggcagagaaatagccttggtgggtttgcctccacccaggacacaaccgtggcgctgaaggctttaagtgagtttgccgcactcatgaacaccgagcgtaccaatatccaggttacagtgacgggtcccagctccccctccccggttaaatttctgattgatacacacaataggttgttgctccagactgcagagctcgctgtagtgcagcctactgcagtgaatatttcagccaatgggttcggcttcgcaatctgtcaactgaacgttgtctataatgtaaaagcatccggcagttctcggagaagacgtagtatccagaaccaggaggcatttgacctggatgtcgcggtgaaggagaataaagatgacctgaaccacgtggatctcaatgtctgcacctcattctctggcccagggcgtagtggcatggccttgatggaagtcaacctgctgtcggggttcatggtcccctccgaggctatttcactgtccgagacggtcaaaaaagtggaatacgatcatggaaaactaaacctgtatcttgattccgtgaacgaaacccagttctgcgtgaacatacccgcagtacgcaactttaaagtctcaaatacgcaggacgccagcgtttctattgtggattactacgaacctcgacggcaagccgtgaggagctataattctgaggtgaaactctcaagttgcgacctgtgctctgacgtgcaagggtgtcgcccttgcgaagacggagcatcaggctcccatcatcactcaagcgtcatctttattttttgcttcaaactgctttactttatggagttgtggctgtag

SEQ ID NO: 217426 - DNA, 4287 bp, synthetic construct
  misc_feature 1..4287: note = Description of Artificial Sequence: Synthetic coding sequence
  source 1..4287: mol_type = other DNA
atgcaaggccctccgttacttacagcagcccacctcctgtgcgtatgtaccgctgctttggccgtcgctcccggacctagattcctggttactgccccaggtattatccgccctggtgggaatgttaccatcggggtcgagctcctggagcactgccctagccaagtgaccgtcaaagcagagcttctcaagacagcatccaatctgaccgtgtctgtcctcgaggccgagggagtgttcgaaaagggcagctttaagactctgacactgccttccttgccgctaaacagcgctgacgaaatatacgagctccgtgtcacgggccgtacacaagatgagatactgttctccaatagcaccaggttgtcttttgaaaccaagagaataagcgtcttcatccagactgacaaggctctgtacaagccaaaacaagaagtaaaatttcgaatcgttacgctattcagcgacttcaagccatacaagactagtctgaacatcctgatcaaagacccgaagtccaacctgattcagcagtggctctcccagcagtccgacttgggtgtaatttccaagactttccagctgtcatcccatcccatcctgggtgactggagcattcaggtgcaggtcaacgatcagacttactatcagagcttccaggtctccgagtacgtgctccctaaattcgaggtaactttacaaacgcctctctattgctccatgaacagcaagcacttaaacgggacaatcactgccaagtacacttacggaaagcccgtgaagggagatgtgacgttgaccttcctgccattaagcttctggggaaaaaagaaaaacatcaccaaaaccttcaagataaacggaagcgcaaatttctccttcaatgatgaagaaatgaagaatgttatggattcgagcaacggcctgagtgaatatctagatttgagtagtccagggccagtcgagattctgacaactgtgacagaaagtgtgacaggaattagcagaaatgtcagcaccaacgttttcttcaaacagcacgattacatcattgagttcttcgactatacaaccgtgttgaaaccctccctgaatttcaccgccaccgtcaaagtaacgagggctgacggaaaccagctgacattggaagagaggagaaacaacgtggtaatcactgttacacagcgcaattataccgaatattggagcggaagcaactccggtaatcagaagatggaagctgtacagaaaatcaattacacggttcctcagagtggtacgttcaaaattgaattcccaatactagaagatagcagcgagctgcaattgaaagcatattttttaggctccaaatccagcatggcagtccacagcctgttcaaaagcccaagcaaaacctatattcagctgaaaacgcgggacgaaaacattaaagttgggtctcctttcgagctggtggtgtccggtaacaaacgcttgaaggagctgtcatacatggtggtcagtagggggcagctcgtcgccgttgggaaacagaacagtaccatgttctcactcactcctgagaactcctggacccccaaggcctgtgtgattgtgtactacatcgaggatgatggagagattataagtgatgtgttaaagattcccgtgcagctggtattcaagaacaagattaaattatactggtctaaagtaaaggccgaaccgtcagagaaagtaagtctgcggatttctgtcacacagccagacagcatcgtgggcatagtggcagtagacaagtctgtcaaccttatgaacgccagcaacgacatcactatggagaacgtggtgcacgaactagaactgtataacactggctactatctgggtatgtttatgaactcattcgcagtcttccaggaatgcggactgtgggtactgactgacgccaacctcaccaaagattacatagatggtgtctatgataacgccgaatatgctgagagattcatggaggaaaatgagggacatatagtagatatccatgacttctccctaggctcatccccacatgttagaaagcactttccagagacttggatctggctggatacaaatatgggatatcgaatctaccaagaattcgaggtcactgtccccgattcgataacttcttgggtggctacagggttcgtaatcagcgaggacctgggtctggggctgacgaccacccctgttgagctccaggctttccagcccttttttatttttctgaatctcccttacagcgtgatcagaggggaagagttcgcgctggagatcactatattcaactacctgaaagacgcaaccgaggtgaaggtaataattgaaaagagtgacaagttcgatattctgatgacctcaaacgaaatcaatgcaactggtcaccagcagacactgctggtgccttccgaggacggagccaccgttctgtttcctattcgcccaactcatctgggtgagatacccattaccgtgactgctctgagccctaccgcgtctgacgctgtcacgcagatgattctggtgaaagcagaggggattgagaagtcttactcccagtccatcctgctcgacctgacggataacagactgcagtcaacgctgaaaaccctcagtttcagctttcccccaaatacggtgacagggagtgagcgggtgcagatcaccgcaattggggacgttctgggcccttccattaatggcctggcatctctgatccgaatgccctatggctgtggagagcagaatatgattaactttgccccaaatatatatattctggactatctgacaaaaaagaagcagctaacggacaacctgaaggagaaggcactaagttttatgaggcagggttatcaaagggaactgctgtatcagagagaagatggctcgttctctgccttcggcaactacgatccatcgggctccacatggttatccgcctttgtactgagatgtttcctcgaagccgatccttatattgatattgaccagaacgtcttgcacagaacttatacatggctgaagggtcaccagaaatcgaacggcgagttttgggaccctggcagagtcattcactccgaattgcagggtggaaacaaatcgccagtgacacttacagcctatatcgtgacatctctcctcggctacaggaagtatcagcctaatatcgatgttcaagagagtattcactttttagagagtgagttttcacgtggcatctctgataattataccctggcattaattacttatgccctctcttccgtgggctctccaaaggctaaagaagccctcaacatgctcacatggagagcagagcaggaaggaggcatgcagttctgggtctccagtgagtcgaagctgtctgattcttggcaaccgagaagcctggatatagaggtggcagcctacgcgcttcttagccacttcctccagtttcagacctccgaaggaatcccaatcatgagatggctctctcgccagcggaacagtctcggcggatttgcctctactcaggacacaacagttgccctgaaggctctgtccgagtttgcagccctcatgaacaccgagcgcaccaacatccaggtcaccgtgaccggcccttcttctccatcccctttagcagttgtccaaccaacggccgttaacataagtgccaacgggtttggttttgcaatctgccagttaaatgtggtgtataatgtgaaagcatcagggtcgtctcgacgccgtagaagcatccagaatcaggaagctttcgatttggatgtcgcggtcaaggagaacaaggacgacctgaatcatgtcgacctgaacgtctgtaccagtttttcagggccaggtcgtagtgggatggccttgatggaagttaacctgctgagcggattcatggtgcccagcgaggccatcagtttgagtgaaactgttaagaaagtcgagtacgatcacggtaaactgaacctctatctcgattcagtgaacgagacccagttctgcgtgaatattcccgctgttaggaactttaaggtttccaatactcaggatgccagtgtgagcattgtagattactacgagccgaggcgacaggccgtccggagttataactcagaggttaaactgtccagctgtgatttgtgcagtgacgttcagggttgtcgcccttgcgaagatggcgcttctggctctcatcatcacagttcagtgattttcatattttgtttcaaacttctgtactttatggaattgtggctctag

SEQ ID NO: 217427 - DNA, 762 bp, synthetic construct
  misc_feature 1..762: note = Description of Artificial Sequence: Synthetic coding sequence
  source 1..762: mol_type = other DNA
atgggggaattcaacgagaagaaaacaacttgtggcaccgtctgtctgaaatacctgctcttcacatataattgttgtttctggctggcaggcttagcagtcatggcagtcggcatttggacgctggcactgaagtcagactacatctcactgttagcgagcggcacttatcttgcaaccgcctatatcctggtagtggccggaacagtggtgatggtcacgggggtcctggggtgctgtgctacattcaaggagcgcagaaatttactgagactgtacttcatccttctgctaatcatatttctcttggaaatcatcgccggtattctggcgtacgcgtattatcagcagcttaacaccgagctaaaggaaaacctcaaggatacgatgactaagcgctaccatcagcctggccatgaggccgtgaccagcgccgtggaccagctccagcaggagttccactgctgtgggtccaacaattcccaggattggcgggattctgaatggatacgctcccaggaggcgggtgggagagtcgttcctgactcatgctgcaagacagtcgtggccctctgcggtcagcgtgaccatgcaagtaacatttacaaggtggagggcggatgcattaccaaattagaaacttttatccaggagcatttgcgggttataggggctgttggaatcgggatcgcctgcgtgcaggtgttcgggatgatttttacctgctgtctgtatcggtcgttaaaattggaacattattag

SEQ ID NO: 217428 - DNA, 762 bp, synthetic construct
  misc_feature 1..762: note = Description of Artificial Sequence: Synthetic coding sequence
  source 1..762: mol_type = other DNA
atgggagagttcaatgaaaagaagaccacctgtggtaccgtctgcctgaagtatctgctatttacatataattgttgtttctggctggcagggcttgctgttatggctgtggggatctggaccctagcgctgaaatctgactacatttcactgctggcctcgggtacatatctggccacggcatacatcctggtcgtagccggaacagtcgtcatggtgactggggtgttaggctgctgtgccacatttaaagagaggcggaatctcctccgtctgtatttcatcctcctgctgatcattttcttattagaaatcatcgccggtatcttggcatacgcctactaccaacagttaaacactgaactgaaagagaatctgaaggatacaatgacaaaacgctaccatcagcccggacacgaagccgtgacgagcgccgtggatcagctgcagcaggagttccactgctgcgggtcaaataattcgcaggactggagggattccgaatggatccgcagtcaggaggcaggaggcagagtggtgccggacagctgctgcaagactgtcgtggccctgtgcgggcagagggatcacgcttcgaacatttacaaagtggagggagggtgcatcacgaaactggaaacctttattcaggaacacctgcgagtcattggtgcagtgggaattggcattgcttgcgtgcaagtgtttgggatgattttcacctgctgcctataccgatcgctaaagctagaacactactag

SEQ ID NO: 217429 - DNA, 762 bp, synthetic construct
  misc_feature 1..762: note = Description of Artificial Sequence: Synthetic coding sequence
  source 1..762: mol_type = other DNA
atgggggaattcaacgaaaagaagacaacatgtggtactgtgtgcctgaagtaccttttgttcacttacaactgctgcttttggctggcagggctcgccgtgatggcagttggcatctggaccctggctcttaagtctgactacatcagcttgttagccagtgggacatacttagcaactgcatacatcctggtggttgcaggcactgtggtaatggtcactggagtcctggggtgttgcgccacatttaaggagaggcgcaatctgctgcggctgtactttatccttctgctcattatatttctgttggagatcattgctgggatcctggcttatgcctactatcagcagttgaatactgagctgaaagaaaacctaaaggacaccatgaccaagcgatatcatcagccgggtcacgaagccgtgacgtcagcagttgaccaactgcagcaggagttccactgttgtggatcaaataatagtcaggactggagagactctgagtggatcaggagccaggaagccggtggacgtgtcgttcctgactcttgttgcaaaacagtggtggcactgtgcggccagagagaccacgcgtcgaatatatataaggtggaaggaggatgtattacgaaactggaaacttttatccaggaacacctcagggtgattggagccgtcggaattggtattgcctgcgtccaggttttcggaatgatattcacttgctgtctctacagaagcctcaaactggaacattattag

SEQ ID NO: 217430 - DNA, 543 bp, synthetic construct
  misc_feature 1..543: note = Description of Artificial Sequence: Synthetic coding sequence
  source 1..543: mol_type = other DNA
atgggcgagtttaatgagaagaagaccacttgtggcacagtgtgcttgaaatatctgctgttcacatataattgctgcttctggctcgctggcttagccgtgatggcggtgggcatttggactttagccttgaagtctgattacatttccctcctggcgtctgggacttaccttgccactgcctatatcctcgtggtagccggtacagtcgttatggtgactggtgtgctgggctgttgcgcaacgttcaaggagcgcaggaacctgctgcggttatatttcattctccttctaatcattttcctgctggagataatcgcagggattttagcttacgcttattaccaacagctgaacactgagctgaaggaaaatctcaaagacacgatgaccaagagataccaccagcctggccatgaagccgttaccagcgctgtggatcagctgcagcaggaatttcactgctgtggaagcaacaattctcaagactggcgcgacagtgagtggatacggtcccaagaggctggcggaagagtagtgtag

SEQ ID NO: 217431 - DNA, 240 bp, synthetic construct
  misc_feature 1..240: note = Description of Artificial Sequence: Synthetic coding sequence
  source 1..240: mol_type = other DNA
atgggtgaatttaacgagaaaaagactacctgcggtactgtgtgtttgaagtatttgctattcacctataactgctgcttttggttggcaggccttgctgtgatggcggtgggaatctggaccctcgcgctcaaaagtgactatatcagtctattagccagcggtacatacctggctactgcatacattctagtggttgccggaactgtggttatggtcactggagtcttaggatgttag

SEQ ID NO: 217432 - DNA, 279 bp, synthetic construct
  misc_feature 1..279: note = Description of Artificial Sequence: Synthetic coding sequence
  source 1..279: mol_type = other DNA
atgggggaatttaatgaaaaaaagacaacatgtgggaccgtgtgcctgaaatatctgctgttcacatataactgttgtttttggctggccggactggccgttatggccgtgggtatttggaccctggctctgaaatccgactacatttctctgttggcttccggcacctacctggccactgcctatattttggtggtagccggaaccgtcgtgatggtcactggcgtgctgggatgctgcgcaaccttcaaggaacgtcgaaacctgctaaggctgtag

SEQ ID NO: 217433 - DNA, 198 bp, synthetic construct
  misc_feature 1..198: note = Description of Artificial Sequence: Synthetic coding sequence
  source 1..198: mol_type = other DNA
atgggggagtttaacgagaagaagacgacctgcggtaccgtctgcctcaagtatcttctctttacatacaattgctgtttttggcttgctggcctcgctgtcatggccgtaggtatctggacgctggctctgaagtctgattatattagtctactcgcgagtggaacctacctggccactgcctacattctggtgtag

SEQ ID NO: 217434 - DNA, 531 bp, synthetic construct
  misc_feature 1..531: note = Description of Artificial Sequence: Synthetic coding sequence
  source 1..531: mol_type = other DNA
atgggagagttcaatgaaaaaaagacaacatgtggcaccgtgtgtctgaagtacctgttatttacgtataattgttgtttctggctggcaggcttggccgtcatggcggtgggaatatggaccttggcactcaagtcagattatatctccctgcttgcctcaggcacctatttggctacagcgtatatattagtggtggctgggacagtcgtgatggtgactggcgttctgggctgttgtgcaacatttaaggagcgacgcaacctgctccgcctctattttattctcctgctcatcattttcctgctagaaatcatcgcaggcatcctggcctatgcatactatcaacagctgaatacagagcttaaagaaaacctgaaagacaccatgacgaaacggtaccatcagcccggacacgaggctgttaccagcgctgtcgaccaattacagcaggagttccactgttgtggaagtaacaatagccaggactggcgagacagtgagtggatcagatcgcaggaggctggttag

SEQ ID NO: 217435 - DNA, 543 bp, synthetic construct
  misc_feature 1..543: note = Description of Artificial Sequence: Synthetic coding sequence
  source 1..543: mol_type = other DNA
atgggagagttcaacgagaaaaaaaccacttgcgggaccgtatgtctaaaataccttctgttcacctacaactgttgcttctggctggccggactggcggttatggccgtgggcatctggacactagccctgaagtcagattacatatcattactggcttctggcacctatctcgctaccgcatatatcctcgtcgtggccggaacggtggttatggtgactggagtgctggggtgctgtgccacatttaaggagcggaggaacctgcttcgactgtacttcattctgcttctgataatttttctccttgagatcatagcaggcatcttggcctatgcctactaccagcagctgaatactgaattgaaggaaaatctgaaagataccatgacaaagaggtatcaccagcccggacatgaagccgtgacctccgcggtagatcagctgcagcaggagttccactgttgcgggtcaaataacagccaggattggagagacagcgagtggatcagatctcaggaagcagggggaagggtcgtctag

SEQ ID NO: 217436 - DNA, 273 bp, synthetic construct
  misc_feature 1..273: note = Description of Artificial Sequence: Synthetic coding sequence
  source 1..273: mol_type = other DNA
atgggcgagtttaatgaaaaaaagactacctgtggtaccgtgtgcctcaagtaccttctgtttacgtacaactgctgtttttggctggcgggtctggccgtaatggctgtcgggatctggaccctggcccttaaaagcgactatattagcctgctggcatccgggacctacctggccaccgcctacatcctagtagttgccggtacggtggtcatggtgacaggtgtgctcggatgctgcgcgacatttaaagagaggaggaatctgctgtag

SEQ ID NO: 217437 - DNA, 513 bp, synthetic construct
  misc_feature 1..513: note = Description of Artificial Sequence: Synthetic coding sequence
  source 1..513: mol_type = other DNA
atgggggagttcaatgagaaaaaaaccacctgtgggacggtgtgtttaaagtatctgctgttcacttacaattgctgtttctggctcgcgggtctggccgttatggctgtcggcatctggactttggccctgaaatccgactatatcagccttcttgcatctgggacttaccttgccactgcatacattctggttgttgccggaaccgtggttatggttaccggggtgttagggtgttgcgcgacattcaaggagcgccgaaacctgctgcggctatacttcattctgctactcattatttttctcctcgaaattatcgccggtatcctcgcctatgcctactaccaacagctgaataccgaacttaaagagaacctcaaagatactatgacaaaacggtatcaccagccaggccatgaggccgttacctccgccgtggaccaactgcagcaggagttccactgctgtgggtccaacaactcccaagactggcgggacagcgagtggatttag

SEQ ID NO: 217438 - DNA, 762 bp, synthetic construct
  misc_feature 1..762: note = Description of Artificial Sequence: Synthetic coding sequence
  source 1..762: mol_type = other DNA
atgggggaattcaatgagaagaaaaccacatgcggcacagtgtgcctcaaatacctgctgttcacatataactgctgcttctggttggcagggctcgccgtgatggccgtgggcatctggacactggctctcaaatcggactacatctcgctgttggcatctggcacttacttagctacagcgtacatactcgtggtcgccggaaccgtggtgatggtgacaggcgtgctgggctgttgcgctacgttcaaggaacgccgtaaccttttacggctatatttcattctcctactcatcatctttctattagaaattatcgctggcattcttgcgtatgcgtattatcagcagctaaacaccgagttaaaggagaatctgaaagatacaatgactaaaaggtatcaccagccaggacacgaggccgtgacatccgccgtggatcagctgcagcaggaattccactgttgtggctccaataatagtcaggactggagggattccgaatggatccggtcgcaggaggcaggtggcagagtagtgcccgacagctgctgcaaaaccgtagttgccttgtgtggccaaagggatcatgcttccaatatttacaaagtggaaggtgggtgcattaccaaactggagactttcatacaagagcaccttcgagtcatcggagctgtgggaattggtatcgcctgtgtccaggtgtttggtatgattttcacatgctgtttgtaccggtctctgaaattggaacattactag

SEQ ID NO: 217439 - DNA, 3471 bp, synthetic construct
  misc_feature 1..3471: note = Description of Artificial Sequence: Synthetic coding sequence
  source 1..3471: mol_type = other DNA
atgtctaagctgcgaatggtcttactagaagattccggcagcgccgactttagacgccattttgttaacctgtccccttttacaattaccgtggtcctgctcctgagtgcgtgctttgtgacctcaagtctcggcggaacggacaaagaactgcgcctggtcgatggggagaataaatgcagcggtagagtggaggtgaaagtgcaggaggaatgggggacggtctgcaataatggatggtctatggaagcagtgtccgtgatctgcaatcaactgggttgcccaaccgctattaaagcaccaggctgggctaactcttctgctggctctgggcgaatctggatggaccacgtgtcttgtagagggaacgagtccgccctttgggattgtaagcatgacggttggggaaagcacagcaattgtacacaccagcaggatgccggtgtgacctgctccgacggctctaatctggagatgagactaacaaggggcggtaatatgtgcagcggtcgcatcgaaatcaagtttcagggtcggtgggggaccgtctgtgacgacaattttaacattgatcacgcaagtgtaatttgtaggcagctggaatgcggcagtgctgtgtctttcagtggctctagcaatttcggagaagggtccggacccatatggtttgacgatttaatttgcaacggtaacgagtcagcgctgtggaactgtaagcaccagggctggggcaaacacaattgcgaccatgccgaggatgccggtgtcatttgctccaaaggagccgatttatccctgcgcctcgttgatggagtcacagagtgttcaggcaggttagaagtaaggtttcaaggggaatggggcaccatctgtgatgatggatgggatagctacgacgctgccgtagcttgcaaacagctcggctgtccaaccgccgttacggccataggaagagtgaatgcaagcaagggattcggtcatatctggctggattccgtctcatgccagggtcatgagccagctatctggcagtgtaagcaccatgaatgggggaagcactattgcaaccacaatgaagatgccggtgtcacatgctccgatggttcggatcttgagttgagattgcgcggaggcggttcccgttgcgcaggcactgtcgaggtggaaatccaaaggttgcttgggaaggtgtgcgacaggggttggggcctgaaggaagctgatgtggtctgtcgacagcttgggtgcggctccgctcttaagacaagctatcaagtctactcaaagatccaggcaaccaatacctggctattcctatcctcatgcaacgggaacgaaacatcactgtgggactgcaaaaactggcagtggggtgggctgacatgtgatcattacgaagaggccaagatcacctgttcagcacatagggagccacggctcgtggggggagacataccctgttctggcagggtagaagtcaagcacggggacacatggggctccatttgcgactccgatttcagcttagaggctgccagtgtcctttgtcgggaactgcagtgtgggaccgttgtgtccatcctgggaggcgcacacttcggtgaaggtaacggccagatttgggccgaagagtttcagtgcgagggccacgaatcgcacctatcactatgccctgtggcacctcgtcccgagggaacgtgttcccatagccgcgatgtgggcgtcgtttgctcccggtataccgaaatcaggctcgtgaatggtaagactccatgcgaggggagagtggagctgaagacgcttggcgcttggggcagcttgtgcaattctcactgggacattgaagacgcacacgttttgtgtcaacaactaaagtgtggcgtggctctgtccacccccggaggtgcgaggttcggaaaaggaaatgggcagatatggagacacatgtttcattgcactggtaccgagcaacacatgggcgattgccctgtcaccgctcttggcgctagcctctgccctagtgagcaagtggccagcgttatttgctctggcaaccaatcccaaaccctctcatcctgtaacagcagctcgctgggccctacaaggccaaccattcctgaggaaagtgctgtggcttgcattgaaagcggacagctcagactggtgaatggtggtgggcgatgtgccggaagggtcgagatctaccatgaaggaagttggggtacaatatgtgatgacagctgggacttgtccgacgcgcacgtcgtgtgccgccagctgggctgcggagaggcgatcaacgcgactggctcggctcacttcggcgaaggcactggtcctatctggcttgacgagatgaagtgcaacggcaaagagtcaaggatttggcagtgtcattcccacggctgggggcagcagaactgcaggcacaaggaagatgccggagtgatttgttcggagttcatgagtttgaggttaacttccgaagctagcagagaggcctgcgccggtcggctcgaagttttctacaatggcgcttggggaactgtaggtaagagcagtatgagcgagaccaccgtgggcgtggtctgcagacagttaggttgtgctgacaagggcaagattaatccagcatcactggacaaggcgatgagcattccgatgtgggtcgacaatgtccagtgccccaagggccctgatactttatggcagtgcccctcctccccttgggaaaagagactggcaagcccaagcgaagaaacatggatcacgtgtgataacaagattagattgcaggaggggccaacttcttgctcgggtcgggtggaaatctggcacggaggttcatggggtacagtttgtgatgatagttgggatctggacgacgcccaagtcgtctgtcagcagctggggtgtggacccgctcttaaggccttcaaggaggctgaattcggacaagggaccgggcctatctggctgaacgaggttaagtgcaaaggaaacgagtctagcttgtgggattgtccagcgagacgttggggccacagcgagtgcgggcacaaggaggatgcggcagtcaactgcacggatattagcgtccagaagaccccacagaaagcaacaactggacggagctcgaggcagagtagcttcatcgctgttggcatccttggcgtggtgctgctggccatattcgttgctctgttttttctaaccaaaaaacggcgtcaacgacagagactggccgtgagctccaggggggagaacttggtgcatcagatccaatatagggaaatgaattcctgtctaaatgcggatgatctcgatttaatgaactcttctgagaactcccatgagtccgccgacttctctgcagctgaactaatttccgtgtccaaatttctgcccatatctggcatggagaaagaagctatactctctcacaccgagaaggagaatggcaacttgtag

SEQ ID NO: 217440 - DNA, 3465 bp, synthetic construct
  misc_feature 1..3465: note = Description of Artificial Sequence: Synthetic coding sequence
  source 1..3465: mol_type = other DNA
atgagcaaattgcgtatggtcctcctcgaggacagcggctctgccgattttagacgccatttcgtaaatttgagcccgttcactatcacagttgtcctcctcctgtctgcctgtttcgtgacatcatcactgggtgggacagacaaagagttgaggcttgtggacggtgagaacaaatgcagcggaagagtagaagtcaaggtccaggaggaatggggtacagtatgtaacaacggttggtcaatggaagccgtaagcgtgatctgtaaccagcttggatgcccaacagccatcaaggctcccggatgggctaactcaagcgctggttccggtaggatctggatggatcatgttagttgccggggtaatgaatccgcattatgggactgcaagcatgacggctgggggaaacatagtaattgcacgcaccaacaggacgctggagtgacctgttccgacggctctaacttggaaatgaggctgaccaggggcggaaacatgtgcagtggccgaatcgagatcaagtttcagggccgatggggtacagtgtgcgatgataactttaacatcgatcacgctagcgtcatttgcagacagctggagtgtggctcagcagtatccttctctggctcttccaactttggagaaggttcgggcccaatttggttcgacgacctgatctgtaatgggaatgaaagtgctctctggaattgcaagcatcagggctggggcaagcataactgtgaccatgctgaggacgctggtgtcatttgttcaaagggcgcagacctatctctcaggctagttgacggagtgactgaatgtagtgggagactcgaagtgcggttccagggcgagtggggcacaatctgcgacgatgggtgggattcctatgatgcagctgtcgcatgcaaacagctgggctgtcctaccgcagtgactgccatcggccgtgtcaacgcctcgaaaggatttggtcacatttggctggattctgttagttgtcaaggacacgagcctgcaatctggcagtgcaagcaccacgagtggggcaagcattactgtaaccacaatgaggacgcaggcgtgacctgttcagacggcagcgacttagagctgcgcctgcgcggaggaggatctcgctgcgccggaaccgtggaagttgagattcaacggttgcttggaaaggtgtgtgatcggggatggggtctgaaagaggcagacgtggtgtgcaggcagctgggatgtggttccgcgttaaagacgtcctaccaggtgtattctaagatccaggctaccaatacctggctgtttctaagttcttgcaatggaaacgagacttcattatgggattgtaaaaactggcagtggggaggcctcacttgtgaccactacgaagaagccaagatcacctgctccgcacacagggagccccgactcgtcgggggtgacattccttgttcaggccgtgtcgaagtaaaacatggggacacatggggctcaatttgtgactctgatttttcactcgaggcggcaagcgtcctctgccgcgaactccagtgcggaactgtggtctccatcctcggcggagctcactttggcgagggcaatggacagatttgggccgaggagttccaatgcgaaggccacgaatctcatttaagcctttgcccagtcgctcctcggcctgaaggtacttgtagccatagtagggacgttggagttgtgtgctcctctaagacacaaaagacctctctgattggatcacataccgtgaaggggacagggttggggagtcattcttgcctctttctcaagccttgccttctccccggttacactgaaatcaggttggtgaacggcaagaccccgtgtgaggggcgagtagagctaaaaactcttggagcttgggggtccctctgtaactctcactgggacattgaagatgcccacgttctgtgccagcaactgaagtgtggtgtcgcactgtcaacccctggaggggcaagattcggcaagggaaatgggcagatctggcgccacatgttccattgcacaggaactgagcagcacatgggcgactgccctgtcacagcgctgggagcatcactatgcccgtccgagcaagtcgcgtctgtcatttgttccgggaatcagagtcagaccctaagtagctgtaactccagttcactgggcccaacccgtcccaccattccagaggagagcgccgtggcatgcatagagtcagggcaactgcggctcgtgaatggaggcggtcgctgtgctgggcgtgtggagatttatcatgagggctcctggggtacaatctgtgacgactcttgggatctgtcagatgctcatgttgtctgtcgacagctcgggtgtggtgaggccataaatgctacagggagtgcccatttcggggaagggactggcccaatttggctagatgagatgaagtgcaacggaaaagagtcaagaatctggcagtgtcactcgcacggctgggggcagcagaattgccggcacaaagaggatgctggcgtgatctgcagcgaatttatgtctctgcgcttgactagcgaggctagccgcgaggcctgcgccggtaggctggaagtgttctataacggagcttgggggaccgttgggaagagcagcatgagcgagacaactgtcggggtcgtctgccgccagctgggttgcgcagacaaagggaaaatcaacccagccagcttagacaaagcgatgtccatacccatgtgggtagacaacgtacagtgcccaaaaggacccgacacactttggcagtgcccgagcagtccgtgggagaagcgcctggctagcccgagcgaagagacatggatcacatgtgacaacaagatcaggctgcaggagggtcctacctcctgtagtggcagagtggaaatctggcatgggggatcatggggtacggtttgtgatgatagctgggatttagacgatgcccaggtcgtgtgccagcagcttggctgcgggcctgctcttaaggcgtttaaggaagcggaattcggccagggcacgggccctatttggcttaatgaggttaagtgcaagggcaatgaaagttccttgtgggattgccccgcacggaggtgggggcactctgaatgtgggcacaaagaagacgctgccgtgaattgtacagacatctcagtccaaaagacgccgcaaaaagccacaacaggcagatcatccaggcaatcctcattcatcgcagtcgggattctgggcgtggtcctgcttgccatctttgttgctttgttcttcctgacaaagaagcggcgacagcgccagaggcttgccgtatctagtcgcggtgaaaacttggtccaccagatccagtaccgtgaaatgaattcctgcctgaacgccgacgacctggacctaatgaatagttcagggggacatagcgagccacattag

SEQ ID NO: 217441 - DNA, 3366 bp, synthetic construct
  misc_feature 1..3366: note = Description of Artificial Sequence: Synthetic coding sequence
  source 1..3366: mol_type = other DNA
atgtctaagttacggatggtgctccttgaggattctggcagtgctgacttccgacggcatttcgtcaatctatcgccatttacaatcaccgtggtcttgctcctaagcgcatgttttgtcacatcaagtttgggaggcactgacaaggagctacgcctcgttgatggagaaaataagtgctccggtagagtggaagtgaaagtccaggaagagtggggtaccgtgtgtaataatgggtggagcatggaagccgtgagcgtcatctgtaatcagcttggctgtcctaccgccattaaagcccctgggtgggctaatagttccgcaggctctggcagaatatggatggatcacgtctcttgccgcggaaacgagagcgccctgtgggactgcaaacacgatgggtggggaaagcatagtaactgtacccatcagcaggacgctggcgtgacttgttcggacggaagcaatctagagatgagactgacccgagggggaaatatgtgttctgggagaatcgagataaaattccaggggaggtgggggactgtttgcgacgacaattttaacatagaccacgcctccgtgatctgccgccagctggaatgtgggtccgcggtttcttttagtgggtcctcaaattttggcgaagggagcgggcctatctggtttgatgacttaatctgtaacggaaatgagagcgccctttggaactgcaagcatcaaggctgggggaaacataattgcgatcacgccgaagatgccggtgtgatatgctctaagggggctgatttaagcctcagacttgtagatggcgttactgaatgctcaggaagactcgaggtgaggtttcagggcgaatgggggacaatttgcgacgacggctgggattcatacgacgctgctgttgcttgtaagcagcttggctgtccaactgcagtcactgctatcggtcgcgtgaatgcttccaaaggctttggtcacatttggttggattcagtttcctgccaaggccatgaaccggctatctggcagtgcaaacaccacgaatggggaaagcactattgcaaccataatgaggatgctggggtgacgtgtagtgacggttcagacctcgaactgcggctgagaggagggggatcaagatgtgccggaacagtcgaagtggagatccagcggcttttaggtaaagtctgcgatcggggttggggactgaaggaggccgacgtcgtgtgcaggcaactcggctgtggcagcgccctaaagaccagctaccaggtgtacagcaagattcaggccaccaatacttggctcttcctttcaagttgtaacggcaatgagactagtctttgggactgcaaaaactggcagtggggtggcctgacctgtgatcattacgaggaggctaagattacgtgttccgcacacagggagccacggctcgtcggaggtgatattccttgttcgggaagggtggaagtcaaacatggcgacacctggggctctatctgcgattctgacttctcactggaggccgctagtgtgttatgccgtgaattacagtgcggcactgtggtatccattctcggtggggctcactttggcgagggcaatggacagatttgggccgaggaattccagtgcgagggccacgaatctcatctcagcctgtgtccagtggctcctagacccgaaggcacctgttctcacagcagggacgtaggcgtcgtgtgcagtcgatacacagagattaggttagtgaatggcaaaactccttgtgagggtagagtcgagctcaagacactgggcgcatggggctcactctgcaattctcactgggacattgaagatgctcatgtcctgtgccagcaactcaagtgtggagtcgccctgagcaccccaggaggggctcgcttcggcaagggcaacggtcagatctggcgccacatgtttcattgtaccggaacagaacagcatatgggcgactgtcccgtgacagctttgggcgctagtttgtgccccagcgaacaagttgcctcggtgatttgctctggcaatcagtcccagacactcagtagctgtaatagttccagtctgggcccaaccaggccgaccatccccgaagagtctgcagtcgcttgtatcgagtccggacaattgcggctcgtaaacgggggtggacgctgtgccggaagggtcgagatttatcacgagggctcatggggcactatttgcgacgatagctgggatctgtccgacgcccatgtcgtgtgtcgccagctgggctgcggggaggctataaacgcaaccgggtctgctcatttcggcgaggggaccgggccaatctggctcgacgagatgaagtgcaatggaaaagagagcaggatttggcagtgccacagccatggctggggtcagcaaaactgtcggcacaaggaggacgctggcgtgatctgtagcgaatttatgagtctgagactgacctctgaagcctcaagggaagcctgtgccggtcgcttggaagtgttctacaacggcgcttggggcacagttgggaagtcttccatgtctgagacaactgttggcgttgtctgtaggcagttaggctgtgccgacaagggtaagatcaatccagcaagcctggacaaggccatgtctatccccatgtgggttgataatgtccagtgtccaaagggtccagataccctgtggcagtgccccagttcaccctgggagaaacgcctagcatctccctcagaagaaacatggatcacctgcgacaacaagattaggctgcaggagggccctaccagctgctccggccgagtcgaaatctggcatggaggcagctggggtactgtatgtgatgacagctgggatttggacgacgcccaggtggtgtgtcagcagctagggtgcggcccagccttgaaagctttcaaagaagccgagttcggacaagggactgggcctatctggctcaacgaagtgaagtgtaaggggaatgagtcttctctatgggactgtcccgcacgcaggtggggccactcagagtgcggacataaggaagacgctgctgtgaattgcactgatatatcagtccaaaaaactccccaaaaggcaactactggacgttctagtaggcagtccagctttatcgctgtgggtattcttggagtcgtccttctggcaattttcgtggctctgttcttccttacaaagaaacggagacaacggcagaggttagcagtttcaagccgcggagaaaatctcgtgcatcagattcagtaccgggagatgaatagttgtcttaacgctgatgacttggacctgatgaactccagcggaggtcatagcgagccacactag

SEQ ID NO: 217442 - DNA, 555 bp, synthetic construct
  misc_feature 1..555: note = Description of Artificial Sequence: Synthetic coding sequence
  source 1..555: mol_type = other DNA
atgtcccgactgagtcgtagtctgctgtgggctgccacttgtctgggcgtactgtgtgtcttgagcgccgataaaaacacaacgcagcacccaaacgttactactctggcaccaatcagcaacgtcaccagcgcacctgttactagcctgccactggtcactactccagcgcctgagacttgtgagggacggaactcttgtgtctcatgtttcaatgtgagcgtggtgaatacgacctgtttctggattgagtgcaaggatgaaagctattgttcacacaatagtacagtgagcgactgccaggtaggcaacacaacagacttttgtagcgcaaagccgaccgtccagcccagtccaagcactacttcgaaaacagtgacaacgtcaggcacaaccaataatacagtgactcccacgtctcagccagtcagaaagtcgacattcgatgctgcttcattcattggcggaatcgtcctcgtcttaggagttcaggcagttatattctttctatacaaattttgcaagagcaaagagcgaaactaccacaccctgtag

SEQ ID NO: 217443 - DNA, 594 bp, synthetic construct
  misc_feature 1..594: note = Description of Artificial Sequence: Synthetic coding sequence
  source 1..594: mol_type = other DNA
atgtcacgcctcagcagatctttactgtgggcagccacgtgcttgggtgtattgtgtgtcctgagcgctgacaagaatacgacccaacaccctaacgtgactacactggctccaataagtaatgtaacctctgccccagttacttccctaccacttgtcacaactccggctccggagacctgtgaaggacgcaactcgtgcgtgagctgcttcaatgttagcgtggtaaataccacctgcttttggatagagtgcaaggatgaatcctactgcagccataactccaccgtctccgactgccaagtcgggaacacgaccgacttctgcagtgtgtctacagctacaccagtcccaacagccaattccacagcaaagcctactgtccaaccatctccatcgaccacttccaaaaccgtgacgactagcggaacaacgaataacactgtcacaccaacaagccagcctgtgcggaaatcaacctttgacgcggctagcttcatcggtggaattgtactggtgcttggagtgcaggcagtcatctttttcctttacaaattctgtaagtcaaaagaaagaaattaccacacactgtag

SEQ ID NO: 217444 - DNA, 537 bp, synthetic construct
  misc_feature 1..537: note = Description of Artificial Sequence: Synthetic coding sequence
  source 1..537: mol_type = other DNA
atgtctcgactctcccgaagtttgctatgggctgcaacatgtctcggcgtcttgtgtgtgctgtcagcagacaagaatactacccagcatcctaacgtgactacactggcccctataagtaatgtaacctctgcacccgttacgtctctgccattggtgacaacccctgccccagagacctgcgaaggtaggaactcttgtgtgtcctgttttaatgtttccgtggtcaatacgacctgcttttggattgagtgcaaggatgaatcttactgctcacataatagtaccgtctctgactgccaagttggcaacactacagatttttgtagcgtgagcaccgccacacctgtacctacagcaaatagcactgggactaccaataatacagttactccaacctctcaaccagtgagaaagtctacattcgacgccgcttctttcattggagggattgtcctggtcctcggtgtgcaggctgtaatctttttcctctacaagttctgtaagtcaaaagagcgcaactatcacacactgtag

SEQ ID NO: 217445 - DNA, 498 bp, synthetic construct
  misc_feature 1..498: note = Description of Artificial Sequence: Synthetic coding sequence
  source 1..498: mol_type = other DNA
atgagccgcctctccagaagtttactctgggccgctacatgtcttggggtcctttgcgtcctttctgcagataaaaacaccacacaacaccccaacgtgaccaccttagccccaatctcaaacgttaccagtgcacccgtgacaagcctgccactggtgactacacctgcaccggagacctgtgaaggacggaacagctgtgtgtcttgcttcaacgtctccgtggtgaataccacgtgcttctggatcgagtgtaaagatgaaagctactgcagccataactctacggtgtcggactgccaagtggggaatactacagacttctgctctggtactacgaataacaccgtaacgccgacaagtcagcctgtccgcaaaagcacattcgatgcagcttcctttatagggggaatcgtgctggtcctgggagtgcaagccgtgatctttttcctgtataaattttgcaaatccaaagagcgcaattatcacacgctctag

SEQ ID NO: 217446 - DNA, 570 bp, synthetic construct
  misc_feature 1..570: note = Description of Artificial Sequence: Synthetic coding sequence
  source 1..570: mol_type = other DNA
atgtctcggctgagcagatctttattgtgggcagcaacatgtctgggcgtcctttgtgtcttgagtgctgacaagaacacaactcagcacccgaacgtaacaacccttgccccaatatccaatgtaacatctgcccctgttacatctcttcctctggtgactactcctgcccctgagacctgcgaaggcagaaactcatgcgtgtcgtgctttaacgtgtccgtggttaatactacttgcttttggattgagtgcaaggatgaatcttactgctcccacaactctacagtctccgattgccaggttgggaatacaacggatttttgctccgtgagtacagctacccctgtgccaaccgccaacagtacagccaaacccacggtgcaaccaagcccatcaactacttccaagacagtgacaacttccggcactaccaacaatacggtgacgccaacaagccaacctgtgagaaaaagcacctttgacgctgcgagttttatcgggggtatcgttctggtgctagagataaggtgccacacacgcaactatatccctgacctcaaaaaatag

SEQ ID NO: 217447 - DNA, 474 bp, synthetic construct
  misc_feature 1..474: note = Description of Artificial Sequence: Synthetic coding sequence
  source 1..474: mol_type = other DNA
atgtcaaggctgagccgatccctgttgtgggccgctacttgccttggagttctttgcgtgctgtctgccgataaaaacaccacccaacatcccaacgtgaccacacttgcccctatttctaacgtgacatctgcacctgtcacctctctaccactggtaaccactccagctccggaaacttgcgagggccgaaactcctgcgtcagctgtttcaacgtgtctgttgtcaacacaacttgcttttggatcgagtgcaaagatgaatcatactgttctcataattccaccgtgtcagactgccaggtcgggaacaccacagatttctgttcggtgtccacggcgacaccagtacccactgccaactccactgctaaaccaacagttcaaccatctccttcaacgacgtcaaagaccgtgacaacctcagaaataagatgtcacacgcggaattacattcctgatctcaagaagtag

SEQ ID NO: 217448 - DNA, 747 bp, synthetic construct
  misc_feature 1..747: note = Description of Artificial Sequence: Synthetic coding sequence
  source 1..747: mol_type = other DNA
atgagtgcagtgttactgcttgctctgttgggttttatactacctcttcccggtgtgcaagctctgctgtgccagtttggcacagtgcagcacgtgtggaaggtgtctgacttaccacgccaatggacaccgaagaatacatcctgcgatagcggtcttggctgccaggataccctcatgctgatcgaaagcggaccgcaggtcagtctggtgctctccaagggatgtaccgaggctaaggatcaagagcctcgcgtgacagaacataggatgggtcctggcctaagtctgatttcctatacttttgtgtgtaggcaggaagacttctgcaacaatttggtaaatagcttgccgctttgggccccacagccaccagccgatccagggagccttagatgccccgtctgtctgtcaatggagggctgtctggagggtactacagaagaaatctgccccaagggcaccactcactgttatgatggtttactccgcctgcgaggcggaggaattttctccaatctccgcgtgcaagggtgcatgccgcaacccgtttgcaacctccttaatgggacccaggagataggacccgtcggtatgaccgaaaattgcgacatgaaggatttcctgcagctcaagcctgtgggcctgctggaagaacacaacgttggggaaaaggagagaggccaggggcagcaccagtgcgtgcagctcgattggcaaaaacgtgcagccacagggatattctag

SEQ ID NO: 217449 - DNA, 438 bp, synthetic construct
  misc_feature 1..438: note = Description of Artificial Sequence: Synthetic coding sequence
  source 1..438: mol_type = other DNA
atgagcgctgttctgctgttggcactgctgggatttatactgccactgccgggtgtgcaggctttgctatgtcagttcgggaccgtccagcacgtctggaaggtaagcgacctgccgaggcagtggactccgaagaacaccagctgtgactccgggctaggatgtcaggatactctcatgcttatcgaatcaggccctcaagtgagccttgttctttcaaagggctgcaccgaagccaaggatcaggagccgagggtaaccgagcatcggatggggcctggactgagtctgattagctataccttcgtctgtcggcaagaagacttttgtaacaacctcgtgaattcactgcctctctgggcgcctcagcccccagctgatcccatgatgggtgcagccgagggtccatttggcaaggccgagcaagtagattcatag

SEQ ID NO: 217450 - DNA, 438 bp, synthetic construct
  misc_feature 1..438: note = Description of Artificial Sequence: Synthetic coding sequence
  source 1..438: mol_type = other DNA
atgagtgccgtacttctcctcgccctcctcgggtttattttacctttgcccggagtgcaggccctgttgtgccagtttgggactgtacagcatgtttggaaagtctccgatcttccgcgacaatggacccctaaaaacacatcatgcgattccgggctggggtgccaggacaccttgatgctgatcgaatccggccctcaggtctccctcgttctatccaagggctgcaccgaggccaaggaccaggagccccgtgtaaccgagcatcgaatgggtcccggtttgtcactgatcagctacacatttgtgtgccgtcaggaagacttctgcaacaatctggtgaatagcctgccactatgggcacctcagcctcctgcagatcctatgatgggggctgctgagggcccatttggtaaagccgagcaggtcgattcttag

SEQ ID NO: 217451 - DNA, 1671 bp, synthetic construct
  misc_feature 1..1671: note = Description of Artificial Sequence: Synthetic coding sequence
  source 1..1671: mol_type = other DNA
atgccccctccgagactcttgttcttcctgctgttcttgacccccatggaggtcaggccagaagagccgcttgtggtcaaggtcgaagagggagacaacgccgtgctgcaatgcttaaagggcacttcagatggacctacgcagcagctgacctggagtcgtgagtcccctttgaagccgtttttgaaactgtcactggggctgccaggacttgggatacatatgcggccactggccatctggctgtttatttttaatgtgagtcagcagatgggtgggttctacctgtgccagccagggcctccttcggaaaaagcatggcagccaggatggacagtcaatgtggagggctccggagagctcttccgatggaacgttagcgacttaggcggtttgggctgtggattgaagaacaggagttctgagggcccaagctctccctccgggaagctgatgtctcctaaattatacgtgtgggctaaggatcggcctgagatctgggaaggggagccaccctgcctcccgcctcgtgacagcctgaatcagtcactgagtcaggatctgacgatggctccaggttcgacgctgtggctgtcctgtggagtccctcctgactcagtgtctcggggacctctgtcatggacacatgtacaccccaaggggccaaaaagccttctatccctggaactaaaagatgatagaccagcccgagatatgtgggtgatggagacaggactgctgttgccccgagccaccgcccaggatgcaggaaaatactactgtcatcgcggaaacttaactatgagctttcatctcgagatcaccgccaggccagttctgtggcactggctgctgcggactggaggatggaaagtttctgcagtcacccttgcttatctgattttttgcctgtgctccttggtggggattcttcatctccagagggccctggtcctccgtagaaaaagaaaacggatgacagatcccaccagaaggttctttaaagtgactcccccacccggaagcggcccacagaaccagtatggaaacgtgttgtccctgcctaccccaacctctggactgggaagggctcaacgttgggcggcaggattagggggtaccgctccttcatatgggaatccttcctctgacgtgcaggcagacggcgctctagggagtcggagccccccaggtgtaggacctgaagaagaagagggggagggatacgaagagcctgatagtgaggaggactccgagttttatgagaacgattcaaatctcggacaggaccaactgtcacaggatggctcagggtacgagaatcctgaagatgagcccctggggcctgaagacgaggactcattctccaacgccgaatcttatgaaaacgaagatgaggaactgacccagccggtcgcccgaaccatggatttcctgtctcctcatgggtctgcatgggaccccagtcgcgaagccacgtctcttggaagccagtcctacgaggatatgcgaggcatcctttatgctgcaccccagcttcggtccatccggggacagccaggccctaaccatgaagaagacgcagatagttatgaaaacatggacaatcccgacggccctgaccccgcttggggcggaggcggaagaatgggtacatggagtactcggtag

SEQ ID NO: 217452 - DNA, 1092 bp, synthetic construct
  misc_feature 1..1092: note = Description of Artificial Sequence: Synthetic coding sequence
  source 1..1092: mol_type = other DNA
atggaagttcgacctgaagagccactggtggtgaaggtggaagaaggcgacaacgccgtgttgcaatgcctaaagggcacaagcgatggccctacccagcagctgacatggtcacgcgagtccccactaaagccattccttaagctgtctttgggcctaccgggacttggcatacacatgcgcccactgggaaaatactattgccaccggggaaacctgacaatgtcatttcatctagagattaccgccagacccgttttgtggcactggttgctcagaacaggtggttggaaggtatctgccgttacattagcctacctgattttctgcctgtgctccttagttggcatcctacatttgcagagggccttagttctacgccgtaagagaaaaaggatgacagaccctacacgacgcttctttaaggtcaccccacccccaggcagcggaccacaaaaccagtatggcaatgtgctgtctctgcctactcctaccagcggtctgggacgcgcacaacgttgggccgcaggactggggggtaccgctccaagctatggcaacccgagttccgacgtgcaggcggatggagccctgggcagccgttcccccccaggagtgggccctgaggaagaagagggggagggttatgaggagccggattccgaggaggactcagagttctacgaaaacgactcgaatctcggccaggatcagctttcccaggatgggtcggggtacgagaatccggaggatgagccactgggaccggaggacgaggacagctttagcaacgccgaaagctatgaaaacgaagacgaagagctgacacaaccagtggcaaggactatggatttcctgtctccacacggaagcgcttgggaccccagccgcgaagctacatcccttggcagccagtcttacgaggacatgcgcggtattttatatgctgcgcctcagctcagaagcattcggggacagccgggaccaaaccacgaggaggacgcggacagttatgagaatatggataatccagatgggccagatcctgcatggggtggcggaggacgaatggggacatggtcaactcgatag

SEQ ID NO: 217453 - DNA, 1218 bp, synthetic construct
  misc_feature 1..1218: note = Description of Artificial Sequence: Synthetic coding sequence
  source 1..1218: mol_type = other DNA
atgtctccgaagctgtatgtttgggccaaagatcggcctgaaatctgggaaggagaaccaccttgtctgcctcctcgtgattccctcaaccagagcctgtctcaggacctgaccatggccccaggctcaaccttatggctttcttgtggtgtgccaccagactctgtatctcggggacccttaagttggacccatgtacacccaaagggtccaaagagccttcttagcctggaacttaaggacgataggcccgctagagacatgtgggtcatggagaccggtctcctgttgccaagggcaacagctcaagatgccggaaagtactactgtcatcgcggaaacctgactatgtcgttccatctggagattacggctaggccggtactctggcattggctattgaggactggtggctggaaagtttccgcagtcactcttgcctacctaatcttctgcctctgcagtttggtggggatcctccatctccaacgagctttagtgctaaggcggaagagaaagaggatgaccgaccctacccgacgtttcttcaaagtcaccccacccccaggttcaggtccacaaaaccaatatggaaatgtcctttcactccctacccctacctccggtttgggccgagctcaacggtgggcagccggtctcgggggtaccgccccatcctatggaaacccgagttctgacgtacaagcggacggcgcactgggttcacgctcgccgcctggagtgggccctgaggaggaagagggcgagggctacgaagagcctgattcagaggaggactcagagttctacgagaacgactctaacttgggacaggatcaactctctcaagacggatcggggtacgaaaatccagaagacgagccattgggccctgaggacgaggatagtttcagtaatgccgaatcctacgagaacgaagatgaggagctcacccagcccgttgcaagaacaatggacttcctctcaccccacgggtcggcctgggatccatctcgggaagctactagtctgggttcacagagttacgaagacatgaggggaatactttatgcagcacctcagttgagatccatcagggggcagccaggcccaaatcacgaggaggatgcagatagttacgaaaacatggataacccagatggacctgaccctgcgtggggaggcggagggaggatggggacttggtctacaaggtag

SEQ ID NO: 217454 - DNA, 1674 bp, synthetic construct
  misc_feature 1..1674: note = Description of Artificial Sequence: Synthetic coding sequence
  source 1..1674: mol_type = other DNA
atgccaccaccgcgactgttgttctttttgctgtttcttactccaatggaggtgaggccagaggaacctcttgttgtaaaagttgaagagggagataacgctgtgcttcagtgtctgaagggaacttccgacggacctacacagcaactcacgtggagccgcgagtctcctcttaaaccattcttaaagttgtcccttggcctgcctggactagggatacacatgagacctctggcaatctggctgttcatctttaatgtgagccagcagatgggaggtttctacctgtgccagcccggacccccttctgagaaagcttggcagcccggatggaccgtgaatgtcgaaggaagcggggaactctttcgctggaatgtatccgacctaggaggtctcgggtgtggactgaaaaatcggtcatccgaaggacccagttcacccagtgggaaactgatgagtcctaagctctatgtgtgggcaaaagatcgccctgaaatatgggagggcgagcccccatgcctacctccacgcgattcattgaatcaaagcttgtcccaggacttgacgatggcccctggaagtaccctatggttgtcctgcggcgtgcccccagactccgtttccaggggaccactgtcgtggacgcacgtgcaccctaaaggtcctaagtctctgctcagtcttgagcttaaagatgaccgccctgccagggacatgtgggtgatggagaccggcctgctgctgcctagggccactgcccaggatgcaggtaaatattactgccaccggggaaatttaacaatgtcctttcacctagagattaccgccaggccggtcctctggcactggctgctgcgaactgggggttggaaagtttccgcagtgaccctggcttaccttatattctgtctgtgcagcctggtgggcatcctgcatctgcagagggccttggtattgaggagaaagcgcaaaaggatgacagaccctacccggagattcttcaaggtgacacccccacccggaagtggccctcagaatcagtatgggaatgtgttgtcgctgcccacacccacctcgggcctcggacgagcccagagatgggcagccggactgggcggtacagcgccaagctacggtaatccgtcatcggacgtgcaagccgatggagcactgggctctaggtcaccgccaggggtcgggccagaggaagaggaaggggagggctatgaggaaccagatagcgaggaggattccgaattctatgaaaatgactctaatctgggtcaggatcaactttcacaggacggatctggatatgagaatcctgaagacgagccactggggccagaggatgaagacagcttcagcaacgctgaaagctatgagaacgaggacgaggaactcacacaacccgtcgctagaacaatggattttcttagtccacacggcagcgcatgggatccttcaagggaggccacgagtctggccggaagccagagttacgaagatatgcgagggatcctctatgcggctcctcagcttagatccattagaggacagcctgggccaaaccatgaagaggacgcagattcatatgagaatatggacaatcctgacggcccagatccagcctgggggggagggggtcgcatggggacatggtcaaccaggtag

SEQ ID NO: 217455 - DNA, 984 bp, synthetic construct
  misc_feature 1..984: note = Description of Artificial Sequence: Synthetic coding sequence
  source 1..984: mol_type = other DNA
atgctctttctgctgttgcctctgctcgctgtccttccaggagacggcaatgctgatggcctgaaggagcccctgtctttccacgtgacatggatcgccagtttttacaatcactcctggaaacagaaccttgtgtcaggatggctcagcgacttacagacccacacatgggattcaaattcgtccacaatagtcttcctctgtccatggagccgcggaaacttttcaaacgaggaatggaaagagttagagacgctcttcagaattcgcaccatacgctctttcgagggaattcgacggtatgctcatgagcttcagtttgagtatcccttcgagattcaggtgactggtgggtgcgaactccattctggcaaggtgtctgggagcttcctgcagttggcctatcagggtagtgattttgtctcattccagaataatagctggctgccctatccagtcgctggcaatatggctaagcacttttgcaaggtgctaaatcaaaatcagcatgaaaacgacataacccacaacttgctctctgatacttgtcccagattcatcttggggctgctggatgccggaaaggcccacctacaaagacaggttaaacccgaagcttggctgtcccacgggccatcgcccggaccgggacacctgcaactagtttgtcatgtcagcggattttatcccaagccagtatgggtgatgtggatgaggggcgaacaagaacagcaaggcacacagcgtggggacatcctcccctccgccgacggaacttggtacctccgggctaccctcgaggtcgcagctggagaggctgctgatctgtcatgtcgggttaagcacagcagcctggaagggcaagatatcgtcttatactgggaacaccactcttcagtaggattcataatactcgcggtgatcgttcccctactgctgcttattggcttggccttatggttccggaagcgctgcttttgttag

SEQ ID NO: 217456 - DNA, 1002 bp, synthetic construct
  misc_feature 1..1002: note = Description of Artificial Sequence: Synthetic coding sequence
  source 1..1002: mol_type = other DNA
atgctcctcctaccattccaactgctagcagtcctgttccctggtggcaattccgagcacgcgttccagggaccaacctcttttcatgtgattcaaacatccagtttcactaactccacctgggcgcagactcaggggtccgggtggctcgacgacctgcagattcacgggtgggattccgactctgggaccgccatttttttaaaaccttggagtaagggaaatttctctgataaagaggtcgcggagcttgaagagattttcagagtctatatcttcgggttcgcaagggaggtgcaggacttcgccggtgattttcagatgaagtatcccttcgaaattcaggggattgcgggatgcgagctgcattcggggggtgccattgtctcttttctcagaggggcacttggcggactagactttttatcggttaaaaacgcttcttgtgtcccctcccctgagggagggagccgcgctcagaagttctgcgccctgatcatccaataccagggcatcatggagaccgttcgtatccttctgtacgagacatgtccccgatatttgctcggggtgctgaatgcaggcaaggccgatctgcaaaggcaggtcaaacccgaggcctggctcagctctggaccttcacccggtccgggaaggctgcagctagtttgtcatgtctctggtttttatccaaagccagtgtgggtgatgtggatgagaggtgaacaagaacagcagggcacccaattgggcgacatccttcccaacgcaaactggacctggtatctccgcgcaaccctggatgtggccgacggtgaggcggctggtctgagttgccgtgtgaagcacagctccctagaaggtcaggatatcattctttactggaggaaccctaccagtattggtagcatcgtgttggccatcatagttccgagtctgctcctcctgctgtgtctggccttatggtatatgagaaggcggtcctaccagaacattccttag

SEQ ID NO: 217457 - DNA, 741 bp, synthetic construct
  misc_feature 1..741: note = Description of Artificial Sequence: Synthetic coding sequence
  source 1..741: mol_type = other DNA
tgaagctccttcactaacagcacttgggcacagacgcagggtagcggctggcttgacgacctccaaattcacgggtgggatagcgactccggaactgcaatcttccttaaaccttggtctaaggggaacttcagcgacaaagaggtcgccgaacttgaggagatctttagggtgtacattttcggattcgccagggaggttcaggacttcgcaggggatttccagatgaagtacccttttgagattcaaggtatcgctggatgcgaactgcactccggcggagccattgtgtcctttcttaggggggcacttggcggattagattttcttagcgtcaagaatgcctcctgcgtgccctcacctgagggaggctcacgcgctcagaaattttgcgctctgattatccagtaccagggaattatggagactgtgcggatccttctgtatgaaacctgtcctagatatttgctgggggtgctgaacgcgggaaaggccgacctgcagcgccaggtgaaacctgaagcgtggctgtccagcggaccctcaccgggtccaggaagactgcagctggtgtgccacgttagcggattttatcccaagcccgtgtgggtgatgtggatgaggggcaacccaacctcaattggaagcatagtgttggctatcattgttccctctctgctgttgctcctgtgtctggcgttatggtacatgagacgacggagctaccagaacatcccctag

SEQ ID NO: 217458 - DNA, 1041 bp, synthetic construct
  misc_feature 1..1041: note = Description of Artificial Sequence: Synthetic coding sequence
  source 1..1041: mol_type = other DNA
atgctcttcctgcaattcctgcttttagccctcctgctaccaggcggagacaacgccgacgccagtcaggaacacgtgtcatttcacgtgatccagattttttcgtttgttaaccaatcatgggcgagaggccagggcagtggatggctggacgaattgcaaacccatgggtgggatagcgagtctgggacaattatcttccttcataactggagcaagggtaacttctctaacgaggagctctctgacctggaattgctctttagattttatctgttcggtctgactagggagatccaagaccacgcctcccaggactactcaaaatatcctttcgaagtccaggtaaaggccggatgcgagctccactcaggcaagagtcctgaggggttcttccaagtcgcgttcaacggcctggatctcctgagctttcaaaacacaacttgggtgcccagcccaggctgtggcagtctcgcccagtctgtatgccacctgttaaaccaccaatacgaaggtgtcactgaaaccgtgtacaatctgattcgcagtacgtgtccacgcttccttctgggtctcctcgacgcaggtaagatgtacgtccatagacaggtgcgtcccgaggcctggctgtcgtctcgcccatccctcggcagcgggcagctgctgctagtctgtcacgctagcggcttttaccctaaaccagtgtgggttacctggatgaggaatgaacaggagcagttgggaaccaaacacggagacattctgcctaacgctgatgggacctggtatcttcaggtgatcctggaagtagccagtgaggagcctgcaggtctgtcctgccgcgtcagacactcttctttaggtgggcaagacatcattttatactgggcacatatacgcacgtcttgtgagaccctgcccccagatagtccaattgtactgcgcacccaacagccgagaagcctggtgcaatactccgatgccatcccctccacactccatctcaactgtttttccttttgtatcatcaatatttgttag

SEQ ID NO: 217459 - DNA, 1002 bp, synthetic construct
  misc_feature 1..1002: note = Description of Artificial Sequence: Synthetic coding sequence
  source 1..1002: mol_type = other DNA
atgctcttcctgcagttcttactcctcgcattgcttctgccaggcggagataatgctgacgcttcccaggaacacgtgtcgttccacgtgattcagatcttctccttcgtgaaccagagctgggcccgtggccaagggtctggctggttggatgagctgcagacacacggctgggactctgaatcagggactataatcttcctgcacaattggtccaaggggaactttagtaatgaagagttaagcgatctggaactcctttttaggttctacctcttcggcctgacgagggaaatccaagaccatgcgagtcaggactactctaagtacccgtttgaagtccaggtgaaggcgggatgtgagctgcactcaggaaaatcgccagagggcttctttcaagtggccttcaatggactcgacctcttaagctttcagaataccacctgggtgccaagcccgggatgtgggtcgctggctcaaagcgtctgtcatctactcaatcatcagtacgagggagtcacagaaaccgtctataacttgattagatcaacgtgtccacgctttctgctcggactgctggacgcaggtaagatgtatgtccaccgacaagtgcgccctgaggcatggctctcatctagaccatccttggggagtggccagctgctcctggtttgccatgcatcagggttttaccccaaacccgtttgggtaacgtggatgcggaacgagcaggagcagcttggcactaagcacggggatatcctccctaatgctgacggaacttggtacctgcaggtgatcttggaggtggcttccgaggaaccagccggactttcttgccgggttcgccactctagtctgggaggccaggacatcattctgtactggggccaccacttctctatgaactggattgcactggtggtcattgtcccccttgtgatcctgatcgtccttgtgctgtggttcaaaaaacattgctcctatcaggacatcctttag

SEQ ID NO: 217460 - DNA, 846 bp, synthetic construct
  misc_feature 1..846: note = Description of Artificial Sequence: Synthetic coding sequence
  source 1..846: mol_type = other DNA
taatttttacacaattggtcaaagggaaacttcagcaacgaagagttgagcgacctggagctgctttttcgtttctacctttttggcctgacccgggagatccaggaccatgcctcccaggactactcaaagtacccttttgaggtgcaggtaaaggccggatgtgagctgcatagtggcaaatcccctgagggtttctttcaggtagcctttaacggtcttgatctgctcagctttcagaatactacctgggtgcctagtccaggttgtggctctctagctcagtctgtttgtcatttgctaaaccaccagtatgaaggtgtaactgaaacggtttataatctgatccggtctacttgtcctcgcttcctactgggcttgctagatgcaggcaaaatgtatgtgcaccgtcaggtgagaccagaggcctggttgagctcacggccaagcctcgggagtgggcagcttctgctggtctgccatgcctccggcttctaccccaaacccgtgtgggtgacctggatgcgaaacgaacaggagcaactaggcaccaaacatggagacattctccccaacgccgatgggacctggtacctgcaggtcatcttagaagtcgctagtgaagagccagccggattgagctgtagggtgaggcactctagcctggggggtcaagacatcattctgtactgggcacatatcagaacctcctgcgagacactaccacccgactcccctatagttttgagaacccagcaacccagaagcctggtgcagtactctgacgccattccctctacattgcatttaaactgtttcagcttttgcatcattaacatctgctag

SEQ ID NO: 217461 - DNA, 411 bp, synthetic construct
  misc_feature 1..411: note = Description of Artificial Sequence: Synthetic coding sequence
  source 1..411: mol_type = other DNA
atgtatgtgcacaggcaggtgagacctgaagcttggctttcgtccaggcctagtctgggcagcggccagttgctcctggtgtgccacgcctcgggattctatcctaaacccgtgtgggtgacgtggatgagaaacgaacaggaacaattggggaccaagcacggcgacatcctgcccaacgccgacggaacatggtacttacaggtgattctggaggtagcatctgaggaaccagctggcttatcctgtagagtccgccatagtagtcttggtgggcaggatatcatcttgtattggggacaccatttctccatgaattggatcgctttagtagtgatcgtgccactggtcattctgatcgtactggtgctctggttcaaaaagcactgtagctatcaggatattctctag

SEQ ID NO: 217462 - DNA, 1008 bp, synthetic construct
  misc_feature 1..1008: note = Description of Artificial Sequence: Synthetic coding sequence
  source 1..1008: mol_type = other DNA
atggggtgtttgctgtttttgttgctctgggccctcctccaggcgtggggttcggctgaggtaccccagaggttgttccccctcaggtgcttgcagatctcttccttcgcaaatagcagctggactaggacggatggactcgcttggcttggggagctccaaacacactcctggtcaaacgattccgatacagtcaggtcattaaagccatggtcccaggggaccttcagtgatcagcaatgggaaacccttcagcatatatttcgcgtgtatagaagtagctttactcgagacgtcaaggagttcgctaaaatgctcaggctatcataccctctcgaattgcaggtctctgctggatgcgaggtgcaccctggaaatgcctctaataacttttttcatgttgctttccagggcaaggatatcctctctttccaggggacctcatgggaaccgactcaagaggctccgttatgggtgaatctggccatccaggtgttgaatcaagataaatggacccgggagactgtgcaatggctgttaaacggcacctgcccccagttcgtgtctggattactggagtctgggaaatcagagttaaagaagcaggtcaagccgaaagcttggctctcccgaggcccttctccagggccagggagactgctgttggtttgccacgtgtccggcttttaccccaaacccgtgtgggtgaagtggatgcgtggggagcaggagcagcagggcacccagcctggcgacattctgcccaatgccgacgagacctggtatctgcgcgcaactttggatgtggtagccggagaagccgcaggtcttagctgccgggtcaagcacagcagcctggaaggccaggatattgtgctgtactgggggggttcctacacctccatgggcctgattgccctcgcagttctggcgtgcctcttgtttctgttaatcgtgggttttaccagcagattcaagagacaaacaagctatcagggagttctgtag

SEQ ID NO: 217463 - DNA, 435 bp, synthetic construct
  misc_feature 1..435: note = Description of Artificial Sequence: Synthetic coding sequence
  source 1..435: mol_type = other DNA
atgctgctgctgtttctgttatttgagggtctctgctgtccaggagagaacaccgccgtgaaaccggaggcttggctgagttgtgggccatctccgggtccgggaagattgcagttagtgtgtcatgtgtccggtttttatccgaagcctgtgtgggtaatgtggatgcggggaggttactcaatcttccttatactgatatgtctcaccgtgatagtgacgctcgtcatcctcgtggtcgtggattctcgcctcaagaagcagagttccaacaaaaacatcctttccccccacacacctagtccagtgtttctcatgggagccaacactcaggacactaaaaactcacggcaccagttttgtcttgcacaggtcagttggatcaagaacagagtgttaaaaaagtggaagacaagattaaaccagctctggtag

SEQ ID NO: 217464 - DNA, 696 bp, synthetic construct
  misc_feature 1..696: note = Description of Artificial Sequence: Synthetic coding sequence
  source 1..696: mol_type = other DNA
atgctgctcctgttcctgctcttcgaaggactgtgctgccccggagaaaacacggccgcaccccaagcattacaatcttaccacttagctgccgaagagcaactttcgtttcgcatgttacagacatcaagcttcgccaaccacagttgggcccacagtgagggctcaggctggttgggtgatctgcagacccacggctgggacactgtgttgggaaccattaggtttctcaagccgtggtctcatgggaatttcagcaagcaagagctgaagaacctccagagtctgtttcagctatattttcactctttcatacagatcgttcaggccagtgccggacaatttcagctcgaacttaaacccgaggcgtggctgagttgtggccctagtccaggtcccggacggctgcaactggtctgccacgtgtccggattttatccaaaacctgtgtgggtaatgtggatgagaggagggtatagcatcttcttgattctcatctgcctgactgtaatcgttactctggtgatcctggtggttgtggactctagactgaaaaagcagtcccccgttttccttatgggggcaaacacacaagatacaaaaaatagccggcaccagttctgccttgcacaggtcagctggatcaaaaaccgggtgctgaagaagtggaaaacgcggctcaaccagctctggtag

SEQ ID NO: 217465 - DNA, 861 bp, synthetic construct
  misc_feature 1..861: note = Description of Artificial Sequence: Synthetic coding sequence
  source 1..861: mol_type = other DNA
atgttactcctgttcctcctttttgaaggactgtgctgccccggagagaatactgccgcaccccaggcgctgcagagctatcatctagcagctgaggagcagctgtcttttcgaatgctgcagacatcaagtttcgcaaaccactcatgggcccattcggaagggagcgggtggttgggcgacctgcagacacatgggtgggatacagtcctagggaccatccggtttctgaaaccgtggagtcatggaaatttcagtaaacaggagctgaagaacctacagtccctcttccagctgtatttccattccttcatccaaatcgttcaagctagcgcgggtcagtttcagctggagttgaagcctgaggcttggctgagctgcggtccaagccccggacccggtcgcctacagcttgtgtgccacgtgtctggtttttacccaaaacctgtgtgggttatgtggatgcgaggcgagcaggaacaacgaggcacccagcggggtgatgtgctccctaacgcagacgagacctggtatctccgcgcaactctcgacgtcgctgcgggagaggctgcagggctctcgtgccgcgttaagcacagctccctgggagggcatgacttaattatacactggggaggttattcaatttttcttatactcatctgcctgaccgtcatcgttaccttggtgattctagtggtggtcgactcaaggcttaaaaaacagtcgcccgtgtttctgatgggcgctaacacccaggacactaaaaacagcagacaccagttctgtctcgcccaggtgtcctggattaaaaatagagtgttgaagaagtggaagacgaggcttaaccagctatggtag

SEQ ID NO: 217466 - DNA, 399 bp, synthetic construct
  misc_feature 1..399: note = Description of Artificial Sequence: Synthetic coding sequence
  source 1..399: mol_type = other DNA
atgttactgctgttcctgttattcgagggattatgttgtcccggtgaaaatacagccgtgaagcctgaagcctggctctcatgtgggcctagcccaggacccggtcgactgcagctggtatgccatgtctcagggttctatcctaagccagtgtgggtaatgtggatgcggggtgggtacagcatctttctgattctaatctgtctcacagtgatcgtcacgttggtaatcctcgtggttgtggattcccggcttaagaaacaatccccagtgttcctgatgggggctaacacccaggataccaagaacagcagacatcaattttgtctggcccaagtgagctggattaagaacagagtgttgaagaagtggaagacacggctcaatcagctctggtag

SEQ ID NO: 217467 - DNA, 1131 bp, synthetic construct
  misc_feature 1..1131: note = Description of Artificial Sequence: Synthetic coding sequence
  source 1..1131: mol_type = other DNA
atgcttctgctgtttttgttattcgagggtctgtgttgtcctggtgaaaataccgctgccccacaagcattgcagagttaccacctggcggcagaggagcaactgagcttccgcatgctgcagacctcctcatttgcaaatcattcttgggcccacagcgaagggtctggctggcttggagatctccagacacatggctgggatactgtcctgggaaccattcgatttctcaagccgtggtcacacggaaatttctccaaacaggagctgaaaaatcttcagagtctgtttcaactgtacttccattccttcatacagatcgtgcaggcctctgccggacagtttcaattggaatacccattcgaaatccaaatattagccggttgccggatgaacgcccctcagatttttctgaacatggcctatcagggctccgacttcctgtcattccaaggaatcagctgggagccttcaccaggtgctggcattcgggcacagaacatctgtaaggtgctaaatcggtatctggatatcaaggaaattctgcaaagtctcctgggccacacgtgcccgcgattcctcgccggactcatggaggccggagagtctgagctgaaaaggaaagttaagcctgaggcctggctcagttgtggcccatcacccggtcccggaaggttgcagctggtgtgtcatgtatcaggcttttaccccaaaccagtgtgggtaatgtggatgcgcggtgagcaggaacagcgcggtactcagagaggtgatgtactgccaaacgcagatgaaacatggtatctgagagcaaccctggacgtagctgctggcgaggccgcaggtctctcttgcagggtgaagcatagcagtctgggcggtcacgatttgataatccactgggggggttattcaatctttctcattctcatctgccttacagtgatcgtgaccctggttattttggtcgtagtcgacagcagactgaagaagcagtctccagtctttttgatgggcgcaaacacgcaggataccaagaacagccgacaccaattttgtctggctcaggtgtcatggataaagaacagggtcctcaagaaatggaagacacggttgaatcagctgtggtag

SEQ ID NO: 217468 - DNA, 873 bp, synthetic construct
  misc_feature 1..873: note = Description of Artificial Sequence: Synthetic coding sequence
  source 1..873: mol_type = other DNA
atgctgctgctgtttctgttgtttgagggcctgtgctgccctggagagaacaccgcggctccacaagcccttcaatcttaccacctggccgcagaggagcagctgagctttcggatgctacagacttcctcctttgcaaatcactcctgggcgcatagcgagggctcaggctggctgggggatttgcagacccatgggtgggacacagttctgggcaccatcaggttccttaagccttggtcccatggcaacttcagcaagcaagaactgaagaacctgcagtccctgtttcagctgtactttcacagctttattcaaattgtccaggcctcagcagggcaatttcagctcgaataccccttcgaaatccagatcctcgccggatgtaggatgaatgccccacagatatttcttaacatggcttatcaaggcagcgacttcttaagctttcaagggatctcatgggagccgagtcccggagccggaatccgcgctcagaacatctgcaaggtgctcaacagatacctggatatcaaggagatcctgcagtccctgcttggccacacatgtcctcgcttccttgccggtttgatggaggccggtgaatctgaactgaagaggaaggtaaaaccagaggcatggctgagctgcggccctagcccaggaccaggccgactccaactcgtctgccacgtgagcggcttttatccgaagcccgtatgggtcatgtggatgcgcggagagcaagaacagcgcggaacccagcgtggcgacgtgctgcctaatgccgatgagacctggtggatcttccacctgagccaccccgatttatttgactgcgattcatatccaggtcatattggatgcagctag

SEQ ID NO: 217469 - DNA, 183 bp, synthetic construct
  misc_feature 1..183: note = Description of Artificial Sequence: Synthetic coding sequence
  source 1..183: mol_type = other DNA
tgagtgtcaggattctatcctaagcccgtatgggttatgtggatgagaggcgagcaagagcaaagaggcacccagcggggtgatgtgcttcctaatgcggatgaaacttggtggatattccacctcagccacccagatctgtttgactgtgattcgtacccaggccatatcgggtgttcatag

SEQ ID NO: 217470 - DNA, 966 bp, synthetic construct
  misc_feature 1..966: note = Description of Artificial Sequence: Synthetic coding sequence
  source 1..966: mol_type = other DNA
atgctgcttttatttctgctgttcgaaggactctgctgcccgggtgaaaacaccgccgcaccacaggctctgcaatcgtatcatctggctgctgaggaacaattaagcttccgaatgctgcaaacctcctcctttgcaaaccactcctgggcgcattccgaaggatccggctggttaggcgacctccagacacacgggtgggacactgtgctggggaccatacgattcttaaaaccatggtctcacggaaattttagtaagcaagaactcaagaacctgcagagcctgtttcagctctattttcactccttcatacagatagttcaggcaagcgccggtcagtttcaattggagtaccctttcgaaattcagattctggctgggtgtcgaatgaatgcaccccagatctttttgaatatggcttaccagggaagcgactttctgtcctttcagggcatcagttgggagcccagcccgggagcgggtattcgggcacaaaacatctgtaaagttttgaaccggtacctcgatatcaaagagatcctgcaaagtctgctaggccacacctgtcccaggttcctcgccggactcatggaggctggcgaatctgagctgaagcgtaaggtgaaaccagaagcctggttgagttgtggcccttcacccggacccggacggctccaattagtttgtcacgtttccggcttctatccaaaacccgtttgggtaatgtggatgaggggcggatactccatcttcctaatactgatctgcctgactgtgatcgtcacacttgtaattctcgtggttgtggatagtaggctgaagaagcagtcacctgtgttccttatgggggctaatacccaggacacaaagaacagccgtcaccaattctgcctggctcaagtttcctggattaagaaccgtgtgctgaaaaagtggaaaacacgattgaatcaattatggtag

SEQ ID NO: 217471 - DNA, 306 bp, synthetic construct
  misc_feature 1..306: note = Description of Artificial Sequence: Synthetic coding sequence
  source 1..306: mol_type = other DNA
atgcttttgcttttcctactgtttgaagggctttgctgccctggtgagaataccgctgtcaaaccggaggcttggttgtcctgcggtccgtctcccggacctggcaggctgcagcttgtttgccacgtgagtgggttctatcctaaacctgtgtgggttatgtggatgagaggtgaacaggagcaacggggtacacagcgcggagatgtattaccaaatgcggacgaaacatggtggatttttcatctcagtcaccccgatctgttcgactgtgactcctaccctggacacatcgggtgttcctag

SEQ ID NO: 217472 - DNA, 897 bp, synthetic construct
  misc_feature 1..897: note = Description of Artificial Sequence: Synthetic coding sequence
  source 1..897: mol_type = other DNA
atgcttctcctcttcctgctgttcgaaggcctttgttgcccgggtgagaacactgccgctcctcaggctctgcaatcttatcatctcgcagccgaggagcagctgagcttcaggatgttgcagactagtagtttcgcgaaccatagctgggcccacagcgagggatcagggtggctcggcgacctgcagactcacgggtgggatacagtcctgggtaccattagattcctcaagccctggtcccatggaaatttcagcaagcaggagcttaaaaacctgcagtcactgtttcaattgtatttccacagtttcatacagattgtccaggccagcgctggacaattccagctggaattgaagcctgaggcctggctgtcgtgtggtccttcccccggaccaggaagattgcagcttgtctgtcatgtttccggattctaccctaaacccgtgtgggtaatgtggatgagaggtgagcaggaacagaggggaacacagcgaggcgacgtcctgcctaacgccgatgaaacctggtatcttagggccacgttagatgtcgctgctggtgaggccgcaggcctgtcttgccgtgtcaagcatagttcgctcggtggccacgatctcataatccactggggtggctactctatctttttaatccttatctgcctcacggttattgtaacacttgtgattctggttgttgttgactccagactcaagaaacaatcctccaacaagaatatcctgtcgccacacacaccttctcccgtgtttctgatgggggcaaatacgcaggacactaagaactccagacaccagttttgcttggcacaggtcagctggataaaaaatcgagtgctgaagaagtggaagaccaggttaaaccagctgtggtag

SEQ ID NO: 217473 - DNA, 564 bp, synthetic construct
  misc_feature 1..564: note = Description of Artificial Sequence: Synthetic coding sequence
  source 1..564: mol_type = other DNA
atgctactgctgttccttctttttgaaggcctctgttgtcccggagagaacactgcagtcaagcccgaggcctggcttagttgtggcccaagcccaggtcccggaagactccagctggtgtgtcatgtctctggtttctacccaaaacctgtttgggttatgtggatgcgcggagaacaggagcagagaggaactcagagaggtgacgtgctgcctaatgccgatgaaacatggtacctaagagcaacactggatgtcgctgctggcgaggcggctggattgtcttgccgtgtgaagcactcatccctcggaggccacgatctgatcatccattggggaggttacagcatattcttgatcttgatttgcctgacagtgatcgtgacattggtgatattagtcgttgtggactctagactgaagaaacagagtcccgtctttctcatgggggcaaatacgcaagacacaaagaacagcaggcatcaattttgccttgcacaggtgagctggatcaagaaccgcgtgctgaaaaaatggaagacacgcctgaatcagctatggtag

SEQ ID NO: 217474 - DNA, 1167 bp, synthetic construct
  misc_feature 1..1167: note = Description of Artificial Sequence: Synthetic coding sequence
  source 1..1167: mol_type = other DNA
atgctgctcctttttctcctgtttgagggactatgttgtcccggtgaaaatacagccgctccccaggccctccagagctatcacctcgccgcagaggagcagttgagttttcggatgttacagacctcgtctttcgcaaatcattcttgggcacactccgaaggcagcggctggctgggggatttgcaaacccatggatgggacaccgttttggggacgataagatttctgaaaccttggagtcacggcaactttagcaagcaggaactgaagaatctgcagtctctgtttcagttgtactttcatagcttcattcaaatcgttcaggcttcagctggtcagttccagctggagtatcctttcgagatccagattctggccggatgtcggatgaatgcccctcagatcttccttaatatggcttatcaggggtcagacttcttgtccttccaggggataagctgggagccctcgcccggagctggcatcagggcccagaatatatgcaaggtgcttaatcgatacctggacattaaggagatcctccagtccctcttgggccatacctgccctagattcctagctggattaatggaggccggagagtctgagctgaaaagaaaggtgaaacctgaagcttggctttcctgcgggccatccccgggacccggacggttgcagttagtgtgccatgtcagcggtttttacccaaaacctgtatgggtaatgtggatgcggggagaacaggagcagcgcggaacccagcgcggtgatgtgctgcctaacgccgacgaaacatggtatctgcgagctaccctggatgtcgccgctggggaagccgctggcctctcctgccgggtcaaacattccagccttggaggccatgacctcattatccactggggcggttacagtatctttctgattctgatctgccttacggtcatcgtgaccctagtgattctcgttgttgtggattcccgcttgaaaaaacagagtagcaataaaaacatccttagtccccatacacctagccccgtgttcctgatgggcgctaatacccaggacaccaagaacagcaggcaccaattctgtctggcccaggtctcttggattaaaaacagggttcttaagaaatggaagacccggctcaatcaactatggtag

SEQ ID NO: 217475 - DNA, 1023 bp, synthetic construct
  misc_feature 1..1023: note = Description of Artificial Sequence: Synthetic coding sequence
  source 1..1023: mol_type = other DNA
atgatcaaaagcagagtgaaaaggtaccgccgaagacgtggttcccagagagctccccaggcccttcagtcttaccatctggctgctgaggaacagctctccttccgcatgcttcagactagctcctttgccaaccacagctgggctcattcggagggatcaggatggcttggggatctccagacacatggttgggatacagtcctggggacaattagatttctcaagccatggagtcacggcaattttagtaagcaggagctgaaaaacttgcaatcattgtttcagctgtacttccatagcttcatccagattgtgcaggcgagcgcgggacagtttcagcttgagtatccctttgagatccagatactggctggctgcagaatgaacgcaccacagatctttctcaacatggcatatcagggatctgatttcttatccttccaaggcatctcctgggaaccctcacccggtgccggaatccgggcacaaaacatctgcaaggtgctgaaccgttatctggatattaaagagattctgcagtctttgctggggcatacatgccctaggtttcttgcgggactgatggaggcaggggaatccgagctgaagcggaaagtcaaacctgaggcttggctgagctgcggtcctagtcctggacctggcaggcttcagttagtctgccacgtgagcgggttctacccaaagcctgtgtgggtcatgtggatgcgtggggagcaggaacagcgtgggacccagcgcggagatgtcctacccaatgctgatgaaacatggtacctgcgggcaacattagacgtggccgcaggggaagctgctgggctgtcctgtagggtgaagcatagtagcttggggggacacgacctgataatccattggggggaaaagcagctacggttgtgctgggaaatcatgaagatcgccctgggactgctgtctgtgggactgcgcaaatgggtgggtatgctgggcaccagaagggtcaaattgggccagagtaaatag

SEQ ID NO: 217476 - DNA, 870 bp, synthetic construct
  misc_feature 1..870: note = Description of Artificial Sequence: Synthetic coding sequence
  source 1..870: mol_type = other DNA
atgctcctgttattcctgctgtttgaaggattgtgctgcccgggtgagaacacagctgatccatttgagatccaaattctcgcaggctgccgcatgaatgcacctcaaatatttcttaatatggcctaccaggggtctgatttcctgtccttccagggcataagttgggagcctagccccggtgcagggatcagagcgcagaacatctgtaaggttctgaatagatacctggatatcaaggagatcttgcagtctcttttaggccacacttgccccaggttcctggcgggactcatggaagccggtgagagcgagctaaaaaggaaagtcaagcctgaagcgtggctgtcttgtgggccaagtcctgggccaggcaggctgcagctggtgtgccacgtcagcggattttatcctaagcccgtgtgggttatgtggatgcgaggagaacaggaacaacgcggtactcagcggggtgatgtccttcctaatgcggatgaaacctggtatctgcgagcaaccctggatgttgctgctggtgaggccgctggattgtcctgcagggtgaaacattcctccttgggtggacatgacctcataattcactggggaggatattccatttttctgatactgatttgtctgactgttatcgttactcttgtgattctagtggtcgtggactctcgcctgaaaaagcagtcgagcaacaagaacatactgagccctcataccccatcacccgtctttctcatgggtgccaacacacaggacactaagaactctagacatcagttttgtcttgcacaggtgtcttggatcaagaatagggtactgaaaaaatggaagacaagacttaaccagctttggtag

SEQ ID NO: 217477 - DNA, 600 bp, synthetic construct
  misc_feature 1..600: note = Description of Artificial Sequence: Synthetic coding sequence
  source 1..600: mol_type = other DNA
atgttactcctgtttctgctgtttgagggcctctgctgtccaggcgagaacacagcagttaagcccgaggcctggctgtcctgtggccctagccccggtccaggccgtctccaattggtatgccacgtgtcaggattctacccgaagcccgtttgggtgatgtggatgcgaggggagcaagagcagcgcggtactcagcgcggagatgtattgccgaatgccgacgagacttggtatctccgtgccaccctggatgtggcggcaggggaggcagcaggactgtcgtgtagagtaaagcactccagccttggtggccacgacctcataattcattggggcggatatagtatcttcctgatcctgatctgcctgaccgtgattgtgactcttgtgattttggtggtggtggactcacgcctaaagaagcagagttccaataagaatatcctgagccctcatactccctctccagttttcttgatgggggcaaacacgcaggatacgaaaaacagcagacaccagttctgcctggctcaggtgtcatggatcaaaaacagggtgctcaaaaagtggaaaacccgactgaaccagttgtggtag

SEQ ID NO: 217478 - DNA, 1047 bp, synthetic construct
  misc_feature 1..1047: note = Description of Artificial Sequence: Synthetic coding sequence
  source 1..1047: mol_type = other DNA
atgctatgcccctggagaacagctaacctcgggctcctgttaatcttgaccatcttcctggtggccgaagctgagggcgctgctcagcctaataacagcctgatgcttcagacatccaaggagaaccacgcactcgcatccagttctctctgcatggatgagaagcagattacccagaactacagcaaagtactggcagaagttaatactagttggccagtaaaaatggccaccaacgctgtcctttgctgtcctcctatagctctgaggaaccttatcattattacctgggagataatattgcgaggacagccgtcctgtactaaagcatacaagaaagaaaccaatgaaactaaggaaacaaactgcactgatgagcggataacctgggtgtccagaccggatcaaaatagcgacctgcaaatcaggacagttgcaataactcacgacgggtattataggtgtataatggtcacgccagatggcaactttcaccgaggctatcatctgcaggtgttggttactcccgaggttaccctattccagaacaggaaccgtactgcagtgtgcaaagccgttgcaggaaagcccgctgcacacatatcctggatcccagagggggattgcgctaccaagcaagaatactggtcaaatggaacagtcacagtaaaaagcacctgccactgggaggtacacaacgtgtctaccgtgacgtgtcacgtgagtcacttgacaggtaataagtccctgtatatcgaactcttgcctgttcctggagccaaaaagagcgccaagctgtatatcccctatattatattgacgatcattattctgaccatcgtcggctttatttggctccttaaggtgaacggctgtcggaagtacaaacttaacaagacagagtcaacgcccgtcgtggaagaggatgagatgcagccatatgcctcctacacagagaagaataatcctctatatgacactaccaacaaggtgaaggcgagcgaggctttgcaaagcgaggtcgataccgacctccatacactgtag

SEQ ID NO: 217479 - DNA, 567 bp, synthetic construct
  misc_feature 1..567: note = Description of Artificial Sequence: Synthetic coding sequence
  source 1..567: mol_type = other DNA
atgctgtgtccatggcgtacggcaaacctcggcctgctgctcatcctgacaattttcctcgtggccgaagctgaaggtgccgcacagccaaataattctttaatgctgcagactagcaaagaaaaccacgctctggcttcaagcagcctgtgcatggacgaaaagcagatcactcagaattacagtaaggtcctggctgaggtgaacacaagctggcctgttaagatggctaccaacgccgttctgtgctgcccaccaatcgccctaagaaatctcataattatcacctgggagattattctgagaggtcagccttcctgtactaaggcttataaaaaggaaaccaatgaaacaaaagagaccaattgtaccgacgaacgtataacctgggtgagcaggccggatcagaattccgacttgcaaatccgcacggttgctattacccacgatggctattaccgatgcatcatggtgacccctgacggcaatttccaccggggttatcatctgcaagtgctgggaaaggaacaccatattctgcgatacttcaccagccctgatttatag

SEQ ID NO: 217480 - DNA, 978 bp, synthetic construct
  misc_feature 1..978: note = Description of Artificial Sequence: Synthetic coding sequence
  source 1..978: mol_type = other DNA
atgttatgcccttggcgaacggcaaatttaggcctgcttctcattttgaccatttttctcgtggccgctagctctagcctgtgtatggatgaaaagcaaattacgcagaactattcgaaggtgctggccgaggtaaatacctcttggccagtgaaaatggctactaacgccgtgctgtgctgcccacccatcgctttaagaaatctgataataatcacctgggaaattattctccgtggccagcccagttgcacaaaggcatacaagaaagagaccaacgagaccaaagagaccaattgtacagatgagcggatcacatgggtgtcaaggcccgaccagaacagtgacctccagatcagaacggttgccatcacacatgacggatactaccgttgcattatggtaacccccgacggcaactttcatcgaggctaccacctacaagtcctagtcacacctgaggtaactttattccaaaacaggaataggacggcagtttgtaaggccgtcgccggaaagccagccgcacacatcagttggattccagagggcgattgtgccactaagcaggaatactggtccaacggcaccgttactgtaaaatccacttgtcattgggaggtgcacaacgtttctaccgtgacgtgtcatgtcagccaccttaccggcaataagtctctctatatcgaactgttgcccgtcccaggggctaaaaagtccgcgaagctgtacatcccgtatatcatacttactattatcatcctaacaatcgtcggtttcatctggcttctgaaagtgaatggctgccgcaagtataaattgaacaagacagagtctacacctgtggttgaggaggacgagatgcagccatacgccagctatacagaaaagaataatcctctttatgacaccacgaacaaggtcaaggcatcagaagctctgcaaagtgaagtggacacagacctccacaccctttag

SEQ ID NO: 217481 - DNA, 498 bp, synthetic construct
  misc_feature 1..498: note = Description of Artificial Sequence: Synthetic coding sequence
  source 1..498: mol_type = other DNA
atgttgtgtccctggcgcacagccaatctcggcctgctactcatactcaccatcttcctagtggccgcatcaagctcactatgtatggacgagaagcagatcactcaaaattactctaaagtcctcgccgaagtgaatacttcttggcccgtgaaaatggctactaacgccgtgctttgctgccccccaatcgctctacggaatctcattattattacctgggagatcattcttaggggccagccctcatgcaccaaggcgtataaaaaagaaaccaatgagacaaaggagaccaactgcacagacgaaaggattacctgggtgagcagaccagaccaaaactcggacttacagatcagaaccgtggctattacccacgatggatactacaggtgcatcatggttactcccgatggcaactttcaccgcggatatcacctgcaagtgctgggtaaagaacatcacattttacggtactttaccagccctgacctctag

SEQ ID NO: 217482 - DNA, 987 bp, synthetic construct
  misc_feature 1..987: note = Description of Artificial Sequence: Synthetic coding sequence
  source 1..987: mol_type = other DNA
atgacggtggagaaggaggcccctgatgcccatttcacagtggacaaacagaatatctctctgtggccaagggaacctccccctaagtcaggaccctcgttggtcccagggaaaacacccactgtcagggcagccctgatatgtctcaccctggtcctggtggcctcagttctgctgcaggccgtcttgtacccgagattcatgggaacgatcagcgacgtgaagacaaatgtacagttgttaaagggacgcgtggacaacatctcgaccttagactccgaaatcaaaaaaaactctgatggtatggaagcagccggagtgcagattcagatggtcaacgagagcctaggttacgtccgcagtcagttcctgaagctcaaaacgtccgtggaaaaggccaacgctcagatccagatactcactagatcctgggaagaggtttccaccctgaacgcccagattcctgaactcaagagtgatctcgagaaggcctcggcactgaataccaaaattcgtgctctgcagggatcactggaaaacatgtccaagctgctgaaacggcagaatgacattctccaggtagtgtcacagggatggaagtatttcaagggcaatttctattacttcagtctgatcccaaagacttggtatagtgccgagcaattctgcgtgagccgaaactcgcacttgacatctgttacctccgagtctgaacaggagttcctgtacaaaactgcaggaggactgatctactggatcggcctgactaaggctggtatggaaggcgattggtcctgggtagacgacacaccattcaataaggtgcagagcgtcagattttggattcccggagaacccaacaatgcaggcaataacgagcactgtgggaacatcaaggccccaagcctgcaggcgtggaatgacgccccatgtgacaaaacttttcttttcatttgtaaacggccatatgtgccctccgagccctag

SEQ ID NO: 217483 - DNA, 4497 bp, synthetic construct
  misc_feature 1..4497: note = Description of Artificial Sequence: Synthetic coding sequence
  source 1..4497: mol_type = other DNA
atggatggggcttccgccgagcaggatgggctacaggaagatcggtcccacagcggaccaagcagtcttccagaggccccacttaagccacctggcccactggtgcctcccgatcagcaggacaaggtccagtgcgccgaagtgaacagagcatcaactgaaggggaatctccagacgggccaggccaaggaggattgtgccagaacggcccaacccccccattcccggatcccccatcgtctcttgacccaaccacctcacccgttgggcctgacgctagcccaggcgtggccggatttcacgataacctcagaaagagtcagggcacatcagctgagggctccgtccggaaggaggccctgcagtcattgagactctcactaccgatgcaagaaacgcaactgtgctctaccgacagccctctgcccctggagaaagaggagcaggtgaggctgcaggcgcgtaagtggctggaagagcagctgaaacagtacagagtcaagcggcagcaggaacgctccagccagccagcgactaaaacacggctcttttctacccttgacccggagctgatgctcaaccctgagaacctgccgcgagcaagcacacttgccatgaccaaggagtacagtttcttgcgcaccagcgtgcccagaggaccaaaagtgggttctctcggtcttcctgcccatcccagagaaaaaaagacatccaagtcatccaaaatccggtccttagctgattataggacagaagactccaatgcgggtaattctgggggtaacgtccccgctccggacagtactaagggctctctgaagcaaaatagatcgagcgctgcaagcgtggtaagcgagatttcgcttagccccgacaccgacgaccgcttggagaatacgtcacttgctggggattcagtcagtgaagtggatgggaacgatagcgatagtagttcctactccagcgccagtacccgcggaacctatggcatattgtctaaaacggtaggcacgcaggacacaccctacatggtaaacggccaggagattcccgctgataccctcggtcagtttcccagcatcaaggatgtgctgcaggccgctgcagccgagcaccaggaccagggccaggaagtcaacggcgaagtccgttcaaggcgcgacagcatctgttccagtgtatcactggagtccagcgcagccgagactcaggaagaaatgttgcaggtcctgaaggagaaaatgagactcgaggggcagttggaggccctctctcttgaggccagccaggctttgaaagagaaggccgagctgcaggctcaactggccgcactttcaaccaagcttcaggcccaggtcgaatgtagccacagttcccagcaacggcaagatagccttagctctgaggtggacaccttgaagcagagttgttgggacctagagcgtgcaatgaccgatctacaaaatatgctcgaggcaaaaaatgcttcgctggccagctcaaataatgatcttcaggttgccgaagaacagtatcagaggctcatggccaaggtggaggacatgcaacgatccatgctttcaaaggataatactgtgcatgacctacgccagcagatgacggcacttcagagtcagctgcagcaagtacaattagagagaacaacactaacgtctaaacttaaagcatcacaggccgagattagctcgctccagtctgtgcgccagtggtatcaacagcagttggcactggcacaggaagctagggttcgattgcagggcgagatggcccatatccaggtcgggcagatgacccaggccggacttctcgagcacctcaagctggagaacgtgagcctttcacaacagttgaccgagacccagcaccggtctatgaaagaaaagggccgaattgccgcacaacttcaaggcattgaagcagatatgttggaccaggaagccgcttttatgcaaattcaggaggccaagactatggtggaagaagacctgcagcggaggctggaagagttcgagggagagcgcgagcgtctgcagagaatggcagattctgctgcgagcctggagcaacagctcgaacaagtcaaacttacactgttacagagggaccagcagctggaggccctccagcaggagcaccttgacctgatgaagcagctgaccctgacccaagaggccctccagagcagggagcagtccctggatgctctgcagacacattacgatgagcttcaggccaggctgggcgagttgcagggggaggcagcttccagagaggacaccatttgtttactgcagaatgagaaaattattcttgaggctgcactccaggccgcaaaatcgggcaaggaggaactggatcgcggtgctagaaggcttgaggaggggacagaggaaacaagcgaaactctagaaaagctccgcgaggaactcgccatcaaatctggacaggttgaacacctgcagcaggaaacagctgcgcttaaaaaacagatgcaaaagatcaaggagcagttcctgcagcagaaggtgatggtggaagcatatcgacgcgatgcaacatctaaagaccagctcatttctgagctgaaggcaacacggaaacgcctggattctgaacttaaggagctgcggcaggaactgatgcaggtgcatggtgagaaaagaacagcggaggcagaattgtctagactccacagagaggttgctcaggttcgccagcacatggctgatcttgagggccaccttcagtctgctcagaaggagagagacgagatggaaacgcacctgcaatccctgcagttcgacaaagagcaaatggtcgccgttacagaagcaaatgaagccctgaagaagcagatagaggaactccagcaagaggcgcgaaaggcgataacggagcagaagcagaaaatgcgtcgtctaggcagcgatttaacatctgcccaaaaagagatgaagaccaagcataaagcatacgagaatgcagtcggcattctctcccgtagattgcaagaggccttagccgcaaaagaggctgccgacgctgaattagggcagctacgggctcagggtggctcaagcgacagctccctggctctccacgagcgaatacaggcactggaagctgaactgcaggcagtgagccattcgaaaacactgctggaaaaagagctccaggaggtgattgccctcaccagccaagaactggaggagtctagggaaaaagtgctggagctggaggatgaactccaagaatcaaggggttttagaaagaaaatcaagcgcctggaggagagcaacaaaaaactagcacttgagctcgagcacgagaaaggaaagctcacaggtctgggccagagtaatgctgccctccgtgagcacaatagtatcctagagactgccctcgctaaacgcgaggctgatctcgtccagctgaatcttcaggtgcaggccgtccttcaacggaaagaggaagaggataggcagatgaagcatctggttcaggccctacaggcctccttggaaaaggaaaaggagaaagtcaacagcctgaaggaacaggtggctgcggctaaggtagaagctggacataatcggaggcactttaaggccgcttccctggagttatctgaggtcaaaaaagagcttcaggcgaaagagcacttggtgcagaagctacaggctgaggccgatgacctgcagatcagagagggcaaacactctcaggagatcgcacagttccaagctgagctggccgaggctagggcccaactccagttactacagaagcaactggatgaacagcttagcaagcagccagttggaaaccaagagatggagaatctaaaatgggaagtggatcagaaagagagagagatccaatcattaaaacagcagctcgatctgactgagcaacagggaaggaaggaattagaaggcctccagcaactcctccagaacgtgaagagcgagttagagatggcacaggaagatctttctatgacccagaaggataaatttatgctgcaggctaaggtgagcgaactgaagaataatatgaagacccttttgcaacagaatcagcagctcaaactggatctgcggagaggggctgcgaaaacaaggaaggaacccaagggagaggctagctcctctaatcccgcaaccccgattaagatacccgactgccctgtcccagcctccctccttgaggagctgttacggccaccccctgcagtgtccaaggagcctttgaaaaatttgaactcctgcttgcagcaactcaaacaggagatggattcattgcaaaggcagatggaagaacatgcactcacggtgcatgagtcgctctcttcctggacgccactggaacctgccacagcatctccagtgccgccagggggacatgcagggcctcggggagaccctcaacgccactctcaatctagagcctctaaggaagggccaggcgagtac

SEQ ID NO: 217484 - DNA, 807 bp, synthetic construct
  misc_feature 1..807: note = Description of Artificial Sequence: Synthetic coding sequence
  source 1..807: mol_type = other DNA
atgagcgatagcaaagagccccgactgcagcaattaggactgctggtgagtaaagtgcctagcagcatttctcaggagcaaagccggcaagacgcaatctaccaaaacctgactcagctgaaagctgctgtcggggaactgagcgagaagtccaagctgcaagaaatctatcaggagctgacacagctgaaggctgccgtgggggagctccctgagaagtccaaactgcaggaaatctatcaggaacttacacggctcaaggccgctgtgggagagttaccggaaaaatcgaaacagcaggagatctaccaggagctgactcagctcaaggcggcagtcgagaggttatgccacccttgtccatgggagtggaccttttttcagggcaattgctattttatgagcaactctcagagaaactggcatgactcaattacagcctgtaaggaagtgggcgctcagcttgtggttattaaatctgccgaggagcagaactttctgcagctgcagtccagtaggagcaaccggttcacatggatgggcctcagcgaccttaatcaagagggcacttggcaatgggtcgatggcagtcctctgctcccctcattcaagcagtactggaaccggggtgagccaaacaacgttggagaagaggactgtgctgagttttctggcaatggatggaacgatgataagtgcaacctcgccaagttctggatctgtaagaaatccgcagcctcctgtagtagagatgaagaacagtttctgtcacctgctcctgccactcctaatccacctccagcgtag

SEQ ID NO: 217485 - DNA, 1143 bp, synthetic construct
  misc_feature 1..1143: note = Description of Artificial Sequence: Synthetic coding sequence
  source 1..1143: mol_type = other DNA
atgtccgactcaaaggagccgagattacagcaactcggcctgttggaggaagagcaactgcgtggcttagggttccgtcagacccgcggatacaagtccttggcagtcagcaaggtgccttcgagcatttcacaggagcagtctaggcaggacgctatctaccagaacctgacccagctgaaggctgctgtaggcgaactcagcgagaagagtaagctccaggagatctaccaagagctgacccagctgaaagccgctgtcggagagctgcctgaaaaaagtaaactgcaggagatttatcaagagctaacaagacttaaggccgcagtgggcgaattacccgagaagtcaaagctgcaggaaatatatcaagagctcacgtggttaaaggcggcagtcggggagctcccagaaaaatctaagatgcaggaaatttaccaggaactcacccgccttaaagccgctgtaggggaactcccagagaaaagcaagcagcaggagatttatcaagaactcaccaggctcaaggctgcagtgggagaattacccgagaaatcaaagcagcaggaaatctaccaggaactcactcggctaaaagcagccgtgggcgaactgcctgagaagagcaaacagcaggaaatttaccaggaactaacacagctgaaagccgctgttgaacgcctgtgtcacccctgtccatgggaatggacatttttccaaggtaactgctatttcatgtctaactcccagcgcaactggcatgattccatcacagcttgcaaggaagtgggagctcagctcgtcgttatcaagtctgccgaggagcagaattttcttcaactgcagtcctcccggtctaacaggtttacctggatggggctcagcgatcttaaccaggaaggtacttggcagtgggtggacgggtctcctttgttgccctctttcaaacagtactggaacagaggtgaacccaacaacgtgggtgaagaagactgtgcggaatttagcgggaatgggtggaatgacgacaagtgcaaccttgcgaagttctggatctgtaagaagtctgccgcttcgtgcagcagggacgaagagcagtttctgtctccagcccctgctaccccaaacccgccacccgcttag

SEQ ID NO: 217486 - DNA, 1215 bp, synthetic construct
  misc_feature 1..1215: note = Description of Artificial Sequence: Synthetic coding sequence
  source 1..1215: mol_type = other DNA
atgtctgactctaaagaaccacgcttgcagcagttaggcctgttggaggaggaacaactaagagggcttggtttccggcagacccgcggttataagtccctggccggatgtctggggcatgggccattggtcctacagttattgagtttcacgctgttagcaggcctgcttgtgcaggtgtccaaggtgccttcaagtatctcccaggagcagagtcggcaggacgcaatatatcaaaacctgactcagctcaaggcagctgttggggaactgtcagaaaagtctaagctacaggagatctaccaggaattgacacagcttaaagcagcggtgggagaattgccggagaaatctaaactgcaggagatctaccaggagctgacccgcctcaaggccgcagtcggcgagttacccgagaaaagtaaattacaagagatataccaagagcttacttggttgaaggctgccgtcggcgagctccccgagaaatcgaagatgcaagagatttatcaggaattgactcgcttgaaagccgcagttggcgagctgcccgaaaagagcaagcagcaggagatttatcaggagctgaccaggctcaaagctgccgtgggggagctacccgaaaaaagcaagcagcaggaaatttaccaggaactaaccaggcttaaggcggctgtgggggaattgcctgagaagtcaaagcaacaggagatctatcaggaattaactcaacttaaggcagctgttgagcgcctctgtcacccatgtccctgggaatggacattcttccaaggtaactgttacttcatgtcaaattcacagcgaaattggcatgattcaatcacagcctgcaaggaggttggggctcagctcgtcgtgatcaaatccgctgaggaacagaacttcttgcagttgcagagcagtaggtctaatcgattcacatggatggggctcagtgacctgaatcaggagggaacctggcagtgggtggatggctctcctttgttaccctctttcaaacagtactggaaccgcggagagcccaataatgtgggagaggaggattgcgccgagttcagcgggaacggttggaacgatgacaagtgcaacttggctaagttttggatatgcaagaagagcgccgcttcatgctcccgcgacgaggaacagtttctaagcccagcacccgctacacccaatcccccacccgcttag

SEQ ID NO: 217487 - DNA, 1197 bp, synthetic construct
  misc_feature 1..1197: note = Description of Artificial Sequence: Synthetic coding sequence
  source 1..1197: mol_type = other DNA
atgtccgacagcaaagagccaagactgcaacaacttgggctgctcgaagaagagcagctgcgcggtctgggattcagacagacgaggggttacaagtcacttgccggatgcctgggacacggtcccctagtgttacaattattgtccttcacccttctcgcaggcctgcttgtccaggtgtctaaggttccttctagcatctcacaggaacagtcacgacaggacgctatctaccagaatctgacccagttgaaagctgcagtcggagaactttccgagaaaagcaaactgcaggagatataccaagagctgactcaattaaaagccgcagtgggagagctgccagaaaaaagcaagctccaggaaatataccaggagcttacaagactgaaggccgcagtgggagaactacccgaaaagagtaagcttcaggagatataccaagaacttacgtggttgaaggctgctgttggagagctcccagagaagagcaagatgcaggagatttatcaggagctgactaggttgaaagctgcagtgggagaattacccgagaagtcaaaacaacaggaaatctatcaggagctgacccggctaaaagccgcagtgggtgagctgcctgaaaagtctaagcagcaagagatttaccaggagttgaccaggctcaaggccgctgtgggggagctgccagagaaaagtaaacagcaggaaatatatcaggagctcacccaactgaaagctgctgtcgagcggctttgccacccatgcccctgggaatggacattctttcaaggaaactgctactttatgagcaactcccaacgcaattggcacgatagcataacggcttgtaaagaggttggagcccaactcgttgtgatcaagtcggccgaggaacagtctagtcggtctaatagattcacatggatgggtctgtccgacctgaatcaggagggcacctggcagtgggtcgacggctcaccactgcttccttcattcaaacagtattggaatcgcggtgagccaaacaatgttggagaggaagactgtgcagaattcagcgggaacggatggaacgacgataaatgtaacctggctaaattctggatttgcaaaaagtcagcggcttcgtgctcgagggatgaagagcagttcctgtcccctgccccagccaccccaaatcccccacctgcttag

SEQ ID NO: 217488 - DNA, 507 bp, synthetic construct
  misc_feature 1..507: note = Description of Artificial Sequence: Synthetic coding sequence
  source 1..507: mol_type = other DNA
atgagtgattcaaaggaacctcgactgcaacagctggggctgctggaagaagaacagctccgaggtttaggattcagacagacccgtgggtacaagtctctggcaggttgcttgggccacggccctctggtactccagctgttatctttcacacttcttgccggtctgcttgttcaggtatcaaaagttcctagctccatctcacaggagcagtctagatccaaccgattcacttggatgggcctaagcgatttaaaccaggaagggacctggcagtgggtggatggatcacctctgcttccgtcctttaagcaatactggaatcgtggagagcccaataatgtgggagaggaggactgcgccgaatttagtggcaatgggtggaacgatgataagtgcaatttagctaaattttggatctgcaagaagtccgctgctagttgttccagggatgaggaacaattcttgtcgcccgcacccgctacacctaatccccctcccgcatag

SEQ ID NO: 217489 - DNA, 939 bp, synthetic construct
  misc_feature 1..939: note = Description of Artificial Sequence: Synthetic coding sequence
  source 1..939: mol_type = other DNA
atgtccgactctaaggagccaagattgcaacagctgggattgctggaagaggagcagctccgcggattaggatttaggcagactagaggatataaatccctcgccggatgtctcggccatgggccacttgtacttcagctgctgtcctttacactattggccggactcctcgtgcaggtgtctaaagtcccaagcagcattagtcaggaacagagtagacaggacgccatataccagaaccttacccagctgaaggctgctgtgggggaactgagcgaaaaatccaagttgcaggaaatctatcaggaacttacccagcttaaagcagccgtgggggaactgcccgagaagtcgaaattacaggaaatttatcaagagcttacccggctgaaagccgctgtgggcgaactcccagagaaaagcaagcttcaagagatttatcaagagttgacatggctcaaagccgcagtcgaacggttgtgccacccatgtccatgggagtggacattctttcaagggaattgttacttcatgtccaatagtcagcgcaactggcacgatagtataacggcctgcaaggaagtgggagcacaactggtggtgattaagtcagccgaggagcaaaacttcctccagctccagtcttcaaggagcaacaggttcacctggatgggcttatcggacctgaaccaggagggtacatggcaatgggtcgatggatctccactgctaccctctttcaagcagtattggaacagaggtgaacctaacaacgtgggggaagaagactgcgccgagtttagcggaaacggatggaacgatgataagtgtaacctggctaaattttggatctgcaagaagagcgccgctagctgctctagggatgaggagcagttcttgtctcctgcgccagcgacccccaatcctcctcccgcatag

SEQ ID NO: 217490 - DNA, 105 bp, synthetic construct
  misc_feature 1..105: note = Description of Artificial Sequence: Synthetic coding sequence
  source 1..105: mol_type = other DNA
atgtctgattctaaggagccaaggctgcagcaactgggcctgctcgaagaagaacaactccggggactgggcttcagacagaccaggcggaatcagaaatgctag

SEQ ID NO: 217491 - DNA, 855 bp, synthetic construct
  misc_feature 1..855: note = Description of Artificial Sequence: Synthetic coding sequence
  source 1..855: mol_type = other DNA
atgtctgactctaaagagccgaggctccaacaactgggtctacttgggtgcctaggtcacggccctctggtgttgcaactgctctcatttactctgcttgccggtctcttggtacaggtgctcggacccgtgtcaaaggtgccgtcaagtatttcgcaagaacagagccgccaggacgccatttaccaaaacctgacccagctgaaggcggcagtgggcgagctttcagagaagtccaaacttcaggagatctatcaggaacttacgcaacttaaggcagccgtgggcgagctacccgaaaagtcaaagttacaggagatctaccaggaactgacacgcctaaaggccgcagtcggtgaactgcctgaaaaatccaagctccaagagatctaccaggaactgacttggctgaaggctgccgtcggcgaactgcccgagaaaagtaaaatgcaagagatctaccaagagctgactaggctgaaggctgccgtaggagagcttcccgagaaaagcaaacagcaggagatctatcaggagcttaccaggctgaaagctgctgttggtgaattgccggagaagtctaagcagcaggagatttatcaggagcttacacgccttaaagctgctgtcggagagctgccagagaagtccaagcagcaggagatctatcaggagttaactcagttgaaagctgctgtggagaggctatgccatccctgcccatgggaatggacattttttcaggggaactgttacttcatgagtaacagccaaagaaattggcacgattccattacggcttgcaaggaggtcggcgcacagttggtggtgatcaaatcagctgaagaacagtag

SEQ ID NO: 217492 - DNA, 939 bp, synthetic construct
  misc_feature 1..939: note = Description of Artificial Sequence: Synthetic coding sequence
  source 1..939: mol_type = other DNA
atgtccgactctaaagaacctcggttgcaacagctaggacttctggaggaagagcaactacgcggactgggtttccggcagacaagaggatacaagtcattggctggctgcctcgggcatggccctctggttttgcagctgttatcgttcacactgctcgctgggctcttagtgcaggtgtccaaagtgccatcttcaatcagccaagaacagagccggcaggatgccatctatcaaaacctgacccaactcaaggctgcggtaggagagctctctgagaagtccaagttacaagagatttatcaggaacttacccaactgaaggctgccgtgggcgagctgcccgaaaaatccaagcttcaggagatctatcaggaactcacgagactgaaggccgctgtgggtgagttaccggagaaaagcaaactccaagagatctatcaggagctgacttggctgaaagcagccgtggagaggctctgccatccttgcccatgggaatggaccttctttcagggcaattgttattttatgtcgaattctcagcgcaactggcacgacagtatcactgcctgcaaggaggttggggctcagctcgtggtaataaaatccgcagaagaacagaacttcctgcagctacagtctagcagaagcaataggtttacatggatgggtctgagtgacctgaaccaggaaggaacatggcagtgggtggacggatccccgctgttgcccagtttcaaacagtattggaacagaggggaacctaataatgtcggggaggaagattgtgcagagtttagcggcaacgggtggaacgacgataagtgcaacctggccaaattctggatctgtaaaaagtcagccgctagctgttctagggacgaggagcagtttttgtcaccagcaccggcaacacctaatcccccacctgcctag

SEQ ID NO: 217493 - DNA, 1011 bp, synthetic construct
  misc_feature 1..1011: note = Description of Artificial Sequence: Synthetic coding sequence
  source 1..1011: mol_type = other DNA
atggattatcccaccttgctgctcgcgcttctgcacgtgtatagggcgttatgcgaagaagttttgtggcacacaagtgtgccatttgcagagaatatgtccctggaatgtgtatatccctcaatggggatcctgacacaggttgaatggtttaagatcggaactcagcaggatagcattgccatattttctcctacccacggtatggtgatacggaaaccctacgcagaaagagtatattttcttaacagcaccatggccagtaataacatgacattattctttagaaatgcctctgaagatgacgtcggatactacagctgttccctatacacctatccacaggggacctggcagaaggtaatccaggtggtgcagtctgactcctttgaggctgcagtgccttctaatagccacatcgtctctgagcctgggaagaatgtgaccctcacctgtcagcctcaaatgacctggcctgtgcaggctgtaaggtgggaaaagattcagcccagacagattgaccttctgacatattgcaacctcgtccacggaaggaatttcacatcaaagtttccacgccaaattgtgagcaactgcagccacggcaggtggagtgtgattgtgataccggatgtgaccgtctccgattctggactgtatcggtgctacctgcaggcctctgcaggcgagaatgagacattcgtgatgcggctgaccgtcgctgagggaaaaacagataatcagtacacactgttcgttgccggagggactgttcttctgttactcttcgtaattagcattacaacaattattgtcatttttcttaaccgcagaaggcggcgtgagcgcagggatttgttcacggagagttgggatacccagaaggcccctaataactatcgctcccccatttccacctctcagcctacaaatcagagcatggacgacacccgcgaagatatctacgtcaattacccaactttttcacggaggcccaagacccgcgtctag

SEQ ID NO: 217494 - DNA, 822 bp, synthetic construct
  misc_feature 1..822: note = Description of Artificial Sequence: Synthetic coding sequence
  source 1..822: mol_type = other DNA
atgctggggcaggtcgtgactttgattctgttactgctgttgaaagtttaccagggcaagggatgccagggctcagctgatcatgtggtctctattagcggcgtcccgctccagctgcagcccaattcaattcagactaaagtggactctatagcttggaagaagctactgcccagtcaaaacggcttccaccacatactcaaatgggaaaacgggtctctcccttccaatacctccaacgacaggttttctttcatcgttaagaacctgtcgctgctaataaaagccgctcagcagcaggattctgggctctactgtctggaggtgactagtatctcgggcaaagttcagacagcgaccttccaagtctttgtatttgaatttcgcttctggccatttcttgtaatcatcgtaattctgagcgccctgttcctgggaactctcgcgtgcttctgtgtgtggcggaggaagaggaaagagaagcaaagtgaaacatcacccaaagagtttctcactatatacgaggatgtcaaggacctcaagacgaggaggaaccatgagcaggagcaaacgttcccaggtggcggatcgaccatctactctatgatccagagccaatcttccgctccaacttcccaagagcccgcttatactttgtattccctgattcagcctagcaggaaaagcgggtcaagaaaaagaaatcactctccatctttcaattccaccatttatgaagtgattgggaagagtcagcccaaagcccagaatcccgctcgcctgtctcggaaggaactcgagaatttcgacgtatactcctag

SEQ ID NO: 217495 - DNA, 990 bp, synthetic construct
  misc_feature 1..990: note = Description of Artificial Sequence: Synthetic coding sequence
  source 1..990: mol_type = other DNA
atgttaggccaggtcgtgacacttattctgctgttgctgctgaaggtctatcagggaaagggatgccagggatcagcagaccatgttgtatcgatctccggcgtacctctgcagcttcagccaaactctatccagaccaaggtggacagcatcgcttggaagaagttgctcccgtcccagaatggctttcatcatatcctcaagtgggagaatgggagcttaccctcaaacactagcaacgaccgattcagttttatcgtcaagaatctcagtctacttattaaggcggctcagcagcaagattcgggtctatactgtcttgaagtgactagcatctctggaaaagtacagacagctacctttcaggtcttcgtctttgacaaggtcgaaaaaccacgcctgcagggacagggaaagatcctcgacagaggcaggtgccaggtggccctgtcttgtttagtgagtagagacggcaacgtgagctatgcctggtacagaggatctaagctgatccagacggctggaaacctgacatatttggacgaagaggtggacattaatggcacccacacgtatacatgcaatgtcagcaaccccgtgtcctgggagtctcacactctgaacctgacccaggattgtcagaatgcccatcaggaattccggttctggccatttctggtgatcattgttatcctgtccgccctgtttcttggcacgctagcctgcttttgtgtctggcgccgaaaaagaaaggagaaacagagcgaaaccagccccaaggagttccttacaatatatgaggacgtaaaagatctcaagaccagacggaaccatgagcaggagcagacattccctggcggaggcagcactatttactctatgatccagagccagtcaagcgcaccaactagccaggaaccagcctataccctgtattcgctcattcagccctcacggaagggggatagattttacagtttctctggttag

SEQ ID NO: 217496 - DNA, 1113 bp, synthetic construct
  misc_feature 1..1113: note = Description of Artificial Sequence: Synthetic coding sequence
  source 1..1113: mol_type = other DNA
atgctagggcaggtggtgaccctaatcctgctcctcttgctgaaggtttatcaaggcaagggatgtcagggcagcgcagatcatgtggtctcaatttccggcgtgcctctgcagctgcagccaaacagtatccaaacaaaagttgactctattgcgtggaagaagctcctgccctcccagaatggcttccatcacatacttaaatgggagaacggcagtttaccatccaacacttccaacgataggttcagcttcatcgtcaaaaacctgagtttgctgatcaaggcagcacagcagcaggactcaggactgtattgtctggaggttaccagcattagcgggaaagtgcagacggcaacctttcaggttttcgtattcgaaagtctccttcccgacaaagttgaaaaacctaggttgcagggtcagggcaagatcctggatcgcggacgctgtcaggtagcgctgtcttgcctggtctccagagatggaaatgtcagttatgcctggtatagagggtccaaactgatccagaccgccggaaacttgacctaccttgacgaagaggtagatatcaacggtactcacacatacacttgcaacgtgagtaaccccgtctcctgggagagtcacactttgaatcttacccaggattgccaaaatgcccaccaggagttcagattttggcccttcctggtcatcatcgtgattttgagtgctcttttcctgggcactctggcttgcttctgcgtgtggaggagaaagaggaaggaaaagcagagtgagacgtcacctaaagagtttcttactatttatgaggacgtcaaggatctaaaaacgaggaggaaccacgagcaggaacagacgttccccggagggggatccaccatatacagcatgatacagtcacagtcgagtgctccgacttcacaggaacccgcttacacattatacagcctgatacagcccagcaggaaatcgggctccaggaaacgtaatcatagtccctcattcaactccacaatctacgaggtgatcggcaaatcccaacccaaagcccagaacccggctcggctgagccggaaggagctcgaaaattttgacgtttactcctag

SEQ ID NO: 217497 - DNA, 1098 bp, synthetic construct
  misc_feature 1..1098: note = Description of Artificial Sequence: Synthetic coding sequence
  source 1..1098: mol_type = other DNA
atgctgggtcaggtagtcaccctcatcctcttgcttctcttaaaagtctatcagggtaaggggtgccagggtagtgccgaccacgtggtctctatcagcggagtgcccctgcaactgcagcctaactccatccaaacaaaagtagatagcatcgcgtggaagaaactcctgccctctcagaatgggttccaccacatactcaaatgggagaatggctcgcttccctccaatacatctaacgaccgattttcttttattgtaaaaaatttatctcttctgattaaggccgcacaacagcaagactcgggcctctactgtttggaggtgacgtccatcagtggtaaggttcaaaccgctacctttcaagtgtttgtctttgataaggtcgagaagcccaggttacaaggacaaggcaaaattctggaccggggtaggtgtcaggttgctctgtcatgcttagtcagccgggacggcaacgttagctacgcttggtatcggggtagcaaactcattcagacggcgggtaacctaacatacctcgatgaggaagtggatattaatgggacacacacctacacgtgcaacgtgtcaaatccagttagctgggaaagccatacgttaaacctgacccaggattgtcagaacgcccaccaagagtttcgtttttggccatttctcgttattatcgtgatcctctccgctttatttcttggaacacttgcttgtttttgtgtctggcggaggaagaggaaggagaaacagagcgaaacaagtcctaaggagttcctgacaatttatgaggacgtaaaggacctaaagacccgcaggaaccatgagcaggagcagacttttcccggaggcggatccacaatctattctatgatccagtcacagagttccgctccaactagccaagagccggcttacacactgtattccctgatacaaccatcacgcaagtctggatctagaaaaaggaaccactctcctagctttaattctactatctatgaagtcatcgggaaatcgcagccgaaagcccagaatcccgcacggttaagccggaaggagctggagaacttcgacgtgtactcctag

SEQ ID NO: 217498 - DNA, 495 bp, synthetic construct
  misc_feature 1..495: note = Description of Artificial Sequence: Synthetic coding sequence
  source 1..495: mol_type = other DNA
atgaaatggaaggctctgtttacagctgcaatactccaggcgcagctccctatcaccgaagcccagagctttggactgctcgatcctaagctgtgttatctgctggatggtattctgttcatctacggcgtcattctgacggccttattcctgcgggtgaagttttctagatcagctgatgccccagcgtaccagcagggccagaaccagctgtataatgaacttaacctgggcagaagggaggagtatgatgttttggataaaagacgcggacgtgatcccgaaatgggcggtaagcctcagagaaggaagaacccacaggaaggattgtataatgagttgcagaaggataagatggcggaggcctactccgaaattggaatgaagggtgaacgcagacggggaaagggccatgatggattgtaccagggactatccaccgcaacaaaagacacgtatgacgcgctgcacatgcaggcgctgcctcctagatag

SEQ ID NO: 217499 - DNA, 492 bp, synthetic construct
  misc_feature 1..492: note = Description of Artificial Sequence: Synthetic coding sequence
  source 1..492: mol_type = other DNA
atgaaatggaaggccttgttcacagccgctattcttcaggcacagctccccattacggaagctcagtccttcggtcttcttgatccaaagctctgttatttgctcgatgggatcctgttcatatacggtgttattcttaccgccctgtttttgagggtgaaatttagccgcagcgctgatgctcctgcttatcagcagggacagaatcagctgtacaatgagttgaatctcggtcgcagggaggaatacgacgtgcttgataaacgacgaggacgagatcccgagatgggaggcaaacctcgtaggaagaacccacaagaggggctctacaatgaattgcagaaggacaagatggcggaggcctacagcgagattggaatgaaaggagaaagacggcgaggtaagggccacgacggactctatcaggggctctctacagccaccaaagacacatacgatgcactgcacatgcaggccctgccacccaggtag

SEQ ID NO: 217500 - DNA, 2274 bp, synthetic construct
  misc_feature 1..2274: note = Description of Artificial Sequence: Synthetic coding sequence
  source 1..2274: mol_type = other DNA
atgttgctgagacttttgctcgcatgggcagccgcaggaccgaccctgggccaggatccttgggcggctgagccgagagcggcttgcggaccatcctcgtgctatgcgttgttccctcggcgtcggaccttcttggaagcatggagggcatgtcgcgagttaggtggcgatttggccacgcccaggacaccagaggaggctcagagagtggactctctggtcggggctggcccagcgagccggctgctgtggattggcctccagcgccaagcaagacagtgccagcttcaacgacctctacgcggattcacctggaccacaggggaccaagacactgccttcaccaactgggctcagcccgcaagtggaggaccttgcccggcacagagatgcgtggcactggaggcatccggcgagcaccggtggctcgagggttcttgtaccttggcagttgacggatacctctgccagttcgggtttgagggagcgtgtccggcactgcaggatgaggccggtcaggctgggcctgccgtgtacaccacgccctttcatcttgtgtccacagagtttgaatggctgccgtttggaagcgtcgccgctgtccaatgccaggcgggtaggggggcatccttgctgtgcgtgaagcaacctgaaggcggagtcggctggagcagagctgggccactctgcctgggcaccggatgcagccctgacaacggaggctgcgaacatgagtgcgtggaggaagtagacggccatgtgagctgtcgctgtactgagggctttcggctcgcagctgatgggaggagttgcgaagatccttgtgctcaggcaccctgtgagcagcaatgtgaacccggtgggccacagggctactcatgccactgccggttgggatttagaccagccgaggatgatcctcaccggtgtgtagacacggatgagtgccagattgcgggagtgtgtcagcaaatgtgcgtgaactacgtaggaggttttgaatgctactgttctgagggccatgaactcgaggccgacggaataagctgttctcctgccggagcaatgggggcacaggcttcacaggacctcggagacgagctactggatgacggcgaagatgaagaagatgaggatgaggcctggaaggcctttaacggaggctggactgagatgcctgggattctctggatggaaccaacacaacccccagactttgctcttgcttaccggcctagtttcccggaggatcgtgagccccagattccctaccctgaacccacctggccacctcccttgtctgcccctagagtgccttatcacagctctgtgctctctgtgacacgtcccgtggtggtcagcgccacacatcccacactgccttctgcccaccagcccccagttatccctgctacccatcccgcactgtcccgcgatcatcagattccagtaatcgcagccaattatccggatctcccttccgcataccagcctgggatactgtctgtctcacactctgcccagccccctgcccatcagccaccaatgatctcaactaaatatccagaactatttcccgcacatcagtctcccatgttccccgatacgagagtcgcaggaacccaaactactacacacctgcccggaatccctcctaaccatgctccactcgtgactacactcggagcgcagttgcctccccaggcccctgatgccctggtactgcgtacacaagccacacagctgcctattatacccactgcccagccctccctgacaacaacctcacggtcacccgtcagcccggcacaccagatttctgtcccagctgcaacgcagcccgcagctctgccaacattgctgccatcccagtccccaactaaccagacgagtccaatctcccccactcatccacacagcaaagcacctcagatccctagagaagatgggccttctccaaaactggctctgtggctaccatcacccgcacctacagccgctccaacggcactgggcgaggccggtctggctgaacactctcaaagagatgatagatggttgctggtggctctgctggtccctacatgtgttttcttggtcgtactgttagctctcggcatcgtgtactgtacaaggtgtggtccgcacgcacccaacaaacggattacagactgctaccggtgggttatccatgcgggttcaaaatctccaactgaaccaatgcccccacggggttccctgactggcgtgcagacctgtaggacttccgtgtag

SEQ ID NO: 217501 - DNA, 951 bp, synthetic construct
  misc_feature 1..951: note = Description of Artificial Sequence: Synthetic coding sequence
  source 1..951: mol_type = other DNA
atgcttcggaggagaggctctccaggcatgggcgtacatgtcggcgcagcgctgggcgctctatggttttgccttaccggcgcattggaggtgcaggtgcccgaggaccctgtcgtggccttggttggcactgacgcgacactctgttgtagtttttctcctgagcctggctttagtctcgcacagctcaatctcatttggcagctgaccgacactaagcagcttgtgcattcctttgccgagggacaggaccaggggagcgcttacgcaaatagaaccgccttgtttcctgacttgctggctcaggggaacgcatcgctgagactgcagagagtacgcgtagccgacgaagggtcctttacctgtttcgtgtcaatccgcgacttcggttctgcggctgtcagcctgcaagtcgctgctccttacagtaaaccttcaatgaccttggagccaaataaggacctgcgcccaggtgatacagttactattacgtgttcgagctacaggggatacccagaggcagaagtgttttggcaggacggccagggcgtacctctgaccggcaacgtgacaacgagccagatggcaaatgaacaggggctgttcgacgttcattctgtcctccgggtggtactgggagccaatggcacttatagctgcctggtgaggaatccagtgcttcaacaagatgctcatgggtccgtgaccattaccggccagcctatgaccttcccaccagaagccttatgggttactgttggtctgtctgtgtgtctaatcgccctcttggttgctttggcatttgtttgctggaggaagatcaaacagtcttgtgaggaagagaatgcaggcgctgaagaccaggatggagagggggagggctctaaaactgccctccagcccctgaaacactctgacagcaaagaggacgacgggcaggaaatcgcttag

SEQ ID NO: 217502 - DNA, 1605 bp, synthetic construct
  misc_feature 1..1605: note = Description of Artificial Sequence: Synthetic coding sequence
  source 1..1605: mol_type = other DNA
atgctgcggagacgcggtagccccggtatgggcgtccacgtgggtgcggcactcggagccctttggttttgtcttaccggcgcattggaagtgcaagtgccagaggatcccgtggtagctctggtcggcacggatgctaccctttgttgttccttcagcccagagcccggattttcattagcacagttgaatctgatctggcaactcacagacaccaaacaactggtgcactcgttcgcagaaggccaagaccagggatctgcatacgcaaatcgcaccgctctgtttcctgatctcctggcacaggggaacgccagcctgaggttacagcgagtccgagtggcagacgagggttcatttacttgcttcgtgagcatcagagacttcgggtccgccgctgtgtccctccaagtggccgctccatactccaaacccagcatgacattggaacctaacaaagatctgcgacccggagacactgtgaccattacctgctcatcctaccaaggctaccctgaggccgaggtcttctggcaggatgggcaaggagtccctctgactggaaacgtaacaaccagccagatggcaaacgaacagggcctctttgacgttcacagtatcctccgggtggtgctcggggctaatgggacctattcatgcctggtgcggaaccccgttcttcagcaagatgctcatagttcagtaaccatcacaccacaaagatcaccaaccggcgcagttgaggtgcaggtaccagaggaccctgttgttgctctcgtgggtaccgacgccacgttaagatgttcattctctcccgagccagggttttctctcgctcaacttaacttaatctggcaactgactgatacaaaacagctcgtccatagttttacggaaggtagggaccagggaagcgcttatgcaaaccggacagccctatttcccgatctcttggcgcagggaaacgcttctctccgcctgcagagagtgagggtggcagacgaaggatcattcacttgttttgtctccatccgggattttgggagcgctgcggtgtcattgcaggtggctgccccatatagcaagccaagcatgactctagaacctaataaagacttgagaccgggtgacaccgtgacaataacttgctcttcataccggggatatcccgaggccgaagtgttctggcaggatggacagggtgtgccgctgaccggtaatgtgactacatcccagatggccaatgaacagggcttattcgatgtccacagcgtcctgagagttgtgctcggagcaaacggcacctacagctgcctagtccgcaatcctgtgctgcagcaggacgcccacgggagtgtgaccatcaccggacagccaatgacattcccacccgaagccctgtgggtgaccgtgggcttgtccgtgtgcctgatcgccctccttgtggcactcgcatttgtctgctggcgcaaaatcaagcaatcttgcgaggaagaaaacgctggtgcagaggatcaagacggcgaaggcgagggaagcaagaccgccctccaacccctaaaacattctgacagcaaggaagatgatggacaggaaatcgcctag

SEQ ID NO: 217503 - DNA, 1482 bp, synthetic construct
  misc_feature 1..1482: note = Description of Artificial Sequence: Synthetic coding sequence
  source 1..1482: mol_type = other DNA
atgctgagaaggcgaggatctccaggcatgggcgtccacgtcggggctgctttaggcgcactctggttttgtctgaccggggcattagaggttcaggttccggaagaccccgttgttgctctcgtgggtaccgacgctactctctgttgcagcttctctcctgaacccggtttctccctggctcaactaaatctgatctggcagctgacagataccaagcagctcgttcatagtttcgctgaagggcaggatcaaggaagtgcctacgccaaccgaacagccctgtttccagatctgttggcccaaggaaacgcatcccttagactccagcgagtacgggttgcagacgagggctcttttacatgttttgtcagtatccgcgattttggaagtgcggctgtgagtctacaggtggcggcaccatattctaagccaagcatgacactggagcctaataaggaccttcgtccaggcgataccgttacaatcacatgttcctcgtaccagggatatcctgaagcagaggtcttttggcaggacggccagggcgttcctttgacagggaatgtcacaacttcacaaatggcaaacgaacagggcttatttgatgtccattccatattgcgggtggtccttggtgccaacgggacatattcttgcttagttaggaaccctgtcctgcaacaggacgctcattcatccgtgacaattacaccccagagatctccgacaggggcagtggaggtccaggtgcccgaagacccagtcgtcgctttagtggggacagacgcaacattgaggtgctccttcagccctgaacccggtttcagcctcgcccaattgaatctcatatggcagcttactgatactaaacagctggtacactcattcaccgagggacgggatcagggctctgcctatgcaaataggacagccctatttcccgacctgctggcccaagggaacgcttccctccggttacaacgagtaagggtggccgatgaggggtcatttacatgcttcgtgtccatccgggatttcggcagtgcagcggtaagtcttcaggtggctgctccctactctaagcccagtatgactttggagcccaacaaagatttgcgccctggagataccgtgactatcacctgtagctcttacagaggatacccagaagccgaggtcttttggcaggatggtcagggtgtccctctgaccggcaacgttacaacaagtcagatggcaaatgagcaggggctattcgacgtgcattcagtgcttcgcgtagtgctgggcgctaatgggacctatagctgcctagtccgcaaccccgtgttacaacaggacgcacacggatcagtcaccatcacggggcagccgatgacatttccccctgggcctgcttcatccgctgtcccactgtctcccgctcatcctccacatgggagtatgtgctggtcccactggttcagcagaggactgtag

SEQ ID NO: 217504 - DNA, 423 bp, synthetic construct
  misc_feature 1..423: note = Description of Artificial Sequence: Synthetic coding sequence
  source 1..423: mol_type = other DNA
atgctgaggcgccgaggctctcccggaatgggcgtgcatgtgggggctgccctaggcgctctttggttctgtctgactggagccctggaggtccaggtgccagaagatcctgtcgtggctttggtcggcactgacgccaccttgtgctgctccttctccccagaacccggattttcactggctcaactcaacctcatttggcagctaacggacacaaagcaactcgtccactctttcgctgaaggccaggaccagggctctgcctacgccaaccgaacagccctgtttccagatcttcacagagcggcatatgacatccctcctagagggccagtgggagacaggggcgcagtatgtctgagccactgtactgcgggtggcccaggtttcagagtgctggagaaagaccagactgagttatag

SEQ ID NO: 217505 - DNA, 411 bp, synthetic construct
  misc_feature 1..411: note = Description of Artificial Sequence: Synthetic coding sequence
  source 1..411: mol_type = other DNA
atgcttcgcagacgcggttccccaggaatgggagtgcatgttggagccgcactgggggctctatggttctgtctgacaggtgctttggaagtgcaggtgccagaagatcctgtcgtcgcacttgtcggaacagacgcaaccttatgctgtagcttcagcccagagcccggattttccctcgcacagctgaatctgatatggcaactgaccgacaccaaacaactggtgcattcatttgccgaggggcaggaccagggctcggcctacgccaatcgcactgcattgtttcctgacctgttggctcagggaaacgcatccttacggctgcaacgggttcgcgtggcagacgaaggatcattcacctgtttcgtttctatccgcgacttcggaagcgccgcagtgagtctctag

SEQ ID NO: 217506 - DNA, 402 bp, synthetic construct
  misc_feature 1..402: note = Description of Artificial Sequence: Synthetic coding sequence
  source 1..402: mol_type = other DNA
atgctgcggcgtcggggttcccctgggatgggggtccatgtcggggctgcactgggagcactgtggttttgcctcacgggagccctggaggtgcaggttccggaagatcccgttgttgcgctggtgggcacagacgccactctgtgctgttcatttagtccagaaccgggtttctccctggcgcagttgaacctaatttggcaactgacagatactaaacagctggtacattcatttgccgagggtcaggaccagggatccgcctatgcaaacagaacagcactgtttccggatctcctcgctcaaggcaacgccagcctgaggctccagagagtgcgtgtggctgatgagggctcgttcacttgttttgtctccattagagatttcggctcggctgcgtag

SEQ ID NO: 217507 - DNA, 1602 bp, synthetic construct
  misc_feature 1..1602: note = Description of Artificial Sequence: Synthetic coding sequence
  source 1..1602: mol_type = other DNA
atgctgaggcggagggggtctccgggtatgggcgttcacgtgggagccgctcttggagccttgtggttttgcctgaccggggctctggaggttcaggtacccgaggaccctgtcgttgcactcgtcggcacggatgccactttatgttgctccttctctccagaacccggattttctctggcacagctgaatctcatttggcagcttaccgacaccaaacagcttgtgcacagctttgccgagggccaggatcaggggagcgcttatgcaaatcgcacggccctgtttcctgacctgctcgcccagggcaacgccagcctccggctgcaacgagtccgggttgcagacgaaggatccttcacctgtttcgtgtccatccgggactttggaagtgcggcagtctccctgcaggttgcggcaccatatagcaagccatcgatgacgctcgaaccaaataaggacctgcgtccaggggacacggtgactatcacatgcagttcctatcaagggtaccctgaggcagaggtattttggcaagatggtcagggggtgccccttaccgggaacgtgacaacctctcagatggccaatgaacaaggactgttcgatgttcatagtatcctaagagttgtgttgggtgccaatggcacctactcctgtttggtgaggaaccctgttttacaacaggatgctcactctagcgtgacgattacccctcaacggtcccccaccggcgcagtggaagtccaggttcctgaggacccagtagtggctctcgtgggaactgacgctacacttcgatgtagcttttcccccgaacctggattctctctcgcccagttaaatctcatctggcaactgacggacacgaaacagttggtccactcatttacagaggggagggatcagggctcagcctacgcaaataggactgcccttttccctgatctgctggcccaaggaaacgcaagtctgcgtttacagagagtgcgcgtggcggacgaaggaagtttcacctgctttgtgtctattcgcgatttcggttccgccgctgtgagcctgcaagttgcagcaccatattccaagccttctatgacactcgaacccaacaaggatctccgccctggcgatacagtaaccattacctgctcgagttatcggggataccctgaggccgaggtcttctggcaggacggccagggggtccccctgaccgggaatgtgacaacctcccagatggccaatgagcaaggtttattcgacgtccatagtgtcctccgcgtggtcttgggagccaatgggacttacagctgccttgtccgaaaccctgtgctgcagcaggacgctcacggctccgtgactattacgggtcagccaatgacattccctcccgaggccctttgggtgactgttggtctctctgtctgtctgattgctttgctcgtggccttagccttcgtctgctggcgcaaaataaagcaatcctgtgaggaagagaatgccggagccgaggatcaggacggtgagggcgagggatccaaaacggcactgcagcccttaaaacattccgattcaaaggagggtaaagacacatgggcttag

SEQ ID NO: 217508 - DNA, 498 bp, synthetic construct
  misc_feature 1..498: note = Description of Artificial Sequence: Synthetic coding sequence
  source 1..498: mol_type = other DNA
atgttgcggcgtaggggttctccgggaatgggggtccacgtgggggcagcactgggggcactctggttctgcttgactggggcattggaagttcaggtaccagaggaccccgtcgtcgcactcgttggtacagatgctaccctttgctgctccttctcaccagaacctggctttagtctcgctcagctcaatctgatctggcagctaactgacaccaagcagcttgttcactcttttgcagagggtcaggaccaggggtccgcgtatgctaaccgcacagcacttttcccagatctgctggcacaggggaatgccagcctgaggcttcagagggtgcgggtggccgacgaggggagcttcacttgttttgtaagtatcagggactttggaagcgctgccgtgagcctgcaagtggcggctccttactctaagccgtccatgacactggagcccaacaaggaccttcgacccggtgatacagtgaccatcacttgttag

SEQ ID NO: 217509 - DNA, 156 bp, synthetic construct
  misc_feature 1..156: note = Description of Artificial Sequence: Synthetic coding sequence
  source 1..156: mol_type = other DNA
atgttgaggcgccgaggaagcccaggcatgggcgttcatgtgggggctgcactcggagctctatggttctgcttgacaggcgcactggaggtccaggtgcctgaagacccagtggttgctttagtgggtaccgatgctacgctatgttgcagctag

SEQ ID NO: 217510 - DNA, 663 bp, synthetic construct
  misc_feature 1..663: note = Description of Artificial Sequence: Synthetic coding sequence
  source 1..663: mol_type = other DNA
atgttgaggctgctcctcgcacttaatctgtttcctagtattcaagtaacgggcaataaaatcctggtgaagcagtccccgatgctggtggcatatgacaatgccgtcaacttgtcgtgtaaatattcgtacaatctgttctcacgggaatttagggcttccttgcacaaaggcctggactccgccgttgaagtatgtgtagtgtatggcaactattcgcagcaactgcaggtgtactcgaagacggggtttaattgcgatggcaagctgggcaatgagagcgtgactttctacttacaaaacctgtatgtgaatcagacagacatatatttctgtaagattgaggtgatgtaccccccaccctatttggacaacgaaaagagcaacggaaccatcatacacgtgaagggaaagcatctgtgtcccagcccccttttcccgggaccaagcaagcccttctgggtcctcgtagtggtgggcggtgttttagcttgttatagtttactcgtgactgtcgcctttatcattttttgggtcagatcaaaacgtagcagactgctgcactcagattatatgaatatgaccccccgaaggccgggtccaacaaggaagcactatcagccgtatgctcctcctcgcgactttgcggcttaccgttcctag

SEQ ID NO: 217511 - DNA, 306 bp, synthetic construct
  misc_feature 1..306: note = Description of Artificial Sequence: Synthetic coding sequence
  source 1..306: mol_type = other DNA
atgctgaggttgctgctggctctgaacttattcccatcgatccaagttacaggaaaacacctctgccccagcccactgttccccggaccatcgaagccgttttgggttttggtggtggtgggtggtgtgctcgcatgctacagtttgctggtgacggtggcatttatcatattttgggtccggtctaagaggtcacgattgttgcattctgattacatgaatatgaccccacgcaggccgggtccaaccagaaagcattatcagccctacgctccgcctcgcgattttgccgcttatagatcatag

SEQ ID NO: 217512 - DNA, 411 bp, synthetic construct
  misc_feature 1..411: note = Description of Artificial Sequence: Synthetic coding sequence
  source 1..411: mol_type = other DNA
atgctgcgtcttctgctggccctgaacctcttccctagcattcaagtaacaggtaacaaaattctcgtgaagcagagccccatgctggtggcttatgataacgcagttaacctgagctataacgaaaaatccaacggcacgataatccacgtgaaaggaaagcatttgtgccccagcccactgttccccggtccctccaagccattctgggtacttgttgtggtgggtggagtactcgcctgctacagtctgttggttacggtggcattcataattttctgggtaaggagtaagcgttctaggctgttgcacagtgattacatgaacatgacaccgagacgtcccggacctacaaggaagcattatcagccttatgctcctccccgagatttcgcggcataccggtcttag

SEQ ID NO: 217513 - DNA, 705 bp, synthetic construct
  misc_feature 1..705: note = Description of Artificial Sequence: Synthetic coding sequence
  source 1..705: mol_type = other DNA
atgccgtgcgggcttagcgccctgataatgtgcccaaagggaatggttgccgtggtcgttgcggtggacgacggagattcgcaggctctggccggtaacaaaatcctcgtcaaacagtccccaatgcttgtggcttatgacaatgccgtgaacctctcctgtaagtactcatataacttgttttcgcgggaatttcgggcttctctccataagggactggatagcgcagtggaggtgtgtgtggtgtacggaaactactcccagcagctgcaggtttattctaaaactggctttaactgtgacggcaagttaggtaatgaatcggtgacattctacttgcaaaatctatatgtcaatcagactgatatctatttctgcaagattgaagtaatgtatcctccaccctacctggataacgagaagtccaatggcactataatccacgtcaagggcaagcacctgtgcccctcccctctgtttcctggcccttccaaacctttttgggtgcttgtagtcgtcgggggtgtactggcgtgctattccctcctggtcacagttgcattcattattttctgggtgcggagcaaaagatctcgcctgctccacagcgattacatgaacatgacccctcgtaggcccggtcccacccgaaaacactatcagccttatgctccgccacgggactttgccgcttaccggtcttag

SEQ ID NO: 217514 - DNA, 1920 bp, synthetic construct
  misc_feature 1..1920: note = Description of Artificial Sequence: Synthetic coding sequence
  source 1..1920: mol_type = other DNA
atggtcgattatatcgtggagtatgactatgacgcagtccatgatgatgagttaacaattcgcgtgggcgaaatcattcgaaatgtgaagaaactacaggaagaaggttggttggagggagagctcaatgggcgtcgagggatgttcccggataattttgtcaaggagatcaagcgcgagaccgaattcaaggacgatagcctaccaattaaaagagaacggcatggaaatgttgccagtctcgtacagagaatttcaacatacggactaccagctggcggaattcaaccgcatcctcagacaaagaacattaaaaagaaaacaaaaaagcgccagtgtaaggtgctcttcgaatacataccccaaaatgaagatgaactggaactgaaagttggggacatcattgacataaatgaggaggttgaagagggctggtggtcgggcacgctgaataataagttgggattatttccgtctaacttcgtgaaagaactcgaggtgacggatgatggcgaaacgcatgaggctcaggacgattctgaaacagtcctagcaggacctacctcccctatcccttcattaggcaacgtctccgagacagcttccggcagcgtcacccaacccaagaagatccgtgggatcgggttcggggatatttttaaggaggggtcagtgaaactgcggaccaggacctcttctagcgagaccgaagagaagaagccggaaaagccgctgattttgcagagcctcggacccaagactcaaagtgtagagatcactaaaactgacacagaaggcaagattaaggccaaggaatattgtagaaccttattcgcatatgagggcacaaacgaggatgaactgactttcaaggaaggggagattatccatctcatttcaaaagaaacaggggaagctgggtggtggaggggagaactgaacggcaaggagggcgttttcccagacaactttgcggtccagatcaatgaacttgacaaagactttcccaagccgaaaaagccaccaccacctgccaaggcaccagcacctaaacccgaattaatcgccgctgaaaagaagtacttcagtctaaagcccgaggagaaggacgaaaagagcacattggagcagaaaccctcgaagccagccgctccacaggtcccgccaaagaagccaaccccacctactaaggcctccaacctgctccgctcaagtggtaccgtgtatcctaaacggccagaaaagcctgtcccaccgcctccccctatcgccaaaatcaatggagaagtgagctctatttcatcaaagttcgagaccgagcctgtgtccaagctgaagctagattccgagcaactgcctttgaggcccaaatctgtggacttcgactctctgacagtccggacctccaaagaaactgacgtagtaaacttcgacgatatcgcatccagtgaaaacctactgcatttaaccgcaaatcgccctaagatgcctgggcgtagattgcccggtcggtttaatggcggtcattccccgacgcatagtccagaaaagattctgaagcttccaaaagaggaagactccgctaacttaaaaccctctgagctcaagaaagacacctgctactcccctaagcctagcgtgtacctctctactccttcaagcgcctccaaagcgaacacaaccgcatttttaacaccgctcgagataaaagccaaagtcgaaaccgacgacgtcaaaaagaacagcttggacgagcttagggctcagataatcgaactactttgcatcgtggaggcactaaagaaggatcacggcaaggagctggagaaattgcgcaaggatcttgaagaagaaaagactatgcggtctaacctcgaaatggagatagaaaagttgaagaaggccgttttatcatcatag

SEQ ID NO: 217515 - DNA, 717 bp, synthetic construct
  misc_feature 1..717: note = Description of Artificial Sequence: Synthetic coding sequence
  source 1..717: mol_type = other DNA
atgtgcagacgttgtaaacctgagctgaggcaaaactttcagtctgcctctgggatctgtatttgtcactggttgcagatcaggcgtactcgaagtagggaggggcgagctatgtggctgcctcccgctctcttgttactgagtttgagcgggtgtttctcgatacaaggtccagagtcagtccgcgcacctgagcaggggtcgttgactgtgcagtgccactacaaacagggctgggagacctacattaagtggtggtgtagaggggtacgttgggatacttgcaagatcctgattgaaaccagaggctctgaacaaggtgaaaagagcgacagggtgtccatcaaagataatcagaaagatcgcacattcacagtgacgatggaaggtttgaggcgcgatgatgcggacgtctactggtgtggcatcgaacgtcggggacctgacttagggacccaggtgaaagtaatcgtggatccagaaggcgctgcatctaccactgcatcttctccgaccaactcaaacatggctgtttttatcgggtcgcataagagaaaccattacatgctactggtctttgttaaggtccccatcttactgatcttggttactgctatcctgtggctgaagggtagccaaagagtcccagaggagcccggagaacagccaatctatatgaatttttctgagccactgaccaaggatatggcaacctag

SEQ ID NO: 217516 - DNA, 606 bp, synthetic construct
  misc_feature 1..606: note = Description of Artificial Sequence: Synthetic coding sequence
  source 1..606: mol_type = other DNA
atgtggctgcctcctgccctcctcttgttatctctcagcggctgcttctccattcaaggaccagagagcgttcgagccccagaacagggaagcctcacagtccagtgtcattacaaacagggttgggaaacctacattaagtggtggtgtcgaggggtccgctgggacacctgtaagatactcattgaaactcgaggctccgagcagggcgagaagagcgaccgggtctccataaaagacaatcaaaaggatagaacgttcactgtcacaatggaagggcttaggcgagacgacgctgacgtgtactggtgcggtatagaacggagagggcctgacctcgggacccaggtaaaagtgatagtcgatcccgagggcgcagcatcgacaacagccagctcccccaccaactcaaacatggcagtcttcataggctcacataagagaaatcattacatgctcttagtcttcgtaaaggttcccatccttttaatactggtcactgctattctctggctcaagggatctcagcgtgttccagaggagccaggcgagcagccgatctacatgaatttcagcgaacccctaaccaaggacatggcgacgtag

SEQ ID NO: 217517 - DNA, 735 bp, synthetic construct
  misc_feature 1..735: note = Description of Artificial Sequence: Synthetic coding sequence
  source 1..735: mol_type = other DNA
atgccactcctcaccctctatctcttacttttctggctgtccggatactccatcgttactcagatcactgggccaaccacagtgaacgggctggaacggggttctcttactgtgcagtgcgtgtacagatcagggtgggagacgtaccttaagtggtggtgccgaggggcaatttggcgcgattgtaaaatactggttaaaaccagtggcagcgagcaggaggttaaacgtgatagagtgagtataaaagataaccagaaaaacaggacattcaccgtaacaatggaagacctgatgaagacggatgccgacacttattggtgcgggattgaaaaaacgggaaacgacctcggagtgactgtgcaggttacgatcgatcctgctccagtgactcaagaagagacatccagctcacccacccttactgggcaccatttggacaacaggtctgagggctctcaagctgcaaactaccggcctgcagcacatcaggcacaagcccctgaggcccagtgcccacccgctcctcatctacatcacatcgccgctgccttcggtggtagactgacccttggtttagaggacgacgaggtgccagcagagtcgtcacgagacgtgcccagggccggaactgctgcaccaggtggaaggcctctcctgtgtagacccgacccagccgctggaagaaatctgcctgcaaaaggctaccacgaagcattcttgtgccccggatag

SEQ ID NO: 217518 - DNA, 873 bp, synthetic construct
  misc_feature 1..873: note = Description of Artificial Sequence: Synthetic coding sequence
  source 1..873: mol_type = other DNA
atgcctttactgactctgtatttgctgctattctggctgtctggttattcgatcgtcacccagatcaccggtcccactaccgtcaacggactcgaacggggtagtctgacagtgcagtgtgtatatcggtctggctgggaaacctaccttaaatggtggtgtaggggggcaatttggagggattgcaaaatcctggtgaagacgagcggatcagaacaggaggtgaaaagagacagggtgagcatcaaggataaccagaagaacaggacttttaccgtaaccatggaagaccttatgaaaaccgacgcagacacttattggtgtgggatcgagaaaactggtaatgacctcggggtcaccgtgcaggttaccatcgaccctgccccagtgacccaggaggagacgagctcatcacccaccctgaccggccaccatctggacaaccgtcacaagcttctcaagctatccgtgttgctccccctgatatttactatcctgctgttattgctagtggccgctagtctactggcctggagaatgatgaagtatcagcaaaaggctgctgggatgtccccagagcaagtgctacagcctctagaaggcgacctctgctacgcagatctgactctgcagctcgcagggacgtcaccccagaaagccaccaccaagttatcctcagctcaggtggaccaggtggaggtggagtatgtcaccatggcttctcttcccaaagaggacatcagctacgcgtcattaaccctcggagcggaagaccaggaaccaacgtactgcaatatgggacacctgtccagccatctgcccggtagagggcctgaggagcccacagagtactccacgatctcgaggccatag

SEQ ID NO: 217519 - DNA, 585 bp, synthetic construct
  misc_feature 1..585: note = Description of Artificial Sequence: Synthetic coding sequence
  source 1..585: mol_type = other DNA
atgtggctccctcagctggacttgatgcgggtaattagcgcaaaatcccagggatattccatagtaacacagataaccgggcctacaaccgtaaatggactggagagaggaagtctgacagtccagtgcgtataccgtagcggttgggaaacatatttgaagtggtggtgtcgaggcgcaatatggagagactgcaaaatccttgtgaagacttcgggcagcgaacaggaggtcaaacgtgaccgcgtctcgatcaaagacaatcagaagaacagaaccttcaccgtgaccatggaggatctgatgaagaccgatgccgatacctattggtgtggcattgagaagacaggcaacgatctgggcgttaccgtgcaggtcacgatagatccggcaccggtcacccaagaggaaacaagctcatcccctacgttgaccgggcaccatctagacaattcatcccgagacgtgccgagagccggtaccgccgctcctgggggtcggcctcttctatgtcggccagaccctgccgctggcaggaacctgccagcaaagggttatcatgaagcttttttgtgccccggatag

SEQ ID NO: 217520 - DNA, 720 bp, synthetic construct
  misc_feature 1..720: note = Description of Artificial Sequence: Synthetic coding sequence
  source 1..720: mol_type = other DNA
atgtggttgccgcaattagacctcatgagggtgatttcagcaaaatcacaggggtacagtatagtgacacagatcaccggccctaccacagtcaatggcctagagcgagggagcctcactgtgcaatgtgtatacagaagcggatgggaaacttacctcaaatggtggtgtaggggggcaatttggagagattgcaaaattctggtaaagacttccggcagcgagcaggaggtgaagagggaccgtgtatctatcaaagacaatcagaagaatcggaccttcactgtgactatggaggacctgatgaaaaccgacgctgatacgtattggtgcgggatcgagaaaaccggtaatgatctgggagtgacggtccaggttacaatcgatccagcaagcactcccgctccaaccactccaacctccacaacttttaccgcaccggttactcaagaggagacaagctcttcacctacgctgaccggacatcacctggacaatagacacaaattgctgaaattatctgttctgctgcccctaatctttacaatcctgttgttgctccttgtagccgcatcattgctggcatggcggatgatgaagtaccagcagaaaggcacggccgcacccggtggacgccctctcctctgtcgccctgaccctgctgccggacggaatctcccggcaaaaggttaccacgaggctttcctttgtccaggttag

SEQ ID NO: 217521 - DNA, 699 bp, synthetic construct
  misc_feature 1..699: note = Description of Artificial Sequence: Synthetic coding sequence
  source 1..699: mol_type = other DNA
atgctccgagcagccttgccagccctgctgcttcctctgctcggtctggcagctgctgccgttgccgactgcccaagtagtacatggattcaattccaagattcgtgctatatctttttacaggaggcaattaaggtggagtctatcgaggacgtgaggaatcaatgcactgatcacggcgctgatatgattagcatacacaatgaggaggagaatgccttcatacttgacacccttaagaaacagtggaagggccctgacgacattctgctcggcatgttctatgatacagatgatgctagcttcaagtggttcgataacagcaatatgaccttcgataagtggacggatcaagacgacgatgaggatctcgtggacacatgtgcctttctgcatattaagaccggcgagtggaaaaagggcaactgtgaggtcagctcggtggagggcacactctgcaaaaccgccattccatacaaacggaagtacctgtccgacaatcatattctcattagcgctctcgtgatcgcctcgacggtgattctcacggttctcggtgccattatctggttcctctacaagaagcatagcgattctcgcttcactaccgttttcagcacagcccctcagagtccctataatgaggactgtgttctcgtagttggagaagaaaatgaataccctgtccaattcgactag

SEQ ID NO: 217522 - DNA, 525 bp, synthetic construct
  misc_feature 1..525: note = Description of Artificial Sequence: Synthetic coding sequence
  source 1..525: mol_type = other DNA
atgctgagagcggcactgccagcactattattacctttgctgggcctggctgcggctgcagttgccgactgcccatcaagtacctggatacaatttcaagattcctgctacatcttcctgcaagaagctatcaaggtcgagtctatcgaggacgtcagaaaccagtgtacggatcacggggctgacatgattagtattcacaatgaagaggaaaacgcatttattttagacaccttgaagaaacagtggaagggccctgatgatatcctgctgggtatgttctacgatactgacgttccatataagagaaaatacctctccgataatcacatcttgatctctgccctcgtaatagccagcactgtcatactgacggtacttggtgccattatttggtttctctacaagaaacatagtgacagccgtttcactactgtcttttccacagcccctcagtctccatataacgaagactgtgtccttgtggtgggcgaggagaatgagtaccccgtacaatttgactag

SEQ ID NO: 217523 - DNA, 849 bp, synthetic construct
  misc_feature 1..849: note = Description of Artificial Sequence: Synthetic coding sequence
  source 1..849: mol_type = other DNA
atgtccgggggatggatggcgcaggtgggcgcttggcgcaccggtgccctcgggctggccctgttgctgctgctgggtctgggtttaggcttagaggccgctgccagtcccctgtctactcctacatccgcacaggccgctggaccctcaagcggtagttgtccgccaaccaaatttcaatgtaggaccagcgggctgtgtgtgcctcttacctggcgttgtgacagggatctggactgtagtgacggcagcgatgaagaggagtgcaggatagagccctgtacacagaaaggccaatgtccgcctccccctggcttgccttgcccttgtactggtgtgtccgattgttcagggggtactgacaagaagctgcgcaattgctctagattggcttgccttgctggggagttaagatgtactctgtctgatgactgcatccctttgacttggagatgtgatggtcatcccgattgtcccgatagcagcgacgagctgggctgtgggaccaacgagatactccctgagggggacgccacgactatggggccacccgtaactctcgaaagcgtgacaagtcttagaaatgccaccacaatgggcccaccagtcacactggaatccgtgccaagcgtcgggaacgctacttcctcctcagctggtgaccaatctggtagtcctactgcttatggtgtcatcgctgcagcagccgtattgagcgcctcattggtaacagcaaccctcctcctgttgagttggctgagagcgcaggagcgtctaaggccactcggcctgctggtagccatgaaggagtctctgctcttgagtgagcagaagacatccctgccgtag

SEQ ID NO: 217524 - DNA, 606 bp, synthetic construct
  misc_feature 1..606: note = Description of Artificial Sequence: Synthetic coding sequence
  source 1..606: mol_type = other DNA
aacgaaatcctgccagagggcgatgctaccacaatgggtcccccagtgacacttgagtctgtgacaagcctgcgcaacgccactactatgggccctccggtgactctagagtctgtccccagtgttggaaatgccatcctgctatgtagacgaccggtctggaagcccaactgtctgtggggctattgctcgtgctgcggcgctcagtgcaaacccggacaccgacatccgccaccattcgttttggcaccgtctcctggggcaccccctccaaccggggtgacaggcggacatgaaggcgtgcctgctgctgtgaggacggaggacttggccgctctccgcacgtcaacctgccatcatcggcactcagcactcggagttgcaggccaggaagaatcctcagatgccgatggttaccctggcacccctgccctacgcgatttgagctcatcaggccacgtggagcccaggacacgtgctcccgctgaggtggcattagagattgaggggccatggaccctccccatggaaatccgtggagcgcgtatggggaaccttcctcagccggaactgcggggttggccccaggctgccccacgtggatag

SEQ ID NO: 217525 - DNA, 723 bp, synthetic construct
  misc_feature 1..723: note = Description of Artificial Sequence: Synthetic coding sequence
  source 1..723: mol_type = other DNA
atgagcggcggatggatggctcaggtcggagcatggaggactggtgctctggggctagctctgctgctcctgctggggttagggctcggcctggaagccgcagctagtcctttgtcaactccgacttcagcgcaggctgctggaatcgaaccctgcacccaaaagggccagtgccccccacctcccggattgccatgcccttgcaccggcgttagtgattgcagcgggggtaccgacaaaaaattgcggaattgttcccggttggcttgcttggccggtgaattgcgctgtactctcagtgatgattgcattcccctgacttggcgctgcgatggccaccccgactgtccggattcaagcgacgaactcgggtgcggaaccaatgagattctgccagaaggagatgcaaccaccatgggccctccggtgaccctcgagtcagttaccagtttgcgcaatgccaccacaatgggccctcctgtgacccttgagtccgtaccttccgtgggaaacgcaacctctagctccgccggtgatcagtcgggatcgcccaccgcctatggcgtaattgcggcagcggctgtcttatcagcatcgctggtgaccgccacccttcttctgctttcatggctgcgagcccaggagagattgcgccctctggggctccttgtcgctatgaaggagtctctactcctcagcgaacaaaagactagcctcccctag

SEQ ID NO: 217526 - DNA, 1095 bp, synthetic construct
  misc_feature 1..1095: note = Description of Artificial Sequence: Synthetic coding sequence
  source 1..1095: mol_type = other DNA
atgcccctcttgctgttacttcctctcttatgggcaggcgctctggcgatggaccccaacttttggctgcaggttcaggaaagcgtcaccgtccaggagggcctctgtgtgctggtgccgtgcacgttctttcatcctatcccttattatgacaaaaactctccggtccacggatactggttccgagagggggctataattagtagagactcccctgtggcgacaaataagctggaccaggaagtgcaggaagagacacagggccgattcaggctgctgggagacccatcgcgcaacaactgtagcctttctatcgtcgatgcacgcaggagagataatggaagttacttctttcggatggagcgtggcagtaccaagtacagctataaaagcccgcagctttcagtccatgtgacagatctcactcacagacctaagattctcattcccggaactctcgaaccgggacattctaagaaccttacatgctcagtgtcctgggcgtgtgagcagggaacccctcccatattctcctggttgagcgcagctccaaccagcctcggaccaaggaccacacacagctctgtcttgatcatcaccccaagaccacaggaccacggcaccaatctgacttgccaagtgaaatttgcaggggcaggcgtgaccaccgaacgcaccattcagttaaatgtcacgtatgtgccacagaaccccacaactggaatattccctggtgacggatccggaaagcaggaaacccgcgcaggggtcgttcacggggctatcggaggagccggtgtgacagccttgctcgccttgtgcctctgcctgattttttttatcgtaaaaacccatcggaggaaggcggcaaggactgcagtgggcaggaatgacacacaccctacaacaggttccgctagtcccaagcaccagaaaaagtcaaaactgcacgggccaacagagactagttcatgttccggtgcagctcccaccgtcgaaatggatgaagagcttcactatgcctcactgaattttcatggtatgaatccctcgaaagacaccagcactgaatactctgaggtgcggacgcaatag

SEQ ID NO: 217527 - DNA, 933 bp, synthetic construct
  misc_feature 1..933: note = Description of Artificial Sequence: Synthetic coding sequence
  source 1..933: mol_type = other DNA
atgccactgttgctgctgctgcccttactctgggctggggctttggccatggaccccaatttttggcttcaggtccaagaaagtgtgacagtgcaagagggcctgtgtgtgctggtaccctgcaccttcttccatccaattccatactatgataagaattcccctgtgcatggctactggtttcgagaaggagctattatttcacgtgacagccctgtggctaccaataaactggaccaagaggttcaggaggaaacgcagggcagattcaggctcttgggagatccaagtcgcaacaactgcagcctgtccatcgttgacgccaggagacgcgacaacggtagctactttttcagaatggagcgaggttccaccaagtatagctataaaagcccccagctgtctgtgcacgtcaccgacttaacacacaggccaaagatcctcattcctggaaccctggaaccagggcactccaagaacctgacttgtagcgtgtcttgggcatgcgaacagggaactcctcccattttcagttggctgagtgcggctccaacttctcttggccctagaaccactcactcatctgtgctgatcataaccccccgaccacaggaccacgggaccaaccttacatgtcaggtgaagttcgctggcgctggagttaccacagaaaggaccatccagttaaatgtgacctacgtgccccagaatccaaccactggcatctttcctggcgatgggagtggaaagcaggagactcgcgctggagtggtgcacggagctattggtggggcaggcgtgactgcgctgctagccctgtgtctatgtttaatttttttcatcgtgaaaactcatagacggaaggccgctcgcacagccgtcggcagaaacgacactcatcctactacggggagtgccagtcccgtgcggtag

SEQ ID NO: 217528 - DNA, 714 bp, synthetic construct
  misc_feature 1..714: note = Description of Artificial Sequence: Synthetic coding sequence
  source 1..714: mol_type = other DNA
atgcctctcttgctgctgctccccctgctctgggctgatttaactcatcgcccaaaaatcctgatccccggtaccctggaacctgggcactcaaaaaatctgacctgttcagtgagctgggcttgcgaacaggggacgcctcctatcttttcctggctctcggccgcacccacctctctgggccctcgtaccacccactcctcagtgttgatcattaccccaaggccacaggatcatggaacaaacctgacttgccaggtgaagtttgccggagccggtgtaacaaccgagaggaccatacaactgaatgtaacctatgtccctcagaatcccaccacaggtatctttccgggtgacgggagcggcaagcaggaaaccagagctggggttgtgcatggagccattggcggagccggagtgacagcactgctggccttgtgcctgtgcctgattttcttcattgtcaagacccaccgcaggaaggcagctcggaccgccgtcggtcggaatgatactcaccccaccaccggtagcgccagtcctaagcaccagaagaaatcaaaactccacgggccaacagaaacgagtagttgcagtggcgctgctcctacagtggagatggatgaagagcttcattacgcaagtcttaatttccacggcatgaaccccagtaaggataccagtacagagtattctgaagtgaggacccagtag

SEQ ID NO: 217529 - DNA, 639 bp, synthetic construct
  misc_feature 1..639: note = Description of Artificial Sequence: Synthetic coding sequence
  source 1..639: mol_type = other DNA
atgccactgttacttctgctccctctgctttgggcggatctgacccataggcccaagatcctgattccgggaacattggagcctggacacagcaagaatttgacttgttctgtttcctgggcttgcgagcagggtacccctcctatatttagctggttgagcgccgctcccaccagcctggggccaagaactacgcattcctcagtccttataattaccccaaggcctcaagaccatgggaccaatttgacctgtcaggtgaagttcgccggtgcaggggtgaccaccgagcgcaccatccaactcaatgttacttacgttccacaaaatcctaccacaggtatctttccgggtgacggttcaggaaaacaggagaccagggccggtgtcgttcacggagccattggcggagctggcgtcactgctctcctggccttatgcctgtgtctgatcttcttcatcgtgaaaacgcaccgtcgtaaagcagctcgcaccgccgtgggcaggaatgacacccacccaacaaccggaagtgcgtcaccagtgtcagacggggcttcgtggcatccagtttgcccagcagatacctcttctcagtgcggccctccttcctgccccatacagcatttccaaaattag

SEQ ID NO: 217530 - DNA, 1419 bp, synthetic construct
  misc_feature 1..1419: note = Description of Artificial Sequence: Synthetic coding sequence
  source 1..1419: mol_type = other DNA
atgggatgtgaccgcaattgcgggcttatcgcaggcgctgttatcggggctgtgctggccgtctttggtggcatcctgatgcccgtcggcgaccttctgattcagaaaaccattaaaaaacaggtggtgctcgaagaggggacaatcgctttcaagaattgggtgaagacaggaactgaggtctaccgccaattttggatattcgatgttcaaaacccacaagaggtgatgatgaactcttctaacatacaagttaaacagcgtgggccatatacatatagagtccgcttcttggccaaggaaaatgtgactcaggatgccgaagataatacggtttcctttttacagccaaatggtgccatcttcgaaccgtcactgtctgtaggcacagaagcagataatttcacagtcctgaacttagccgtggccgcagctagtcatatttaccagaatcagtttgtgcagatgatcctgaattctcttattaataaaagtaagtccagcatgtttcaggtacgcactctgcgggaactgctctggggctaccgagatcccttcctgtcacttgtcccatacccagtgactaccaccgtggggctgttttacccttataacaacaccgctgacggagtctataaagtgttcaatggcaaagataacattagcaaggtggcaatcatcgatacttacaaggggaaaaggaacctgagctactgggaatcccattgcgatatgatcaacgggacagatgcggctagtttcccccctttcgtagaaaaaagtcaggtcctacagtttttcagtagcgatatctgtcggtctatctacgctgtattcgagtcagacgtcaatctgaagggtattccggtctaccgctttgttctcccctccaaggctttcgcatcacctgtagagaacccagataactactgtttctgcactgagaaaatcattagtaagaactgcacgtcctacggcgtgctggacatttccaaatgtaaagaaggccgtccggtctatatttctcttccacatttcttatatgctagcccggacgtgtctgagcctatcgacgggctgaacccaaacgaggaagaacatcgcacctatttggacatcgagcccatcacggggtttacactgcagtttgccaagagacttcaggtgaacctgctcgttaagccaagcgaaaagatccaggtgctgaaaaatctgaagcgcaactacatcgtccctattctatggctgaacgagacaggtacaattggagatgaaaaggcgaatatgttccgcagccaggtgacaggaaaaatcaaccttctcggcttaatcgagatgatcctgctgtccgtgggtgtggtaatgttcgtggcctttatgatatcttactgtgcatgtagatccaaaactattaagtag

SEQ ID NO: 217531 - DNA, 1419 bp, synthetic construct
  misc_feature 1..1419: note = Description of Artificial Sequence: Synthetic coding sequence
  source 1..1419: mol_type = other DNA
atgggttgcgaccggaactgcggcctgatcgctggggctgtcattggtgccgtgctggccgtcttcggtggcatcctgatgccagtgggggatttactcattcagaaaaccataaagaaacaggtggtcctggaggagggtaccatcgccttcaagaattgggttaaaacaggaaccgaggtgtacaggcaattttggatatttgacgtccagaatccccaggaagttatgatgaactcctccaatatccaggtgaagcaacgcggaccctatacatatagggtcagattcctggccaaggaaaatgtgacacaggatgccgaggacaacactgttagcttcctgcagccgaacggggcaatattcgaaccgtcactgtcggtggggaccgaggcggataacttcacagtgctgaacctggctgtggccgctgcatctcacatctaccagaaccagttcgtccagatgatcctgaactctctgataaacaaatctaagtcgtccatgttccaggtgcgtaccctgagggaactgttatggggctatcgcgatccctttctatctttggtcccttaccctgtcacaactaccgtcgggttattctatccatacaacaacacagccgacggcgtgtacaaggtcttcaacggcaaggacaacatttctaaagtcgctattattgatacatataagggcaagaggaacctgtcatattgggaatcccactgcgacatgattaatggtacagacgcagctagtttccccccttttgtggaaaagagtcaggtgctacagttttttagctccgatatctgcagaagtatatacgccgtgtttgagagcgacgtgaatctgaaggggatccccgtgtacaggtttgtgttgccttcaaaggcattcgcctcaccagtggagaaccctgacaactactgcttttgcacagagaagataattagtaagaactgcaccagctacggggtgctagatattagcaagtgtaaggagggcaggccagtttacatctctcttcctcattttctgtatgcctctcctgacgtctcagaacccattgatggattgaaccctaatgaagaagagcacaggacgtacctcgacatcgagcccataactgggttcaccttgcagtttgctaaacggctgcaggtaaatctgttggtcaaaccaagtgaaaagatacaggtcttgaagaacctgaaacgcaactatatcgtgccaattctatggctcaacgagacagggaccatcggggacgagaaagcgaacatgttccggtcacaggtcactgggaaaattaacctgctgggacttatagagatgatcttattgtcagttggggttgtcatgttcgttgcctttatgatttcttattgtgcttgtcgcagtaaaaccatcaagtag

SEQ ID NO: 217532 - DNA, 612 bp, synthetic construct
  misc_feature 1..612: note = Description of Artificial Sequence: Synthetic coding sequence
  source 1..612: mol_type = other DNA
atggggtgcgaccggaactgtggtttaattgcgggagccgtcataggggctgtactggcggttttcgggggtatcctgatgcccgtaggagatctgctcattcaaaagaccatcaaaaagcaggtggtgctggaggagggaactattgcttttaagaattgggtcaaaacggggacagaggtgtataggcagttttggatctttgacgttcaaaacccgcaagaagtgatgatgaacagctccaacattcaggtcaagcagcgcggaccctacacttaccgcgttaggtttctagcgaaagaaaatgtgactcaggacgccgaggataacacagtttcctttttacagccgaatggggcaatattcgaaccctccctgtccgtggggacagaagctgacaatttcaccgtactgaacctggcagtggctgctgctagtcacatctatcagaaccagtttgtccagatgatcctcaattcccttatcaacaaatctaaatcttctatgtttcaggtgcggaccctccgtgaactgctctggggctaccgggaccccttcctttccctggtgccatatcccgtgacaactacagtggggttattctacccttag

SEQ ID NO: 217533 - DNA, 1392 bp, synthetic construct
  misc_feature 1..1392: note = Description of Artificial Sequence: Synthetic coding sequence
  source 1..1392: mol_type = other DNA
atggggtgcgaccggaattgcggtctcatcgcgggtgccgtgattggcgctgttctcgctgtttttggcggtatcctcatgcccgtaggcgaccttcttattcagaaaaccataaagaagcaggtcgtgttggaggagggaacaattgcctttaagaactgggttaagacaggaacagaagtctaccggcaattttggatatttgatgttcagaaccctcaggaggtgatgatgaattcctccaacatacaggtgaagcaaagaggcccatatacataccgagtgcggtttctggcaaaggagaatgtaactcaggatgccgaggataacactgtgtcctttttacagcctaatggtgcgatcttcgagccaagcctctcagtcggaaccgaagcagacaactttacagtgttgaaccttgccgtagcagccgctagtcacatctaccagaaccagttcgtgcaaatgatcctgaatagtttgatcaataagtccaagagtagtatgttccaggttaggaccttacgcgaacttttgtgggggtacagggatccctttctgtcactggtcccctaccccgtgaccactactgtcggcctgttctacccttacaataataccgctgacggcgtctataaggttttcaacggcaaggataatatatctaaagtggccattatcgacacgtataagggcaagaggaacttgtcctattgggaaagccactgcgatatgatcaacgggacagacgccgcatcttttccgcctttcgtcgaaaaatctcaggtcctccaattcttttcgtcagatatttgccgatcaatatacgcagtatttgagagcgatgttaacctgaagggcatccctgtgtaccgattcgtgctgccctctaaagctttcgcgagtccagtggaaaatcctgataattactgtttttgcacagagaaaattatttctaagaactgcactagttatggggtgctggatatttctaagtgtaaagagggcagacccgtgtacatctcactcccacatttcctgtatgcttctccggacgtgtctgagcccatcgatggacttaatcctaatgaggaggaacaccgtacgtacctagatatcgagcccattacaggatttaccctgcagttcgccaagaggctccaggtcaatctcctggttaagccgagtgagaaaatccaggtgttaaagaatctcaaaagaaactacatcgtccccatcctctggctgaacgaaaccggtaccatcggtgatgagaaggctaacatgttcaggtcccaagtgacaggcaaaattaacttgctgggactgatagagatgatcctgctgagcgtcggagtggttatgttcgtggcgtttatgattagctattag

SEQ ID NO: 217534 - DNA, 447 bp, synthetic construct
  misc_feature 1..447: note = Description of Artificial Sequence: Synthetic coding sequence
  source 1..447: mol_type = other DNA
atgggatgtgaccgaaattgcgggcttattgctggagccgtgatcggcgctgtgttggctgtgtttggcggaattcttatgcccgtcggtgaccttctcattcaaaagacaatcaagaagcaggttgtcctggaggagggaacaatcgctttcaaaaattgggtaaaaacgggcaccgaggtttataggcaattctggattttcgacgtacagaatccacaggaggtgatgatgaactcctccaacattcaggttaagcaaagagggccatacacctatcgcgtgcgattcttggctaaggaaaatgtgacccaggacgcagaagacaatacagtctccttccttcagcctaatggggctatcttcgaaccttctctgagtgtggggacagaagccgataattttactgttctgaacctcgcagtggcagccgcttcacacatttag

SEQ ID NO: 217535 - DNA, 282 bp, synthetic construct
  misc_feature 1..282: note = Description of Artificial Sequence: Synthetic coding sequence
  source 1..282: mol_type = other DNA
atgggttgcgatcggaattgcggcctcattgccggtgccgtcattggggcagtgctggcagttttcggcggtatcttaatgccagtcggcgatcttctaattcagaagaccatcaaaaagcaagtggtcttggaagaaggtacaatagcgttcaagaactgggtcaaaacggggaccgaggtgtacaggcagttctggatcttcgatgtccagaacccacaggaggtaatgatgaattctagcaatattcaggtaaaacagcgtggcccatacacatattag

SEQ ID NO: 217536 - DNA, 1419 bp, synthetic construct
  misc_feature 1..1419: note = Description of Artificial Sequence: Synthetic coding sequence
  source 1..1419: mol_type = other DNA
atgggatgcgatcggaattgtggactcatagctggtgcagtgatcggcgctgtgctcgctgtattcggaggaattttgatgcccgtgggtgacctgctgatacagaagacaattaagaagcaggtggtcctggaggaaggtaccatagcttttaagaattgggttaagacaggaacggaagtgtacagacagttttggatctttgacgtgcagaatccacaggaggtcatgatgaactcttctaatatacaggtcaaacaacggggtccatatacctatagggtgaggttcctggctaaggagaacgtcactcaagacgcggaggataatactgtctcctttctccaacccaacggcgcaatatttgaaccctccctgtcagtggggaccgaggccgacaacttcacagtcctcaacttggcagtggctgccgcttctcacatctaccagaaccagttcgtgcagatgattctcaactctcttattaacaagagcaagtcttccatgtttcaagtgaggactttacgagaactcctgtggggatatcgcgacccctttctgagcctggtgccttaccccgtgaccacaactgttggccttttctatccatacaacaacacagccgacggcgtctataaagtgtttaacggtaaagataacatatctaaggtcgctatcatagacacatacaaggggaaacgaaaccttagttactgggagagtcactgtgacatgattaacgggaccgatgcagccagcttccccccttttgtcgagaagagccaggtcctccagtttttcagctctgatatatgcagatccatttacgccgtctttgagtcagatgtgaacctcaagggtatcccggtgtacaggttcgtactgccctcaaaagccttcgcaagccctgttgagaacccagataactactgcttttgtacagaaaaaattatcagcaagaactgcacctcctatggcgttctggatatctccaagtgcaaggaaggtcgccctgtctacattagcttgccccacttcttgtatgcctcccctgacgtgagcgaacctatcgacggactgaatccaaacgaggaagaacatcgaacgtatcttgacatcgaaccgattaccggcttcacgctccagttcgccaaaagactgcaggtcaacttgctggtgaaaccctccgaaaagatccaggtgctcaaaaacctgaagagaaactacatagttccaatcctgtggctcaatgagactggcactataggggatgaaaaagcaaatatgtttcgctctcaggtgacagggaaaatcaacttactgggcctcatcgagatgatcctcctttccgttggggtcgtaatgttcgtggctttcatgatttcttactgcgcatgcaggagcaagacaattaagtag

SEQ ID NO: 217537 - DNA, 1302 bp, synthetic construct
  misc_feature 1..1302: note = Description of Artificial Sequence: Synthetic coding sequence
  source 1..1302: mol_type = other DNA
atgggatgtgaccgaaactgcgggttgattgcaggggctgtaatcggtgccgtactggctgtgttcgggggtatcctgatgccggtaggggatcttctgatccagaaaactatcaaaaaacaggtggtcctggaggaagggacaattgctttcaagaactgggtcaaaactggcacggaggtgtacagacagttctggattttcgacgtgcaaaacccacaagaagtgatgatgaattcttcaaatatacaggttaaacagcgtgggccatacacatatcgggtgagatttcttgccaaggaaaacgtaacccaggatgccgaagataacaccgtgagctttttacagccaaatggcgctatattcgagccctccctctcggtgggtaccgaagcagataactttactgttttaaaccttgccgttgccgcagccagtcatatctaccagaaccaatttgttcagatgattctgaattctcttattaacaagtcaaaatcttctatgttccaggtgagaaccctacgagagctgctatggggatacagggacccattcctctctctggtcccttatcccgtcaccaccaccgtggggctgttttatccatataataatactgctgatggagtgtataaggttttcaacggcaaagacaatatttccaaagtcgccatcatcgacacctacaagggtaagagatccatttatgccgtcttcgaatctgacgtgaacctgaaaggaattccggtgtacagattcgttctcccatccaaagccttcgctagccccgtggaaaaccccgataactactgcttttgtaccgagaaaattataagcaagaattgcacctcatacggcgtcctggatattagcaaatgcaaggaaggacggcctgtgtacatcagcctcccacatttcttgtacgcttccccggacgtgagtgaacctatcgacggcctcaatcctaacgaggaagagcatcgcacatacctggatatcgaacccatcactgggttcacgctccagtttgctaagagactgcaagtcaacctgttggtgaaaccaagcgagaaaatccaagttctgaagaatctgaagaggaattatatagttcccatcctatggctcaatgagaccgggacgattggagacgagaaggccaatatgttccgttcccaagtgacggggaaaataaacttactcggactaatcgagatgatcctcctgagcgtgggggttgtgatgtttgtggcattcatgatttcctactgtgcttgtaggtccaaaactatcaagtag

SEQ ID NO: 217538 - DNA, 1419 bp, synthetic construct
  misc_feature 1..1419: note = Description of Artificial Sequence: Synthetic coding sequence
  source 1..1419: mol_type = other DNA
atggggtgcgatcgaaactgcgggctgatcgcgggagcggtcattggcgctgtcctggcagtgttcggcggaatcctcatgcccgtgggcgacctgctcatccagaagacgatcaagaaacaggtagtactggaggaaggcacaatcgcctttaagaactgggtgaagaccggtacggaagtttaccgccagttttggatctttgatgtgcagaatccccaagaagtgatgatgaactcatcaaatattcaggtgaaacagaggggtccctacacttaccgcgtgcgcttcctggccaaggaaaatgttacccaagatgccgaggacaacactgttagttttttacagcccaatggcgctatttttgagccctctttatctgtcgggacagaggctgacaattttacagtgctcaatctcgccgttgctgcggctagccatatataccaaaaccagtttgttcagatgattctgaacagtctgatcaacaagtctaaatcgagtatgttccaggtgaggacactgagagagcttctgtggggttaccgggatccattcctctccctggtcccttaccctgtgaccaccacagtggggttgttctatccatataataacaccgccgatggcgtgtataaggtctttaatggaaaagataacatctctaaagtggccatcatcgacacttataagggcaaaagaaacctgtcttactgggaatctcactgcgacatgatcaatggaactgacgcagccagtttccctcctttcgtggagaaatcacaggttttgcagtttttctcatctgacatttgcagatctatttacgctgtgtttgaatccgatgtgaatctcaagggtatcccagtatataggttcgttctgcctagcaaagcatttgcttcacccgtggagaaccctgacaattattgtttttgcactgagaagattatttctaagaattgcacatcctacggggttcttgatatctccaagtgtaaagagggaagacctgtatacatcagcttgccgcactttctctatgctagccctgacgtgtcggagcctatcgatggtcttaacccaaacgaagaggagcatcgcacatacttggacattgaacctatcactggattcacactccaatttgctaaacgccttcaggtgaatctcctcgttaagcccagcgagaaaatccaggtcttgaagaatctgaaaaggaactacatcgtgccgatcttgtggttgaacgaaactggaactattggcgatgaaaaggccaacatgtttaggagccaggtgactgggaaaataaatttattgggtctgatcgagatgatactgctgtcagttggggtcgtgatgttcgtggcatttatgatctcttactgtgcctgccggagcaagacaattaagtag

SEQ ID NO: 217539 - DNA, 282 bp, synthetic construct
  misc_feature 1..282: note = Description of Artificial Sequence: Synthetic coding sequence
  source 1..282: mol_type = other DNA
atgggctgcgaccgaaactgcggcctgattgccggtgccgtcatcggtgccgtgctggccgtttttggcggtattctcatgccagttggcgaccttttaatccagaaaactattaagaagcaggtggttctggaagagggtactatagccttcaagaactgggtcaaaacaggaacagaggtatataggcaattctggattttcgacgttcagaacccacaggaagtaatgatgaattcatccaatatccaagttaagcagcggggtccttatacctactag

SEQ ID NO: 217540 - DNA, 432 bp, synthetic construct
  misc_feature 1..432: note = Description of Artificial Sequence: Synthetic coding sequence
  source 1..432: mol_type = other DNA
atgggctgtgatcggaactgtgggttgatcgccggtgccgtgatcggggctgtcttagctgttttcgggggaatcttaatgcctgtgggagacttgcttattcagaaaactatcaaaaagcaggtggtgcttgaggaaggtaccatcgccttcaagaactgggtaaagacaggcaccgaagtctaccggcagttttggattttcgacgtgcagaatccacaggaggttatgatgaactccagtaacattcaggttaaacagcgcggtccttacacctatagggtgagattcctggctaaggagaacgtgacccaggacgccgaggacaacaccgtatcattcttacagcccaatggggcaatcttcgaaccttctctgagtgtgggcactgaggccgacaacttcactgtgctcaaccttgccgttgcatag

SEQ ID NO: 217541 - DNA, 1419 bp, synthetic construct
  misc_feature 1..1419: note = Description of Artificial Sequence: Synthetic coding sequence
  source 1..1419: mol_type = other DNA
atgggttgtgaccgcaattgcggactcattgccggagccgtcatcggcgctgttctggctgttttcgggggtattttgatgcctgtgggcgacttactgattcagaaaacgataaagaaacaggtggtcctcgaagagggcactattgcctttaaaaactgggtgaagaccggtacagaagtgtatcggcagttctggatctttgatgtgcagaacccacaggaggtgatgatgaactcctctaacatccaagtcaagcagcggggaccatatacatatagagtgaggttcttggccaaggaaaacgtgacccaggacgcggaagacaatacagtgtcttttttgcaacccaatggagccatattcgagccatcactcagcgtcggaacagaagccgacaatttcaccgtcctgaacctcgccgtcgcggctgcttcccatatttaccagaaccagtttgttcagatgatcctgaactctctcattaacaagagtaagtcctccatgttccaggtgcgcactctccgtgaactcctttggggctacagggaccctttcctgtctctggtgccgtacccagtcactacgacggtcggccttttttatccctacaacaacacagctgacggcgtgtacaaggtgttcaatggcaaggataacatctcaaaggtggccattatcgacacctataagggcaagcgcaacttatcttactgggagtctcattgtgatatgatcaacggtactgacgcagcatctttccctccttttgtggagaagagccaggttctgcagttctttagtagtgacatttgccgttcaatctacgctgtgttcgagtctgatgtgaacctgaaaggtatacccgtgtacaggtttgtgctgccaagcaaggcatttgcaagtccagttgaaaacccagataattattgcttctgtactgaaaaaatcattagtaagaattgtaccagctacggggtgttagacatcagcaaatgtaaagaggggaggcccgtgtatatttcgttgcctcatttcctgtatgcctctcccgacgtcagtgagcccatcgatggactgaacccaaatgaagaagaacataggacatatctcgatattgagcccatcaccggattcaccctccaattcgccaaaagactgcaggttaatctattggtgaaaccaagcgagaagattcaggtgctaaagaatctgaaacgtaattatatagttcccattctttggctgaacgagactggcacaattggcgacgagaaagccaatatgttccgcagccaggtgacaggcaaaataaacctccttggcttgatagagatgatccttttaagcgtaggcgtggtgatgttcgtggcattcatgataagctactgtgcctgcaggagtaaaacaatcaaatag

SEQ ID NO: 217542 - DNA, 198 bp, synthetic construct
  misc_feature 1..198: note = Description of Artificial Sequence: Synthetic coding sequence
  source 1..198: mol_type = other DNA
atgggctgcgacagaaattgcggcctcattgctggggctgtaatcggggctgtgctcgccgttttcggtgggattctaatgcctgtcggggacttactaatccagaaaaccatcaagaagcaggtggtgttggaggaaggaaccattgcatttaagaactgggtcaagacaggcaccgaggtgtatcggcaattctag

SEQ ID NO: 217543 - DNA, 1191 bp, synthetic construct
  misc_feature 1..1191: note = Description of Artificial Sequence: Synthetic coding sequence
  source 1..1191: mol_type = other DNA
atgatgaattcgtctaatatacaggtgaagcaacgcggtccctacacctacagagtgaggttcctggccaaggaaaatgtaactcaggatgccgaagacaacactgtgtctttcctccagccaaacggggctatcttcgagccaagcctttccgtcggtaccgaggccgataacttcaccgttctgaatcttgccgttgccgctgccagtcacatatatcagaaccaattcgtgcagatgatactgaattctttgatcaataaatccaaatcctctatgtttcaagttagaacattgagggagcttctttggggttatcgcgacccgtttttgtccctggtgccctatccagtgaccacaactgtgggactgttttacccctacaacaacactgccgacggcgtctataaggtgtttaatggtaaagacaatatcagtaaagtggctatcatcgacacctataaggggaagcgcaacctcagttactgggagtcacattgcgatatgattaatggcaccgatgctgcgtccttcccccctttcgtcgagaaatcacaggtgctccagtttttctccagtgacatttgccggtccatatatgcagtgttcgagtccgatgtgaacctaaaaggaatccccgtatatcgctttgttctgcccagcaaggcctttgcctccccagtggagaaccctgataactattgcttctgcacagagaagatcattagtaagaactgcacctcctacggggtattggacatatctaagtgcaaagaagggaggccagtgtacattagcttgcctcattttctgtatgcgtccccagatgtgagcgagcctattgatgggctgaacccaaatgaagaggagcataggacatacctcgacatcgagccaatcactgggtttaccctccaatttgccaagcgtcttcaggtgaatctactggtaaaaccatctgagaagattcaagtgctgaagaatctcaaaagaaattacatagtgccaattctctggttaaatgagaccggaacaataggcgacgaaaaagccaacatgtttagaagtcaagttaccgggaaaatcaatttgctaggacttatcgagatgatcctgttgagtgtaggtgtggtgatgttcgtggcttttatgatatcatattgcgcctgccggagcaaaaccatcaaatag

SEQ ID NO: 217544 - DNA, 1239 bp, synthetic construct
  misc_feature 1..1239: note = Description of Artificial Sequence: Synthetic coding sequence
  source 1..1239: mol_type = other DNA
atggggtgtgatcgtaattgtggccttattgcaggggctgtgatcggcgcagtcctcgctgtatttggcggaattttgatgcctgtgggggacttgctgattcagaagacaattaagaagcaagtggtgctggaggagggaactatagcatttaaaaactgggttaaaactggcactgaagtgtataggcagttttggatctttgatgtgcagaacccgcaagaagttatgatgaattcctccaatatacaggttaaacagcggggaccctacacatatcgggttcggttcttggctaaagaaaacgttacacaggacgctgaggataacaccgtcagcttcttgcaacctaacggcgcaatcttcgaaccctccctgtccgtcggcaccgaggcagacaacttcactgtgctgaatctagccgtggcctataataacaccgccgatggggtgtacaaagtgttcaacggcaaagacaatatttctaaagtcgctatcatcgacacatacaaggggaagcgcaatctgtcatattgggagtcacattgtgatatgatcaatggcaccgatgccgctagctttccgcctttcgtcgaaaagagccaggtcctccagtttttctcttctgacatttgtagatcaatctacgctgtgttcgaatccgacgtaaatctgaagggcataccagtctaccggttcgtgctgccaagcaaggcctttgcctcaccagttgaaaatccagataattactgcttctgcacagaaaagattatcagcaagaactgcacatcctatggggtccttgacatctccaaatgtaaagaaggcaggcccgtctatattagcttgccccacttcctgtacgcatcccctgatgttagtgagccaatcgatgggttgaaccccaacgaggaggagcaccggacctacttggatattgaaccaatcactggattcacactgcaatttgcaaagagactgcaggtgaacttacttgtgaaaccaagtgaaaagatccaggtgctaaagaacttgaaacgtaactacatcgtccctattctctggcttaatgaaaccggaactatcggcgacgagaaagcaaacatgtttcggagtcaggttaccggcaaaataaatcttttgggtttgattgagatgatattattgagtgtcggcgtcgttatgtttgtggccttcatgatctcatactgtgcctgcaggagtaagactatcaagtag

SEQ ID NO: 217545 - DNA, 867 bp, synthetic construct
  misc_feature 1..867: note = Description of Artificial Sequence: Synthetic coding sequence
  source 1..867: mol_type = other DNA
atgggttgtgaccgtaactgcggactgatagccggagcagtgattggggctgtcttggccgtctttggtgggatcctgatgcctgtgggggacctcttaattcagaagactattaagaaacaggtggttctcgaagagggtactatcgcttttaagaattgggtcaagaccggaactgaagtttacaggcagttctggatttttgatgtgcagaacccccaggaggtcatgatgaatagttccaacattcaagtgaagcaacgcggtccctatacctacagagttcggttcttagctaaggaaaacgtgacccaggatgccgaggacaatactgtgagctttctgcaacctaacggagccatatttgaaccctcgctgtccgtcggaaccgaggccgataattttacagtgctgaatctggctgttgcggcagcctcacatatttaccagaaccagtttgttcagatgatcctcaactcactgattaataaatcaaaatcatcaatgtttcaggttcgcactcttagggagcttctctggggctacagagacccttttctgtctcttgtgccatatcccgtgacgacaaccgtgggcctattctacccatataataatactgccgatggagtgtacaaggtgtttaatggaaaagacaatatctctaaagttgctattatcgatacctacaaaggcaagcggaacctctcctactgggagagtcattgcgatatgattaatgggaccgacgccgctagctttcctccattcgtggagaagagccaagtgctgcagttcttctcctctgacatatgcagagagacatgtgtgcatttcacctcctccttttccgtgtgcaaatcttag

SEQ ID NO: 217546 - DNA, 846 bp, synthetic construct
  misc_feature 1..846: note = Description of Artificial Sequence: Synthetic coding sequence
  source 1..846: mol_type = other DNA
atgtccgcccaggaaagttgcctatctcttataaaatactttctgttcgtgtttaatctgttcttttttgtcctcgggtcgcttatattctgcttcggaatttggattctcatcgacaagacttcatttgttagcttcgtcggcttagcatttgttcccctgcagatctggagtaaagttctcgcaattagtgggatcttcacgatggggattgctttactgggctgcgtgggcgctttaaaggaactgagatgcctgctgggtttgtactttggtatgctcctcttgctgttcgctacgcagatcaccctgggcatcctgatctccactcagcgggcacaactggaaaggtctctgcgcgatgtggtggagaagaccatccaaaagtatggaactaacccggaggagacagctgccgaagagagctgggactacgtccaatttcagctgcgatgctgtggctggcactatccccaggactggttccaagttctcatcctgagagggaatggctctgaagcccaccgcgtgccatgcagttgttataacctatccgcaaccaacgattccacaatcttagataaagtgattttgccacagctgtcccggctcggccacctagcgcgatccaggcactctgcggatatctgcgccgtcccagcagagtcgcacatttatcgcgagggatgtgctcaggggctccagaagtggttgcacaataacctcattagcattgtgggtatctgtctgggggtgggcttgctggagttgggttttatgactcttagtatattcctgtgccggaatttggatcatgtctacaataggttggcgaggtaccgctag

SEQ ID NO: 217547 - DNA, 471 bp, synthetic construct
  misc_feature 1..471: note = Description of Artificial Sequence: Synthetic coding sequence
  source 1..471: mol_type = other DNA
atgagcgctcaagagtcatgcctgagtctgattaaatactttctgttcgtttttaacctctttttctttgtattggggtccctaatcttctgctttggcatctggatactgatcgacaagacgtccttcgttagcttcgttgggctcgcttttgtgcctctgcagatctggtccaaagtactggcaatcagcggaatcttcactatgggtatcgccttgctgggctgcgtgggagccctgaaggaactgcggtgtctcctcgggctttattttgggatgcttcttttactgttcgcaacacaaattactctcggtatcctcattagtactcagagagcccaaaaggacactcctacatggacaaagggggatcggcacaagcagctccagcgcgagactcatggcaaaaagcgcgagcaggagaaggagattgacgcactgaaagaggagacagaaacatacgagccatag

SEQ ID NO: 217548 - DNA, 642 bp, synthetic construct
  misc_feature 1..642: note = Description of Artificial Sequence: Synthetic coding sequence
  source 1..642: mol_type = other DNA
atgggtatcgcgcttttaggatgtgttggagccctgaaggagctcagatgcctgctgggcctctacttcggcatgcttctgcttcttttcgccacacaaatcacgttaggcatcctcatctcaacacaaagagcccaactcgaaaggtcattgagagatgtcgtcgagaagaccatccagaagtacggcaccaaccccgaagaaacagccgctgaggaaagctgggattacgttcaattccaattacgatgttgtggttggcactatccccaagactggttccaggtcctcattctcagaggcaacggcagtgaagcgcaccgcgtgccatgctcgtgctataatctgtctgccaccaacgactctacaatactggataaggtcatccttccacagctgagcagattgggtcatctcgccagaagccggcattcagcagacatctgcgccgtgcccgctgagtcccacatatatagagagggctgcgcccaaggtttgcagaaatggctccacaacaacttgattagtattgtcggcatatgcctgggtgtggggcttcttgagttgggttttatgacactgtcaattttcttgtgcagaaacctggaccatgtgtacaatcggctggcgcgatatcgttag

SEQ ID NO: 217549 - DNA, 813 bp, synthetic construct
  misc_feature 1..813: note = Description of Artificial Sequence: Synthetic coding sequence
  source 1..813: mol_type = other DNA
atgtctgcccaagaaagttgtctctccctgatcaaatactttctctttgtctttaatttatttttcttcgtgttgggaagcctcatcttctgttttgggatttggattctgatcgataagactagcttcgtttctttcgtcggcctcgcctttgtcccccttcagatatggtctaaggttctagccatctcgggaattttcaccatggggattgccctccttggctgtgtaggcgctcttaaggagctccggtgtctgctggggttgtacttcggtatgctgttgttgctctttgctacccaaattactctgggtattttgattagcacccagcgcgctcagctggagcggagtctccgcgacgtggttgagaagacaatacagaagtacgggacaaaccctgaagagaccgcagctgaagagtcttgggactatgtccagttccagctgcgctgctgtgggtggcactacccccaggattggtttcaggtcctgatcttacgcggtaacggttctgaggcccaccgggtcccctgctcatgctataatttatccgccacaaatgatagtacaattcttgataaagtaattctcccccagctcagtaggctgggacatcttgctcggtcccgccactcagccgatatatgcgccgttcctgctgagtcacatatctatagagaaggttgtgcgcagggccttcaaaagtggttacacaacaatttgatttctattgtcggaatttgcttgggtgtcggactgcttgaagttatttggcctaggccacaccctagaagcgccctcaacccatag

SEQ ID NO: 217550 - DNA, 1095 bp, synthetic construct
  misc_feature 1..1095: note = Description of Artificial Sequence: Synthetic coding sequence
  source 1..1095: mol_type = other DNA
atgccgcactcataccccgcactgagcgccgagcaaaaaaaagaactgtctgatatcgctctgaggatcgtggcccctggtaagggcattctcgccgcagacgagtcagttgggtctatggcgaaacggctctctcagatcggagtggaaaataccgaagagaatcgtcgcttgtatcgccaggtcctcttttctgctgatgaccgggtgaaaaagtgcattgggggtgtcatctttttccatgagacactgtaccagaaagatgacaatggggtgcccttcgtcagaacaatccaggacaaaggaattgtcgtgggcatcaaagtggacaagggcgtggtaccacttgccggaactgacggggagacaacgacgcaagggttggacggtctgtccgagcgctgcgcccagtacaagaaggacggggctgatttcgcaaaatggaggtgcgtcttgaagataagtgaaaggacgccctccgctctggcaatcctcgagaacgcgaatgtcttagccagatatgcctctatttgccagcagaatgggatcgttccgatcgtggagccagagatacttccagatggcgatcacgatttgaagcggtgccagtatgttacagagaaggtgctggctgccgtgtataaagcattaagcgatcaccatgtgtacctggaagggacactgctgaaacccaatatggttacccccggtcatgcttgtcccatcaagtacacccctgaggagattgccatggccaccgtgaccgcactgcgcaggactgtgccaccagccgtgccaggtgtcacgtttctttccggagggcaaagtgaggaggaggcctctttcaaccttaatgcgatcaacagatgtcctctgccacggccttgggctctaacgttctcctatggacgcgcactgcaggccagcgctctcaacgcgtggaggggccagcgggataacgccggagccgcaaccgaggaatttatcaagcgggctgaggtgaatgggctggccgcacaaggcaaatacgaaggctcaggcgaagatggtggggctgccgctcagagcttatacattgcaaatcatgcctattag

SEQ ID NO: 217551 - DNA, 483 bp, synthetic construct
  misc_feature 1..483: note = Description of Artificial Sequence: Synthetic coding sequence
  source 1..483: mol_type = other DNA
atggcaaactgcgagttttcccccgtgtcgggcgataaaccatgctgtaggctgagcaggcgagcccagttgtgtctgggagtttccattctcgtgctgattctggtggtggtactggcggtcgtcgtgcctcgctggagacagcagtggtctggccctggtacaactaagcggttccccgagactgtgctggccaggtgtgttaagtacaccgagatacaccccgagatgcggcatgtggattgccagtctgtgtgggatgcctttaaaggagcttttatatcaaagcatccttgtaatattacagaggaagactaccagccactcatgaaactgggaactcagaccgtcccttgtaataaaaatgagactatcaatcttgctcagacaggggagcgcaccgccgcaacgaccttgtttcagtattctggaaagcggttccccgcaggcctgcagaagttgcccgtcatgtggtctatgtag

SEQ ID NO: 217552 - DNA, 624 bp, synthetic construct
  misc_feature 1..624: note = Description of Artificial Sequence: Synthetic coding sequence
  source 1..624: mol_type = other DNA
atgcagtctggcactcactggagagtcctgggactttgtctgttatcagtgggtgtgtggggacaggatggtaatgaggaaatgggcggaattacccaaacaccttataaggtgagcatttccgggacgaccgtgattcttacttgccctcagtaccctggctcagagatcctctggcaacacaatgataagaacattggtggagacgaggacgacaagaacatcggctctgatgaggaccacctttctctcaaggagttcagcgaactggagcagtccggctattacgtctgctaccctaggggatccaaacccgaggatgcaaacttttacctctatttgcgagctagggtgtgtgaaaactgcatggagatggatgtcatgtccgttgctacaattgtgatcgtggatatttgcattaccgggggtttgctcttgcttgtgtattattggtccaagaatcggaaagctaaggcaaaacccgtcacaaggggagccggagccggagggagacagaggggtcagaacaaagagcgccctcctcccgttccaaatcctgattacgaaccaattcgtaagggacagcgggatctgtacagcgggctcaaccaacgaaggatttag

SEQ ID NO: 217553 - DNA, 606 bp, synthetic construct
  misc_feature 1..606: note = Description of Artificial Sequence: Synthetic coding sequence
  source 1..606: mol_type = other DNA
atgcagtccggcacacattggagggttcttggcctttgcttactcagcgtcggagtgtggggacaggacgggaacgaggagatggcctacaaggtttctatcagtggaacgactgttattttgacatgtccccagtacccgggatctgagatcttgtggcagcataatgataaaaatattggtggggatgaggacgataaaaatattggatctgacgaggatcacctgagcttgaaggaattcagcgagctcgagcagtccggatactatgtgtgttaccccagaggaagtaaacccgaggacgcgaatttttatctctacctccgagcacgggtctgcgagaattgcatggagatggacgtgatgtctgtggccaccattgtgattgtggatatctgcataacaggtggtcttctgctcctggtatactattggagcaagaatcggaaggccaaggccaaacctgtcaccaggggcgctggcgcaggagggagacaacgcggacagaataaggaacgaccaccacctgtccccaatccagattatgagccaatcagaaagggccagcgcgacttatatagtggccttaaccagcggcgaatatag

SEQ ID NO: 217554 - DNA, 237 bp, synthetic construct
  misc_feature 1..237: note = Description of Artificial Sequence: Synthetic coding sequence
  source 1..237: mol_type = other DNA
atgatcggttttcttaccgaggacaaaaagaagtggaatcttgggtcaaacgccaaggatcctcggggaatgtaccaatgtaagggctctcaaaataagtccaagcctttacaggtctattacagaacttcggacaaacaaactttgctgcccaatgaccagctctatcagccactgaaggatcgagaggatgaccagtactctcaccttcaggggaaccagttgcgacggaactag

SEQ ID NO: 217555 - DNA, 549 bp, synthetic construct
  misc_feature 1..549: note = Description of Artificial Sequence: Synthetic coding sequence
  source 1..549: mol_type = other DNA
atggagcaagggaagggcttagcagtgctcatcctggccatcattctgctacagggaacattagctcagtcgattaaagggaaccatctagtcaaggtctatgactatcaggaagatggttctgttctattgacttgtgacgcagaggcgaaaaacatcacttggtttaaggacggtaagatgatcggatttcttacggaggacaagaagaagtggaatctaggaagcaatgccaaggatcctagaggaatgtaccagtgcaaagggtcgcaaaataagtccaagcctttgcaggtatactacagaatgtgtcaaaactgtatcgaattaaacgctgctaccatcagtgggttcctgtttgccgagatcgtgagcatctttgtgctagctgtgggagtttactttatagcaggacaggacggcgtgcgccaatctcgcgctagcgacaagcagacactgttgccgaatgatcagttgtatcagccgctgaaagacagagaagatgatcagtatagccacctgcagggtaatcagctgagacgaaattag

SEQ ID NO: 217556 - DNA, 1200 bp, synthetic construct
  misc_feature 1..1200: note = Description of Artificial Sequence: Synthetic coding sequence
  source 1..1200: mol_type = other DNA
atggagcccccaggtagacgggaatgtccgtttccttcctggaggttccctggccttctgctcgctgccatggtgctgttactgtatagcttcagcgatgcttgtgaagagcccccaacattcgaggcaatggagcttataggtaaacccaagccctattacgagattggcgaacgtgtcgactataagtgcaaaaagggttacttttacatccctcctttagccacccacacaatctgtgataggaatcacacttggctgccggtatctgatgatgcttgttatcgagagacctgcccttacattcgcgatccgctgaatggtcaggctgtcccagccaatggcacttatgagttcggctatcagatgcacttcatctgtaacgaaggttattacctgataggggaagagattctctattgtgagctcaagggctcagtcgccatatggagtgggaaacccccaatctgcgagaaggtcttgtgcaccccccctccaaagatcaagaatgggaagcacactttctccgaggtggaggtgttcgaatacctggacgcggtgacctactcttgcgatcccgctcctggccctgaccccttttctctgattggtgaatctacaatctattgtggcgataattcagtgtggagccgagcagccccagagtgtaaggttgtgaagtgtcgattccccgttgtggagaatggaaagcagattagtggcttcgggaaaaagttctactacaaagctacagttatgttcgagtgcgacaaggggttctacttggacgggagtgataccattgtttgcgacagcaatagtacttgggatcctcccgtgccgaaatgcctaaaagttctcccccctagcagtacaaaaccccctgcgctgtcacatagtgtctcaacatcaagtaccaccaagagtcctgcctcatctgcatctggtccgagaccaacctacaaaccccctgtgagtaactaccccggttaccctaaacccgaggaggggatcctcgacagtcttgacgtgtgggtgattgccgtgattgttatcgctattgttgttggggtggccgtcatttgcgtggtgccttacaggtacctgcaaagaaggaagaagaagggaaaagcagacggcggagccgaatatgcaacttatcaaactaagagcacaactccagccgagcagcggggatag

SEQ ID NO: 217557 - DNA, 1050 bp, synthetic construct
  misc_feature 1..1050: note = Description of Artificial Sequence: Synthetic coding sequence
  source 1..1050: mol_type = other DNA
atggagcccccaggtcgtagggaatgcccgttcccgtcttggcgttttccgggactgctgcttgcggctatggtcttgcttctttactcctttagcgacgcttgtgaggagcccccaactttcgaagcaatggagttaatcgggaagcctaagccttattatgaaattggagaacgcgtggactacaaatgcaagaagggatatttctacattcctccactggcaacacacacaatttgcgatcggaatcacacttggcttccagtgtcagatgacgcatgctatcgcgaaacgtgtccctatatacgggatccactgaatgggcaggcagtgcctgctaatgggacgtatgagttcggctatcagatgcattttatctgcaatgagggctactatctgattggggaggaaatcctgtactgcgaactcaaaggcagcgtggccatatggtccggcaaaccgcctatctgtgaaaaggtcctgtgtacaccacctcccaaaatcaaaaatgggaagcacacattctcagaagttgaagtattcgagtatctggacgctgtcacttatagctgtgacccagcaccaggccctgacccctttagtctgatcggcgagtccactatttactgcggtgacaactctgtgtggtctagagccgctccggagtgtaaagtggtcaagtgcagatttccagtcgtagaaaacggaaagcaaatatctgggtttgggaagaagttctattataaagctactgtgatgttcgaatgcgataaaggattttatctcgacgggtcggacactatcgtgtgcgatagcaactctacatgggaccccccagtccccaagtgtctgaagggccctcgcccaacttataagcctcccgtgtccaactaccctggttaccccaaaccggaggaggggattctggacagccttgatgtgtgggtgatcgctgtcatagtgatcgccatcgggaagcagatggttgagctaaatatgccactcactaggctgaaccagcccctccagcaaagccgggaagcagagtag

SEQ ID NO: 217558 - DNA, 1155 bp, synthetic construct
  misc_feature 1..1155: note = Description of Artificial Sequence: Synthetic coding sequence
  source 1..1155: mol_type = other DNA
atggagcctccaggtcgtagggagtgcccgttcccttcctggagattccccggacttttactggccgcaatggtgctcctcctttattcattcagcgacgcctgtgaggagccgccaactttcgaggccatggagcttatcggaaaaccaaagccatactacgaaatcggcgagcgggtggactataagtgcaaaaaggggtacttctatattccgcctctagccacacatacgatttgtgatcgtaatcacacatggctgcctgtttccgacgacgcctgttacagggagacctgcccttatattagggaccccctaaacggccaggctgtgcctgctaacggtacgtacgaatttggataccagatgcattttatctgtaacgagggatactatctgatcggagaggaaattctgtattgcgagctcaagggctccgtagcaatctggagcggaaaaccgccaatatgcgaaaaggtactgtgcacccctcccccaaaaatcaaaaatggcaaacacacgttctccgaagttgaagtcttcgagtacttagacgctgtgacttacagctgcgatcctgccccagggcctgatccattttcactgattggggaatcgacaatttactgtggcgacaactccgtgtggtccagagcagcgcctgagtgcaaagtggttaaatgtagattcccagtcgtcgaaaacggaaagcaaattagcggttttggaaagaagttctattataaggctaccgtgatgtttgaatgcgataaagggttctacctggacggatccgatacaattgtgtgcgactcaaactccacttgggacccaccagtgccgaagtgcctgaaggtatcaacatcttccacaaccaagtctcccgcttcaagcgcttcagggccaaggcccacatataaaccaccagtttctaattaccctggatatccaaagccagaagagggtatcctggacagtctcgacgtatgggtcattgcggtcattgtgattgcaatagtggtgggggtggcggtgatttgcgtagttccctaccgctacctgcaacgcagaaaaaagaagggcaaagccgacggcggtgccgagtatgcaacttatcaaaccaaatccactactcctgctgaacaacgtggttag

SEQ ID NO: 217559 - DNA, 1110 bp, synthetic construct
  misc_feature 1..1110: note = Description of Artificial Sequence: Synthetic coding sequence
  source 1..1110: mol_type = other DNA
atggaaccaccgggacgacgcgaatgcccatttccatcttggcggtttcctggactgttgttggcagctatggtactgttactgtactctttcagtgacgcctgcgaagagcccccaacgttcgaggccatggaactgatcggtaaaccaaaaccctattatgaaattggcgaaagagtggactacaagtgcaagaaaggctacttctacatccctcccctggccactcacacgatttgcgaccgtaaccatacatggttgccagtgtcggacgacgcctgctaccgagaaacctgtccatatatcagggatcctctgaacgggcaggccgttccagcgaatggtacttatgagttcggttaccagatgcactttatttgcaacgaggggtactatcttattggcgaggagatcttgtactgcgagctgaaaggatctgtggccatctggagtggcaaaccaccaatctgcgagaaggtgctctgtaccccacccccaaagattaaaaatggaaagcacaccttcagcgaggtcgaggtgttcgaatacctcgacgcggttacctactcttgcgaccccgcacctggcccagatccttttagcctgattggagagagtactatctactgtggggacaacagtgtgtggtcacgcgcagcaccagagtgtaaagtcgtaaagtgtcggttccccgtggtggaaaatggtaagcagatcagcggctttgggaaaaaattttattacaaagccacagtgatgttcgagtgcgataagggtttttacctcgatggatccgataccattgtctgcgacagcaattctacctgggaccctccagtccctaagtgtctaaaggggcctcgaccgacttacaaacccccagtgtccaactatcccggataccctaagccagaagaaggaattctggactctctggatgtctgggtgattgctgtaatcgtgatagccatcgtagtcggtgtagcggttatctgtgttgttccttatagatatctccaaagaagaaagaagaagggtaaagccgacgggggagccgaatatgcaacataccagacaaagtcgacaacccccgcagagcagaggggttag

SEQ ID NO: 217560 - DNA, 1179 bp, synthetic construct
  misc_feature 1..1179: note = Description of Artificial Sequence: Synthetic coding sequence
  source 1..1179: mol_type = other DNA
atggagcctcctggcagaagagaatgccccttccctagctggagatttcccggactgctgcttgctgcgatggtgttgcttctgtacagcttttccgacgcttgcgaagagccccctacattcgaggcaatggaactgatcggcaagccaaaaccctactacgagattggagaacgggtagactacaaatgtaaaaaggggtacttttacataccaccacttgccacacacacaatttgcgatagaaaccacacttggctgcccgtctccgacgacgcttgctaccgcgaaacctgtccatacattcgggaccctcttaatggacaagctgtgcccgctaatggaacatacgaatttggctaccagatgcacttcatctgcaacgaaggctattacctcataggcgaagagatactctactgtgagctgaaggggtctgtcgctatctggtccggtaaacctcccatttgcgaaaaagtgctgtgcactcctccacccaaaattaagaacggaaagcatacattttccgaggtcgaagtctttgaatacttggacgccgtcacgtattcctgcgaccctgctcctgggcctgacccttttagcttaattggtgaatcgaccatttactgcggtgataactccgtttggtcacgggctgcgcctgagtgcaaggtcgtgaaatgccgtttccctgtagtcgaaaatggcaaacagatatccgggtttggcaagaaattctattataaggccactgtgatgttcgagtgtgataaaggcttttacctggacggatctgataccatcgtctgcgatagcaactctacctgggatccgccagtgccaaaatgccttaaggtgttgcctccctcctccaccaaaccacccgctctctcgcactccgtctctacgtcttcaaccacaaagagccccgcttcctccgctagcggcccaagacctacatataagcctcccgtgtctaactatccgggatacccgaagcctgaggaaggaattctggatagcctggatgtttgggtgatcgccgtcatcgtgattgccatagtggtcggggttgctgtcatttgtgtggttccgtaccggtaccttcagcgacggaaaaaaaaagggacctatctgaccgatgagacacatcgagaggtgaagtttacttctctgtag

SEQ ID NO: 217561 - DNA, 1068 bp, synthetic construct
  misc_feature 1..1068: note = Description of Artificial Sequence: Synthetic coding sequence
  source 1..1068: mol_type = other DNA
atggaaccaccgggacgtcgcgagtgcccttttccttcttggcgcttccccggtctattgttggccgctatggtcctgcttttgtacagcttttccgacgcttgcgaggagcctccaaccttcgaggccatggagctgattggaaaacccaagccttactacgaaattggtgaaagagtcgactataagtgcaaaaaaggatacttttacatccctcctttagctacacacactatctgcgaccgaaaccatacttggctgcccgtcagcgatgacgcctgttatagagaaacctgcccatatattcgcgatccgctcaatggtcaggcggtgccagcaaacgggacatacgagttcggataccagatgcactttatctgcaatgaaggttattatctgattggcgaggagattctgtactgtgaactgaagggaagcgtcgctatctggtcagggaaacctcctatctgcgagaaggtcctatgtacaccacccccaaagatcaaaaacggcaagcacaccttctctgaggtagaggtgttcgagtatcttgatgccgtcacatatagttgcgatcctgcgcctggacctgacccatttagcctcatcggcgagtcaaccatttactgcggagataactcagtgtggtcacgcgctgctcccgagtgtaaggtggtcaagtgcaggttccccgtggtcgaaaacggtaagcagatctctgggttcgggaaaaaattctactacaaggcaactgtgatgttcgagtgcgataaaggcttttacttggatggttccgataccatagtgtgtgattctaattccacctgggaccctccggtgccaaagtgcctgaagggctaccctaagcctgaagaaggcattctggatagtctggatgtttgggtgatcgccgtgattgttatagctatcgttgttggtgttgccgttatctgcgtggtgccctacagatacctgcagaggagaaagaaaaagggcaaagcagacggcggtgccgagtacgccacgtaccagaccaaaagcaccacccccgcagaacagaggggctag

SEQ ID NO: 217562 - DNA, 1158 bp, synthetic construct
  misc_feature 1..1158: note = Description of Artificial Sequence: Synthetic coding sequence
  source 1..1158: mol_type = other DNA
atggaacctcccggacgcagagagtgtcctttcccaagttggcggttcccaggactactgctggctgccatggttctgctgctgtattccttcagcgatgcgtgcgaggagccgccaaccttcgaagccatggaactgatcggaaaacctaagccctattacgaaattggggaaagagtcgattataagtgcaagaaaggatatttttacattcctcctctcgcaactcacactatttgtgacagaaaccatacttggctgcctgtcagcgacgatgcatgctatcgcgaaacctgcccttacataagagatccactcaacggacaagcggtgccagccaacggtacctacgagtttgggtaccagatgcatttcatttgcaatgagggctactacctgatcggagaggagattctgtactgcgagctcaaaggttccgtggctatctggtccggcaagcccccaatttgtgagaaagtgctctgcactccgccacccaagatcaagaatgggaaacacacgttttccgaagtggaggtattcgagtatctggatgcggtgacctatagctgcgatcctgcacccggaccagaccccttttccctcatcggtgagagtactatctattgcggagacaattcagtgtggtcacgcgctgccccagagtgcaaggtggttaaatgccgttttcccgtagttgagaacggaaaacagatatcaggcttcggtaaaaagttctattataaggcaacggtgatgttcgaatgcgataagggtttctaccttgatggctctgatactatcgtttgtgacagcaatagcacctgggacccaccagtgcccaagtgtctgaaggttctcccaccaagctctaccaagccacctgccctgagtcattcagtctcaactagcagtaccaccaagagtcccgcatctagcgcctctggataccccaagcctgaggaaggcatactggattcccttgatgtgtgggtgatagccgtgatagtgatcgccattgtggtgggcgtagctgttatatgcgttgtcccatatagatatttgcagcgcaggaaaaagaagggcaaagcggacggtggcgctgagtatgccacctaccagacaaaatcgactacaccggcagagcaacgaggatag

SEQ ID NO: 217563 - DNA, 1089 bp, synthetic construct
  misc_feature 1..1089: note = Description of Artificial Sequence: Synthetic coding sequence
  source 1..1089: mol_type = other DNA
atggaaccacccggacgacgggagtgtcctttcccgtcctggagattcccaggcctgctcttagccgctatggtcctgttgctatactccttcagtgatgcctgcgaagagccacctacctttgaggcgatggagctcatcgggaaacccaagccttattacgagataggagagcgggttgattacaaatgtaagaagggctacttctatatccctcctttggctacgcacaccatctgcgatcgcaatcacacctggctgcctgtcagcgacgacgcatgttatagggaaacgtgcccatatatccgagacccccttaacggccaggcggtgccagccaatgggacatacgaattcggctaccagatgcatttcatttgtaacgagggatactatctgatcggggaggagatactctactgcgaactgaagggttctgtcgcaatctggtctggtaagcctccaatctgcgagaaagtgctctgtacaccccctcctaagatcaagaacggtaagcacacattcagcgaagttgaagttttcgaatatctcgacgctgttacttactcatgcgatcccgctccgggacctgacccttttagtcttattggcgagtcaaccatctattgcggggataacagtgtgtggtcccgcgctgccccagagtgtaaggtggttaagtgtagatttcccgtggttgagaatggcaagcaaatcagtgggtttggcaaaaaattctactacaaggctacggtaatgttcgagtgcgacaaaggtttttacctggacggatctgacaccattgtttgcgactcaaattcaacgtgggacccaccggtccccaaatgtttgaagggtcccagacctacctataaaccacctgtgtcaaactatccgggataccctaagccagaagaaggaatcttggactccttagacgtctgggtaattgcagtgattgtcatagccatagtcgtgggagtggccgtgatttgtgttgttccctatcgctacctgcagcgacgcaaaaagaaaggtacgtacctgactgacgagactcatcgcgaagtcaaattcaccagcctctag

SEQ ID NO: 217564 - DNA, 1134 bp, synthetic construct
  misc_feature 1..1134: note = Description of Artificial Sequence: Synthetic coding sequence
  source 1..1134: mol_type = other DNA
atggagccgccaggaaggcgggagtgtcccttcccttcttggcgattccctgggctgctgttggccgctatggtcctcctcctctattccttttcagatgcgtgtgaagaacccccaacctttgaggccatggaactgatcggaaagcctaagccctattatgagataggagagagggtcgattataaatgcaagaaagggtatttctacatccccccactggccacccacaccatctgcgatcgcaaccatacctggcttcctgtgtcagatgacgcctgctacagggagacctgcccctacatcagagaccctctcaacggacaagcggttccagcaaatgggacctacgaatttgggtaccagatgcactttatctgtaatgaaggatactatctgataggcgaggagatcctgtattgtgaattgaagggatcagtggcaatctggtctggtaagccaccaatctgcgagaaggtgctctgcacacccccacccaagataaaaaacggcaaacatactttctccgaggttgaggttttcgaatatctggacgcagtaacttattcatgcgatcctgcccctgggcctgacccatttagcctgattggtgagtctaccatctactgtggagataactctgtctggagtagggctgctccggagtgcaaagttgtgaagtgccggtttcctgtggtagaaaacggcaagcagatctcagggtttggcaaaaagttctactacaaggccacagtgatgtttgagtgtgataaaggcttttacctcgacgggtctgacaccatagtgtgtgattccaacagtacgtgggaccccccagtgcctaaatgcttaaaagtgtccactagctctactacaaaatcacctgcctcgagcgctagtggccctaggcccacatacaaaccacccgtgtcaaactatcctggatatcctaagcccgaagagggcatcctcgattcattagacgtctgggtcatcgcagtgattgtgatcgccatcgtggtcggcgttgccgtgatctgcgttgtgccgtataggtacctgcagaggcgaaagaagaaaggtacatacctcactgatgaaacccatcgagaagtaaagttcacatcactctag

SEQ ID NO: 217565 - DNA, 1011 bp, synthetic construct
  misc_feature 1..1011: note = Description of Artificial Sequence: Synthetic coding sequence
  source 1..1011: mol_type = other DNA
atggagccacctgggagaagggagtgccctttcccctcatggcgatttcctgggttgctcctggccgctatggttcttctattatattcatttagcggagaaacatgcccatatatccgggatccactgaatggacaagctgtgcctgcaaatggaacatacgaattcggctaccagatgcatttcatctgtaacgaagggtactacttaatcggcgaggaaatcctttactgcgagctcaagggtagcgtcgcaatctggtcaggtaagcctcccatctgtgaaaaggtcctgtgtactccgccaccgaaaataaagaacgggaagcataccttctcggaggtggaggtgtttgagtatttggatgccgttacctactcctgcgatcccgcaccgggtccagaccccttttcactgattggggaaagtactatttactgcggggataacagtgtttggtcacgagccgcacctgagtgcaaagtcgtcaaatgccgattccctgtggtcgaaaatgggaaacagatatcggggtttggaaaaaaattctactataaagccacggtgatgttcgagtgcgataagggattctacctggacggttcagataccattgtatgtgattctaactccacatgggatccgcctgtccccaagtgcctgaaagtcttaccaccatcaagcaccaaaccaccagccctgtctcactcagtgtctacgagctccaccactaagtcgcctgcttcctcggctagcgggccaaggcctacctataagcctcctgtaagcaactaccccggatatcctaagccagaggaggggattctggactctctcgacgtctgggtaatcgccgtgatcgtcatcgcaatcgtcgtgggcgtcgccgtcatctgtgttgtgccctacaggtatctgcagcgcagaaagaaaaaaggcaaagccgatggtggagcagagtacgcaacctaccagacaaaatctactacccccgctgaacagagaggctag

SEQ ID NO: 217566 - DNA, 1095 bp, synthetic construct
  misc_feature 1..1095: note = Description of Artificial Sequence: Synthetic coding sequence
  source 1..1095: mol_type = other DNA
atggaaccgccagggaggagagaatgcccattcccatcttggcggtttcctggcctgttgctcgcggctatggttttgttgctctactcattctccgatgcctgtgaggagcctcccacattcgaagctatggagttgattgggaagcccaagccctattatgaaatcggcgaacgtgttgactacaagtgtaagaaggggtacttttatataccacccctggcaacacataccatatgtgatcgtaatcatacatggctcccagtgtcggacgatgcatgttacagagagacctgcccctatattcgcgatccccttaacggacaggccgtgcccgcaaacggaacctacgagttcggctaccaaatgcacttcatctgcaacgagggatattacctgatcggagaggagatattatattgtgaactgaaagggagtgtggcaatctggtccggaaagcctccgatctgcgagaaggtgctgtgtaccccaccaccaaagatcaagaatggcaagcacaccttctctgaggtggaggttttcgagtacctagatgctgtgacatactcctgcgaccccgcacctggacctgacccgttcagcctaataggggaatccactatctactgcggcgataactccgtgtggagcagggcagcccctgagtgtaaggtggtgaagtgtcgctttcccgtggttgagaatggaaagcagattagcggctttgggaaaaagttttattataaagccaccgtgatgttcgaatgcgacaagggattttatcttgacggctctgataccatcgtctgtgattccaatagcacctgggatccgcctgttcccaagtgcctgaaagtatcaacgtcctcaaccacgaagtctccggcatcttctgcatctggacctcgacccacgtacaagccacccgtcagcaattatcccggataccctaaacccgaggagggcatcctagactctctggacgtgtgggtgatcgcagtgattgtcattgcgatcgggaagcagatggtagagctgaacatgccactgacaagactgaatcagccactccaacagtcaagggaggcagagtag

SEQ ID NO: 217567 - DNA, 1113 bp, synthetic construct
  misc_feature 1..1113: note = Description of Artificial Sequence: Synthetic coding sequence
  source 1..1113: mol_type = other DNA
atggagccacccggacgtagagagtgcccttttccatcatggagatttccaggcttacttctagcggctatggtgctgttgctttacagcttctcagacgcatgcgaggagccacctacctttgaggctatggagttgattggcaagccaaaaccctactacgagatcggtgagagggtggattacaaatgtaaaaagggttacttttacattcccccattggccacgcatacaatctgcgacaggaaccatacctggctaccagtttcagatgatgcctgttacagggagacctgcccatacatcagagatcccctgaatggtcaggcagtgccagccaacggaacatacgagttcggatatcagatgcacttcatctgcaacgaggggtactatctcataggtgaagagattctgtactgcgagctgaagggctccgttgccatctggtccgggaaaccacctatttgcgagaaggtcctttgtacgcctccaccgaagataaaaaacggaaagcatactttttcagaagtggaggttttcgaatacttggatgccgtgacctattcttgcgacccagctcccggtcccgacccattttccctgatcggcgaatccacaatctattgcggtgataactcagtgtggagtagagcagcaccggagtgtaaggttgtcaaatgtcgcttccccgttgtggagaacggcaagcagataagcgggtttggcaaaaagttttactacaaggctactgtgatgtttgaatgtgacaaagggttttatctggatggctcagataccattgtctgcgactcaaactctacatgggaccccccagtgccaaaatgcttgaaggtttcaaccagctcaacaaccaagtcaccggcatcttcggcatcaggatatccaaaacccgaggaaggtattcttgattcgctcgatgtgtgggttattgccgtcatagtgattgcaattgtcgtgggggttgctgtcatctgtgtagtaccctatagatatctccagcggcgaaaaaaaaagggcaaggccgatgggggagctgagtacgcaacctaccaaacaaaatctactactcccgcagagcagaggggctag

SEQ ID NO: 217568 - DNA, 510 bp, synthetic construct
  misc_feature 1..510: note = Description of Artificial Sequence: Synthetic coding sequence
  source 1..510: mol_type = other DNA
atgtgctcgcgcggttgggatagctgcttggccctcgaactattgctgctgcccttgtcactgctggtaacctctatccagggacatctcgttcacatgactgtcgtgtccgggtccaatgtgaccctgaacatatcagaatcgcttcctgaaaactataaacagctcacatggttctacactttcgaccagaagattgttgagtgggacagcaggaagagcaagtatttcgagtcgaaattcaagggccgtgtgagactggatcctcagagcggcgctctttatattagcaaggtccagaaagaggataattctacatatatcatgcgggtgctcaaaaagaccggtaatgagcaggaatggaaaatcaagctccaagtcctgggtgagtcgggcgagccaaaaagtaagagtccattacagtggccccaaatggatcattgcagagcctcatgggaagcttggggcaccctgggggaggaagaacgcaaaacgagcgggcaggtatag

SEQ ID NO: 217569 - DNA, 732 bp, synthetic construct
  misc_feature 1..732: note = Description of Artificial Sequence: Synthetic coding sequence
  source 1..732: mol_type = other DNA
atgtgtagccggggatgggactcatgcttggccttagagctgctcctacttcctctgagccttctcgttacgtccattcaaggacacctggtgcatatgacagtcgtgagtggttcaaacgtgacgctaaacattagcgaaagtttgccggagaattacaaacagctaacttggttctacaccttcgatcaaaagatcgtcgagtgggattcccgcaagagtaaatactttgagtccaagtttaagggaagggttaggcttgatcctcaatctggcgcactgtacattagcaaagtccagaaagaggacaattcaacctatatcatgcgggtattaaagaagacaggaaacgaacaggagtggaagattaaactgcaggttctggaccccgtgcctaagcctgtgatcaaaatagagaagattgaggacatggacgacaattgttatctgaagctcagttgcgtcattccaggcgaaagtgtaaactatacttggtacggagataagcgtccgtttcccaaggaactgcagaatagcgtactcgaaaccacactgatgcctcacaactacagtcgatgttatacatgtcaggtcagcaatagtgtcagcagtaagaacggaaccgtttgtttatcccccccatgcacattggcacgctcattcggtgtggaatggatagcttcctggctggttgtgacagtgccaactatcctcggcttactcctaacttag

SEQ ID NO: 217570 - DNA, 1044 bp, synthetic construct
  misc_feature 1..1044: note = Description of Artificial Sequence: Synthetic coding sequence
  source 1..1044: mol_type = other DNA
atggcccttctgttttcgctgatcctggccatctgcacaagacctggattcttggcttctccatctggcgtgagattagtggggggtttgcacaggtgcgagggtagagttgaggtcgaacagaaaggccagtggggcacggtctgtgatgacggttgggacattaaagatgtggccgtattgtgtcgggaactcggctgcggcgcagcctctggcacaccgtcaggcattctgtacgaacctccagctgaaaaggagcagaaggtgctgattcaatcagtcagttgtacgggcaccgaggacactctggcccagtgcgagcaagaagaagtttacgattgctcccacgatgaggatgccggtgcgtcctgcgaaaaccccgaatcaagcttttcgcctgttcccgagggggtccgtcttgccgatggcccaggacattgtaaggggagagttgaagttaaacatcagaatcaatggtacaccgtatgtcagacagggtggtccctccgggctgcgaaagttgtctgcagacaattggggtgtgggcgagcagtgctcacgcagaaacgatgtaacaaacacgcttacggccgtaagcccatctggctgtcccagatgagctgcagcgggcgagaagccactttacaggattgccctagcggcccatgggggaaaaacacgtgcaatcatgatgaggatacctgggtcgaatgcgaggatccattcgatctgaggcttgtgggcggagacaacctgtgtagcgggaggctcgaagtgctgcataagggcgtgtggggctccgtttgcgatgacaactggggggagaaggaagaccaggtggtgtgtaagcagctggggtgcggcaaaagcctcagcccctcattccgagatcggaaatgttacggtcccggagtggggcgtatctggctcgacaatgtgagatgcagcggagaagaacagtctctggagcagtgtcaacacagattctggggcttccatgactgtacacaccaggaggatgtagccgtcatttgcagcggatag

SEQ ID NO: 217571 - DNA, 660 bp, synthetic construct
  misc_feature 1..660: note = Description of Artificial Sequence: Synthetic coding sequence
  source 1..660: mol_type = other DNA
atggggatgagcagcctcaagctcttgaagtacgttctgtttttcttcaatctgttattttggatatgtggttgctgcatcttggggtttggtatttatctgttgattcataacaactttggcgtgcttttccacaatttgcccagtctcacattgggaaatgtttttgttattgtagggagcataatcatggtggttgcctttctgggctgtatgggcagcatcaaagaaaataagtgcttgcttatgagtttttttatcctgctgctaatcatcctgctggcggaagtgacactcgcaattttgctgttcgtctatgagcagaagttgaacgaatatgtagcaaaaggactgaccgacagtatccataggtatcacagtgacaattcaacaaaagccgcatgggacagcatacaaagttttcttcagtgctgtggaatcaatggaacctccgactggacctctggcccacccgcatcatgcccctcagacagaaaagtagagggctgctatgcgaaagctcgcctgtggtttcacagtaatttcctctacattggtatcatcactatatgtgtgtgtgtgattgaggtcctgggtatgtcctttgccctcacactgaactgtcagattgacaagacttctcagacaatcggcctctag

SEQ ID NO: 217572 - DNA, 483 bp, synthetic construct
  misc_feature 1..483: note = Description of Artificial Sequence: Synthetic coding sequence
  source 1..483: mol_type = other DNA
atgggaatgagttcactgaaactcttgaagtacgtgcttttttttttcaatctgttgttctggatttgtggatgttgtattcttggtttcggaatttacctgctaatccataataattttggcgtattatttcacaacctgcctagcctcacccttggtaatgtttttgtgattgtgggctccatcattatggtcgtggcattcctgggctgcatgggtagcatcaaggagaacaagtgcttgctgatgagcttcttcattctactgttgatcatcctgttagccgaggtgaccctggctatactgctttttgtatacgagcagaagggctgctatgcgaaggccagactctggtttcacagcaattttctgtatatcggcattataaccatctgcgtttgcgttatagaggttctgggcatgtcatttgcactgacattgaattgtcagatcgacaagacttcccagaccatcggactctag

SEQ ID NO: 217573 - DNA, 1323 bp, synthetic construct
  misc_feature 1..1323: note = Description of Artificial Sequence: Synthetic coding sequence
  source 1..1323: mol_type = other DNA
atgacagttgctcggcctagcgtacctgcggcactgccactcctcggagaactcccacgattgcttctgctggttctgttgtgtctccctgctgtttggggcgattgtggtcttcccccagacgtgcccaatgcacagcccgcactggagggaagaacaagttttcccgaggataccgtcatcacctataagtgtgaggaatccttcgtgaaaattccaggggagaaggactctgtcatttgcctgaagggtagtcagtggtcagacattgaggaattttgcaatagatcttgtgaagtaccgacaagactgaactcggcaagcctaaagcagccatacataacccagaattactttcctgtggggaccgtggtggaatacgaatgcaggccaggctacagacgcgagccatccctttcgcccaagctgacctgtctgcagaacctgaagtggtctacagcagtcgagttttgtaagaaaaaatcttgccctaatccaggagaaatcaggaacggccagatcgatgtgcccggagggattcttttcggcgcaaccatttccttcagctgcaataccggttacaagctgttcggatcgacttcttcattttgcctgatcagtggatcatccgttcagtggagcgatccactgccagagtgccgggagatttattgccccgcaccaccccagatagacaacggaatcatacaaggcgaacgggaccactacggttacagacagtcagtgacttacgcttgcaataaggggtttaccatgattggagagcactccatatactgtacggtgaataatgacgagggagagtggtcgggtccccctcctgaatgccgtggaaaatctcttacaagtaaggtccctcccacagtgcagaaacctaccacagtgaatgtccccaccacagaagtgtctccaacatcccaaaaaactaccactaaaactacaacacccaatgcccaagcgacccgcagtaccccagtctctaggacaacgaaacacttccacgaaaccacaccaaacaaggggagtggaaccacgagcgggaccacacgcctgctcagcggctcacgacccgtcacccaggccggaatgcgatggtgcgatagatcatccctgcaatctcgaacccctgggttcaagaggtcgttccatttttcattacccagtagctggtattacagagcgcacgtatttcatgtggacagattcgcctgggacgcaagtaaccatggtctggccgaccttgcaaaagaggagcttaggaggaaatatacacaggtgtaccgtctgtttctggtaagctag

SEQ ID NO: 217574 - DNA, 1095 bp, synthetic construct
  misc_feature 1..1095: note = Description of Artificial Sequence: Synthetic coding sequence
  source 1..1095: mol_type = other DNA
atgactgtggcaaggccatctgtccctgcggctctgcccctcttgggcgaactgccacgactgttacttctagtgctcctctgcctgcccgctgtatggggcgattgcggcctgcctcccgatgttcccaatgcgcagcctgccctggaggggagaaccagcttcccagaggacacagtgatcacctataagtgcgaagagtcctttgtgaaaatcccaggagagaaggattccgtcatttgcctgaagggttcacagtggagcgacatcgaagagttttgtaacagaagttgcgaagtgcctacaagactgaatagcgccagtctgaagcagccttatataacacaaaattattttcccgtgggcaccgtggtcgagtatgagtgcagacccggatataggagagaaccttctctttcaccaaagttgacctgtctccaaaacctgaagtggtccaccgccgtggaattctgtaaaaaaaagtcttgcccaaatcccggagagatcagaaacgggcagatcgacgtgccaggaggcatactattcggggctaccattagcttctcatgtaatacaggctacaagctcttcggcagcacaagtagcttctgtctcataagcggatctagtgttcagtggagtgatcccctgcccgagtgtcgagaaatatactgtcctgcgccaccgcaaatcgacaatggcattattcagggagaacgcgaccactacggttaccgtcagagcgtaacgtacgcctgcaataagggattcaccatgattggtgagcactctatatactgtactgtgaacaatgatgaaggagaatggtcaggaccaccacccgagtgtcgaggtaaaagcctgacatccaaggtgccacctactgtacagaagccaactaccgtcaatgtgcctaccaccgaagtgtcccctacgagccagaagactactaccaaaaccaccacccctaatgcgcaggccactaggtctacccccgtcagcagaaccaccaaacacttccatgagacaacccccaacaaggggtctggaactacttccggaacaacccgtctgctgagcgttctgttcatgtag

SEQ ID NO: 217575 - DNA, 1146 bp, synthetic construct
  misc_feature 1..1146: note = Description of Artificial Sequence: Synthetic coding sequence
  source 1..1146: mol_type = other DNA
atgaccgtggcccgacctagtgtgcccgctgctcttcccctgcttggcgaactccctagactactgctactggttctgctttgtcttccggctgtgtggggggattgtggccttcctccagatgttcctaatgcccagcccgcactcgaggggagaacctcttttcctgaagataccgtgattacctataagtgcgaggaaagctttgtgaaaatacctggggaaaaggactcagtcatctgtcttaaagggtctcagtggtccgacatcgaggagttttgtaacaggtcgtgtgaggtccctactaggcttaactcagcctcccttaagcagccctatatcacccagaattactttcccgtaggaaccgttgttgagtatgagtgccggccagggtacaggagggagccgtccttatcgcccaagctgacttgtctgcaaaatttaaagtggtctactgcagtcgagttctgcaaaaaaaagtcttgcccaaatcctggagaaatcagaaacggccagatcgatgttccgggtgggatcctctttggggctaccatctctttttcatgtaacacggggtacaaactgttcggttccacctccagtttctgtctgatcagtgggtcctccgttcagtggtctgaccctctgcccgagtgtcgcgaaatctactgccccgctccccctcagatcgacaatggtattatccagggcgaaagagaccactatggttacagacaaagcgtgacatacgcttgcaacaagggctttacgatgatcggcgaacacagcatttactgtacggtaaacaatgatgagggagagtggtcagggccacctccagagtgccggggtaagtctcttacttccaaagtgccacccacagtgcagaagcccaccacagtgaacgtgcccaccacagaagtgtctcctacaagccagaaaacaacgactaagaccaccactcctaacgctcaagctacaagatctacaccagtctctaggaccacaaaacactttcatgagactactccaaataagggttctggaacaaccagtgggactacacgcctgctgtctggacacacttgctttacccttacgggtctcctgggcacactcgtgactatgggactccttacctag

SEQ ID NO: 217576 - DNA, 1320 bp, synthetic construct
  misc_feature 1..1320: note = Description of Artificial Sequence: Synthetic coding sequence
  source 1..1320: mol_type = other DNA
atgaccgtggcccgtccttctgttcccgctgctttgccgttactgggggaactgccccgtctgttgctgttggtgcttctgtgtcttccagcggtgtggggggattgtggccttccacccgacgttcccaacgctcagcccgctctggaaggtcgtacttcgttcccagaagacaccgtgatcacatacaaatgcgaagaaagctttgtgaaaatccctggcgaaaaggactcggttatttgtctgaaagggagtcagtggagtgatatcgaggagttttgcaataggtcttgtgaggtccctacccgtttgaatagcgctagcttaaagcagccctatatcacacagaattatttcccagttggaacagtcgtggaatatgagtgcaggccgggataccgaagggagccttctctcagtcccaagttgacatgccttcaaaacttgaagtggtccaccgcagtagaattctgtaaaaaaaagtcttgccctaaccctggtgagattagaaacggacagatcgatgtaccaggaggaatcctttttggggcaactatctcatttagttgcaacacggggtataaattgtttggcagtaccagttccttttgtttgatctctggaagcagcgtgcagtggtcggacccgctgccagagtgtagggagatttactgcccggcaccaccacagatcgataatgggataatacagggagaaagggatcattacgggtatagacagtccgtaacgtatgcctgtaataagggattcactatgatcggagaacactccatctattgcaccgtgaataatgacgaaggtgaatggtctgggccacctcccgaatgcaggggcaaaagcctgacatccaaggttcctccaaccgtacagaagcctactaccgtgaatgtgcctactacagaggtgagtcctacgtcacagaaaactacaaccaaaactactacacccaacgcccaggctactagatccacgccagttagcagaacaaccaagcatttccacgagacaacaccgaacaaaggaagtggcacaactagtggcacaacacggctcctgagcgaaacagtcttccaccgggtgatccaggatggcctcgaccttttggcttcccgatcagcatgcttaggcttgcctaaatgttgggactacaggagggagccacctcatttagctagagctcatgtgttccatgtcgaccgattcgcctgggatgcgagtaaccacggactggctgatctagctaaggaagagctgagacgcaagtatacacaggtctatcggctgtttctcgtttcatag

SEQ ID NO: 217577 - DNA, 390 bp, synthetic construct
  misc_feature 1..390: note = Description of Artificial Sequence: Synthetic coding sequence
  source 1..390: mol_type = other DNA
atgaccgttgcccgaccatccgtgcccgctgccctccccttgctcggagagttaccgaggttgttgctacttgtactcctgtgtctgccagctgtttggggagattgtggattgccaccagacgtgccaaacgcacagcctgcattggagggtcggaccagcttcccggaggataccgtgatcacctataagtgcgaggaatcttttgtgaaaattccgggtgagaaagattccgtgatctgtctcaagggaagtcagtggtccgatatagaagaattttgtaataggagttgcgaggtccctaccagactgcagaagaggacctttagcataactaaaacgaatctgcctagtgagttcaaaatggttcattccagccgcatcctctag

SEQ ID NO: 217578 - DNA, 1155 bp, synthetic construct
  misc_feature 1..1155: note = Description of Artificial Sequence: Synthetic coding sequence
  source 1..1155: mol_type = other DNA
atgacggtggcaaggccatcggtgccggctgctctccctcttctcggtgagctgccaaggctcctgctcctggtgctcctgtgcctgcctgcggtttggggcgattgcggcttgccccctgatgtccctaacgcccagcctgcccttgagggtcgcactagcttccccgaggacaccgtaataacttataagtgcgaggaatctttcgtcaagatccctggggaaaaggactctgtaatttgcctgaaagggtcacagtggagtgatattgaggaattttgcaaccgctcctgtgaggtgccgacgaggctcaactctgcatcgttgaaacaaccgtatataacacagaactactttccggttggcaccgtcgtggagtatgagtgtcggccaggatataggagggagccttctctgagtcccaagctgacttgtctccagaacttgaaatggtccaccgccgtggagttttgtaagaaaaagagttgtcccaatcccggtgagatcaggaacggacaaatcgatgtgcctgggggtattctgtttggcgcaactatatcattttcttgcaataccggctacaaactgtttggatccacttctagcttctgtcttatttctggctcttcagtccagtggtctgatccgctccccgagtgccgggaaatctactgccctgccccacctcagatagataatggcatcattcagggtgaacgagaccactatggttatagacagtctgtcacctatgcgtgcaacaagggcttcaccatgatcggcgagcattccatatactgcactgtgaacaatgatgaaggtgagtggagcgggccacctccagagtgtcgcggtaaatccctgacctccaaggtacccccaaccgtgcaaaagccaaccacagtcaatgtccccacaacagaagtgtcccccactagccaaaagactacaacgaagactaccacccctaatgcgcaggccacccggtcaacccctgtatcccgaactacgaagcatttccacgaaacgactccaaacaaggggagcggcacaacatcaggtactacaagattgctctccgctctgcaagtcagaccttttgaagtatcgggatcgtctcacatttcttctaagaagatgatgtgcatcttatag

SEQ ID NO: 217579 - DNA, 954 bp, synthetic construct
  misc_feature 1..954: note = Description of Artificial Sequence: Synthetic coding sequence
  source 1..954: mol_type = other DNA
atgacagtggctcggccttcagtgcccgcagcactccccctcctgggagagctcccacgtctgctcctgttagtgctgctgtgcctgccagcggtttggggtgattgcggccttccccctgacgttccgaacgcccagcccgcactagagggtcggaccagtttccccgaagacaccgttataacctataaatgcgaagagtcattcgtaaagatccctggtgagaaagactcagtcatctgtttaaagggctcccagtggtccgatatcgaggaattttgcaatcaaaaaagctgccccaatcccggtgaaatccgcaacggccaaatcgacgtgcccggtggaatcctgttcggtgctacaattagcttttcttgcaataccggatacaagctattcgggtctacatcgtctttttgtctgatcagcgggtctagtgtgcagtggagcgatcccctgcctgagtgtagggagatttactgccctgcccctccacagattgacaatggaattattcagggagagcgcgatcactacggatatcggcagagcgtgacatacgcttgtaacaagggatttacaatgatcggcgagcacagcatttattgtacggtgaataatgatgaaggggaatggtcgggccctccccctgagtgcaggggcaagtccctcactagcaaagtgccacctactgtgcaaaaaccaactactgtgaatgtacccaccactgaggtaagccccacctctcaaaagaccaccacgaagactaccacacctaacgctcaagccacccgcagcacccctgtgtcccgcaccacaaaacacttccatgagacgaccccaaacaagggatcaggaaccacaagcggacagttgacgctctttagcggccacacgtgcttcacgctgaccggacttcttggcacactggttaccatggggctgctcacatag

SEQ ID NO: 217580 - DNA, 753 bp, synthetic construct
  misc_feature 1..753: note = Description of Artificial Sequence: Synthetic coding sequence
  source 1..753: mol_type = other DNA
atggtggccggatctgatgcgggacgagcactgggggtgctgagcgtggtctgtctgttacactgcttcggcttcatttcctgtttttcccagcagatctacggcgtggtctatggcaatgtaacctttcacgtaccttccaatgtcccactgaaggaggtgttgtggaaaaaacagaaggataaggtggccgaattggagaatagtgagttcagagctttttcctcatttaaaaaccgggtctatctggacacagtttcaggatcccttactatctacaatctgacatcatctgacgaagatgaatatgaaatggagagccctaacatcaccgatacgatgaagttctttctctacgttctggagagcctcccttctccaacgcttacatgcgccctgacaaatggctctatcgaggtgcagtgtatgattccagaacactacaacagccacagggggctgattatgtacagctgggactgccccatggagcaatgtaagcggaattctacctcgatttattttaagatggagaatgacctaccacagaaaatccagtgcaccttgagcaatcctctgttcaacaccaccagcagtattatcctaactacctgcattccgagtagcggccatagccggcataggtatgccctcatccccattcccctcgcagtaatcacaacttgtatcgtgctgtacatgaacggtatccttaaatgtgatcggaagccggatcggacgaattccaactag

SEQ ID NO: 217581 - DNA, 747 bp, synthetic construct
  misc_feature 1..747: note = Description of Artificial Sequence: Synthetic coding sequence
  source 1..747: mol_type = other DNA
atggtggccggtagtgacgcgggtagagccctaggcgtgctaagcgttgtctgtcttctgcattgcttcggcttcatcagctgctttagtcagcaaatttacggagtcgtttatggcaacgtaaccttccatgttccatctaacgttccattgaaagaagtgctgtggaaaaagcagaaagacaaggtggccgagctcgaaaattcagaatttagagccttctccagcttcaaaaacagggtgtacctggatactgtttctggatccctgactatctataacctaacctcttctgacgaggacgaatacgaaatggaatctccaaatatcacggataccatgaaatttttcttgtacgtcttggagtccctgccttcccctacattgacctgcgcccttacaaatggtagcattgaggtccaatgtatgattcctgaacattataacagccatcgaggtctaatcatgtattcttgggactgtccaatggagcaatgtaagcggaattcaacttcaatctattttaagatggagaatgaccttcctcagaagatccagtgcacactgagcaacccgttgttcaacactacaagcagcatcattttgacaacctgtattcccagctcaggacattccaggcatcggtacgctttgatccccatcccactcgctgttatcaccacgtgtatagtgttatatatgaacgggattctaaagtgcgataggaaacctgaccgtacgaaatag

SEQ ID NO: 217582 - DNA, 387 bp, synthetic construct
  misc_feature 1..387: note = Description of Artificial Sequence: Synthetic coding sequence
  source 1..387: mol_type = other DNA
atgggtatccagggtggatcagtgcttttcgggctgctgcttgtgttagctgttttctgtcactccggacactctctccagtgctacaattgtcctaatcccacagccgattgtaaaacagccgtcaactgttctagcgatttcgacgcatgcctcataaccaaggccggactccaggtatacaacaagtgttggaagtttgaacattgtaacttcaatgatgtgacaacgcgcctgagagagaacgagctcacctactattgctgtaagaaagatctctgtaacttcaacgagcaattggagaacggaggcacctcattgtcagagaagacagtgctgttactggtgaccccctttctggccgctgcttggagcctgcatccttag

SEQ ID NO: 217583 - DNA, 387 bp, synthetic construct
  misc_feature 1..387: note = Description of Artificial Sequence: Synthetic coding sequence
  source 1..387: mol_type = other DNA
atggggattcagggaggctccgtcttgtttggtctccttctggttctcgccgtgttctgtcactcaggccatagcttacaatgttacaactgcccgaatccgacagctgattgtaaaacagcggtgaattgctccagcgacttcgatgcatgtctgatcaccaaagcgggattacaggtgtacaataagtgttggaagttcgagcactgcaactttaacgatgttacaacgagactgagggagaatgaattaacctactactgctgcaaaaaagatctgtgcaatttcaacgagcaacttgagaacggcggaacctctctatctgagaagacagtgctgttactagtcacccctttcctggccgctgcatggagtctgcacccatag

SEQ ID NO: 217584 - DNA, 387 bp, synthetic construct
  misc_feature 1..387: note = Description of Artificial Sequence: Synthetic coding sequence
  source 1..387: mol_type = other DNA
atgggcatccagggcggatctgtgctgttcgggctgcttcttgtcttggcagttttctgccactctggccattctctacagtgttataactgcccaaaccctaccgcggattgcaaaacggctgttaactgcagttcagactttgatgcctgtcttattaccaaagcaggacttcaggtgtacaataagtgttggaaattcgagcactgcaattttaacgacgtaactacgcggttacgcgaaaacgaactgacttactactgttgtaaaaaagatctttgtaattttaacgaacagctggagaacgggggaacctccctttcagaaaaaacagtcctgctcttagtcacccccttcctggctgccgcatggagccttcacccctag

SEQ ID NO: 217585 - DNA, 387 bp, synthetic construct
  misc_feature 1..387: note = Description of Artificial Sequence: Synthetic coding sequence
  source 1..387: mol_type = other DNA
atgggcattcaaggcggttcagtcctgttcggcctcctcttggtgctggccgttttttgccacagcggtcattcgctccagtgctataattgccccaaccccacagccgattgcaagacagcggttaattgctcctccgactttgacgcatgtctgattactaaagctggtctccaggtctacaacaaatgttggaagttcgaacactgcaactttaacgacgtaactaccaggctacgcgagaatgaactgacatactactgctgcaagaaggatttgtgtaacttcaacgagcagctggaaaacgggggaacctctctgagtgagaagactgttttgctcctggtgacaccgttcttagctgcagcatggagcttacacccatag

SEQ ID NO: 217586 - DNA, 387 bp, synthetic construct
  misc_feature 1..387: note = Description of Artificial Sequence: Synthetic coding sequence
  source 1..387: mol_type = other DNA
atgggcattcagggaggctcagtgctcttcggcctgttgctggtgctggccgtcttttgtcactctggacacagccttcagtgttataactgccccaatcctaccgcggactgtaagaccgccgtgaactgttcctcggactttgacgcgtgtctcataaccaaggccggacttcaagtctacaacaaatgctggaagttcgaacattgtaacttcaacgacgtgactacgcgcctacgagagaatgaactgacttattactgttgcaagaaggatctatgtaactttaatgaacagttagaaaacggcggtacctctctctcagaaaaaaccgtgctgttgttagtaacaccctttctggctgctgcatggtccctgcacccatag

SEQ ID NO: 217587 - DNA, 387 bp, synthetic construct
  misc_feature 1..387: note = Description of Artificial Sequence: Synthetic coding sequence
  source 1..387: mol_type = other DNA
atgggtatccaaggaggctctgtactctttggtcttctcctggtattggctgtattctgccactctgggcactcgctgcaatgctataactgtcccaatcccacagctgattgcaagaccgccgtcaactgttcgtccgattttgacgcctgtctgattaccaaagccggactccaggtgtacaacaaatgctggaaatttgaacactgcaacttcaatgacgtaacaactcgtctacgcgagaacgaactcacttactactgctgtaaaaaagacctctgtaatttcaatgaacagctggaaaatgggggaaccagcctctccgaaaagaccgtgctccttctggttacccccttccttgctgcggcttggtccctccatccgtag

SEQ ID NO: 217588 - DNA, 387 bp, synthetic construct
  misc_feature 1..387: note = Description of Artificial Sequence: Synthetic coding sequence
  source 1..387: mol_type = other DNA
atgggcatccagggcggaagtgttttgtttggactcttactcgttcttgcagttttttgtcatagcggccactccttacaatgctataactgccctaaccctaccgctgattgcaagactgccgtcaactgttcctcagatttcgatgcgtgtctaattaccaaggcgggactgcaggtttacaataaatgctggaagttcgagcattgtaacttcaacgacgtgactacccggctgcgggagaacgagctgacttactactgttgcaagaaggacctttgtaattttaacgaacaactggaaaatggcggtacctctcttagtgagaaaacggtgctgcttctagtgacaccgttcctggctgctgcatggtcccttcatccatag

SEQ ID NO: 217589 - DNA, 387 bp, synthetic construct
  misc_feature 1..387: note = Description of Artificial Sequence: Synthetic coding sequence
  source 1..387: mol_type = other DNA
atggggatccagggaggatccgtgctcttcggcttactcctggtcctggcagtgttttgccactcgggacattcactgcaatgttacaattgcccaaatcccactgctgattgtaaaaccgcagttaattgttcttccgacttcgacgcctgcttgatcacaaaggccggactccaggtctacaataaatgctggaagttcgaacactgcaattttaacgacgtgacaaccaggcttagagagaacgagttgacgtactattgctgtaagaaagatttgtgcaattttaatgaacagctagagaatggcggaactagtctgagcgagaagacagtgctcctgctagtgacccccttcttggcggcagcctggtcccttcatccatag

SEQ ID NO: 217590 - DNA, 387 bp, synthetic construct
  misc_feature 1..387: note = Description of Artificial Sequence: Synthetic coding sequence
  source 1..387: mol_type = other DNA
atgggtattcagggaggaagcgtactattcggtcttctcttagtgcttgctgtgttctgtcactcaggtcacagccttcagtgttacaactgtcccaatcccacagcagactgcaagactgctgtgaattgtagttccgactttgatgcctgtctgattacgaaagccggtttgcaggtatacaataagtgctggaagttcgagcactgcaattttaatgacgtaaccactcgcctgcgtgagaacgagctcacatactattgttgcaaaaaagatctctgcaattttaatgaacagctcgagaacggtggcacgtccctctccgaaaagactgtgctgctgcttgtcaccccctttctggcggctgcctggagtctccatccatag

SEQ ID NO: 217591 - DNA, 2007 bp, synthetic construct
  misc_feature 1..2007: note = Description of Artificial Sequence: Synthetic coding sequence
  source 1..2007: mol_type = other DNA
atgtggcttttcttcggtattaccgggttgctgactgccgctctctcagggcacccgtcacccgctccacctgaccagctcaatacaagtagcgccgagagcgaattatgggagccaggtgagaggttaccagttagactcacaaacggcagtagctcctgtagtggcacagtggaggttaggctcgaagcctcatgggagcctgcctgcggggcactatgggattcaagagcggctgaagcagtttgtagggccctgggctgtgggggtgcagaggctgccagtcagttggcacctcccactccggaactgccccctcctcctgccgcaggcaacacctcagtcgccgctaatgctacgctggcgggtgccccagccctgctgtgtagtggagctgaatggcgactgtgcgaggtggtggagcacgcttgcaggtctgacggcagacgcgctagggtgacctgtgccgagaatcgagccctgcgactggtagacgggggaggggcatgcgccggaagggttgagatgcttgaacacggcgagtggggctcagtttgtgatgacacatgggaccttgaagacgcacacgtcgtctgtaggcagcttgggtgtggatgggctgtccaggcactgccaggacttcactttacaccaggccgagggccaatccacagagatcaggtaaactgcagcggggctgaagcctacttgtgggattgtccagggctgcctggccaacactattgcgggcacaaagaggacgccggagcagtgtgctctgaacatcagtcctggcggctgacaggcggagcagatcggtgtgaaggacaggtagaggtgcacttcaggggagtatggaataccgtgtgtgactccgagtggtatccatccgaagccaaggtgctatgccagtcacttggctgcggaacagccgtggaacgacctaaaggcctccctcacagcctctcaggcagaatgtattacagctgcaatggagaagaattgaccctgtccaattgcagctggaggtttaacaattctaacctctgttcccagtccctggccgcacgggttctttgctcagcatctcgcagtctccacaacctgagcacgccggaagtgcctgcctccgttcagaccgtaactatcgaatcatccgtgacagtgaagatcgagaacaaggaaagtagagagctgatgttactcattccaagtatcgtccttggcatcttgttactcggaagtctcatctttattgcttttatcctcctgcgaatcaagggaaaatacgcactccccgtaatggtaaaccaccagcacctgccgactactatcccagcgggttccaatagctaccaacccgttcccattaccattccgaaagaggttttcatgctgccgatccaggtccaagcccctcctcctgaagactcggattcaggcagtgatagtgattacgagcattacgacttcagcgcccagccacctgtcgccttgaccacattttacaatagccaaagacacagggtgaccgatgaggaagtgcagcagagtcggttccagatgcccccactggaagagggcctcgaggagctccatgcaagtcatataccaacagctaaccctgggcattgtatcaccgatccaccaagcttgggccctcagtatcaccctcggtcaaacagcgagagtagcactagctctggagaagactattgcaattcacccaagtccaaattgcccccttggaatcctcaggtgttcagcagcgagagaagttccttcctggaacagccacccaatctagaacttgccggaacgcaacctgccttctccgccggaccaccagctgacgactcttctagcaccagctccggtgaatggtatcagaacttccagcctccaccacagccaccaagcgaagagcaattcgggtgtcctggaagccctagccctcagcccgatagtacagacaacgacgattacgatgatatctctgctgcgtag

SEQ ID NO: 217592 - DNA, 1911 bp, synthetic construct
  misc_feature 1..1911: note = Description of Artificial Sequence: Synthetic coding sequence
  source 1..1911: mol_type = other DNA
atgtggctgtttttcggtataacgggactcttaactgccgcactgtccgggcatccctcccctgcccctcccgatcagctaaacacttcgtctgccgaatcggaactgtgggaaccgggagagaggctgcctgtcaggttaaccaatgggtcttcctcctgttccgggacagtggaagtgcgcctagaagcctcatgggaacctgcatgcggagccttgtgggatagtcgcgcagccgaggccgtatgccgcgctttggggtgcggcggagcagaagccgcttcacagttggcgcctccgactccggaactgccgccaccccctgccgcaggcaatacatcagtggctgctaatgcaaccttagcgggtgcacccgcactgttgtgttctggagccgaatggcgcctctgcgaagttgtcgagcacgcttgtcgctcagacggaagaagggcaagagttacatgcgcagaaaacagggctctgcggcttgtagatggtgggggagcctgtgccggacgggttgaaatgctggagcacggagagtggggcagcgtgtgtgacgatacatgggatctggaggacgcccacgtggtatgccgccagcttggctgcggctgggctgtgcaagccctccccggactccatttcactccaggcagaggcccaatccacagggatcaggtgaactgtagtggtgcagaagcctatctgtgggactgtcccggtctcccgggtcagcattattgcgggcacaaagaggacgccggagcagtgtgctccgagcaccagtcctggagactcaccggcggtgccgaccggtgcgagggccaggtggaagtacactttaggggcgtgtggaacaccgtgtgtgattccgagtggtaccccagtgaagctaaagtcctgtgtcaaagccttggctgcggaacagcggtggaaagaccaaagggtctgcctcattcattatccggtaggatgtactattcatgtaatggggaagaactgaccctgagtaactgctcatggaggttcaataactccaatctgtgctcccagagtttggcagcgagggtcctctgctccgcctctcggtccttacacaatctcagtactccagaagttccggcaagcgtccagacagtcactatcgaatcttcagtgacggtgaagatcgaaaataaagaaagccgggaactgatgctgttaataccgagtatagtcctggggatcctgctgcttgggtccctaatttttatagcgtttatactattgcggatcaagggtaagtatgtgtttatgttaccgattcaggtgcaggccccaccaccagaggatagtgacagcggtagcgactcagattatgaacattacgatttttccgctcaacccccagtagcgttgaccaccttttataactctcaacgccacagagtgacagacgaagaagtgcaacagtcgcgattccaaatgcccccactggaggagggcttagaggagctgcacgcctcccatatccctactgccaaccctgggcattgtataactgatcctccatccctcggaccgcaatatcatcctcggtccaatagcgaaagctcgactagctctggagaggattattgcaattcccccaagtccaagctcccaccttggaatccgcaggtgttcagtagtgagaggagtagcttcctggaacagcccccaaatctcgagctggccggaacacagcctgcattttccgctggcccacccgctgacgactcaagctctacatcgtccggcgaatggtaccagaatttccagccccctccacagcctccaagtgaggaacagtttgggtgcccaggaagcccctctccccagccagacagcactgataatgatgactacgacgatatatccgccgcatag

SEQ ID NO: 217593 - DNA, 1788 bp, synthetic construct
  misc_feature 1..1788: note = Description of Artificial Sequence: Synthetic coding sequence
  source 1..1788: mol_type = other DNA
atgtggctcttcttcggcattaccggacttcttacagctgctctgtcgggccatccttctcctgcgcctccagatcagcttaatacttcttcagctgagagtgaattatgggaacccggagagaggctgcccgtgcgcctgaccaacggctcatcaagctgcagcgggactgtggaggtccgcctcgaggcgtcttgggagcctgcatgcggggcactgtgggattcacgtgctgccgaggcggtctgccgtgcccttggctgtggcggtgctgaagctgctagtcagctggcccctccaactcccgagctgccccctcctccagccgcaggaaatacctcagtggccgctaacgcaaccttggcaggtgccccagcacttttgtgttctggcgctgaatggagactgtgcgaggtggtggagcacgcctgcagatctgacggccgaagggcacgcgtcacatgcgctgagaacagggctctgagactggtcgatgggggtggcgcatgtgctgggcgtgtagaaatgctggagcacggggagtgggggtctgtttgcgacgatacttgggacctggaggatgcccatgtcgtgtgtcggcaattgggatgcggatgggctgtgcaggcactgcccggattacacttcactcccggtagggggccaatacaccgcgatcaggttaattgctccggagctgaggcatacttgtgggattgccccggactgccaggacagcattattgcggccacaaggaagatgctggcgcagtctgcagcgaacatcagtcgtggcgactcaccggcggtgctgacagatgcgagggacaagtcgaagtgcacttcagaggggtgtggaacacggtgtgtgattccgaatggtatccttccgaggccaaggttctctgtcagtctctgggttgcggaaccgccgtggagcgccctaagggcctgccccactctctctctggtcgcatgtattactcttgtaacggcgaagaacttactctgtccaactgtagctggcggtttaacaattcgaatttatgcagccagtcactggccgcaagggttttgtgcagcgcgagccgctcactccacaatctgtcaacgcctgaagtgcccgcatctgtccagacagtcactatcgagtccagcgtgacagtgaaaattgagaataaggagagccgagagctcatgcttctaattccatctattgtcctcggtatcctccttctcggctcactaatttttatcgcattcatcttactccgtattaaggggaagtacgatagccaacgtcacagggtgactgatgaggaagtccagcagagcaggttccaaatgcctcctcttgaagagggcttggaggagctgcacgcaagccacatcccgaccgctaacccaggccattgcatcaccgatcccccttccctcggcccacagtatcacccccgatccaactctgagtcttccaccagtagcggggaggactactgtaacagtcccaaaagtaagctccctccctggaatccccaggttttttcctctgaaagatcgagctttttggaacagccaccaaatctggagttggcaggaacccagccagccttctccgcaggtccaccagcagacgattccagctctacttccagtggggaatggtatcaaaacttccaacccccaccacagcccccttcagaggagcagtttggctgccctggttctcctagccctcagcctgactctaccgataatgacgactacgacgacattagtgccgcatag

SEQ ID NO: 217594 - DNA, 1806 bp, synthetic construct
  misc_feature 1..1806: note = Description of Artificial Sequence: Synthetic coding sequence
  source 1..1806: mol_type = other DNA
atgtggcttttcttcggtatcactggacttctgaccgcagcactgtcgggtcatcccagtcctgctccacctgaccagctgaatacttcctccgcggaatccgagttgtgggagcctggagaacgtctgcccgtcagactcacgaacggttcatccagctgtagcggcaccgtcgaggtgcgcctcgaggcttcctgggaacccgcatgcggagcactgtgggactccagagccgcagaggccgtctgtcgggctctgggatgtggaggggcagaggcggcaagccaactagcgcctccaacccccgaactccctccgcctccagctgcagggaatacatcagtcgctgctaatgccaccctcgcaggggctcctgccctgctctgcagcggggcagaatggcgactgtgcgaggtggtggagcacgcctgtaggtctgacggccgtagggccagggtaacctgcgccgagaatagggcactgcgattggtggacggcggtggcgcatgcgctggcagagtcgagatgctggagcatggcgagtggggtagtgtgtgtgacgatacatgggacttggaagatgcgcacgtggtatgcaggcagctggggtgcgggtgggcggttcaagcactaccaggccttcacttcaccccaggccgaggccctatacatcgggatcaagtgaactgtagcggtgctgaagcatatctctgggactgtccaggcctgcctgggcaacactactgcggacataaagaagatgctggtgctgtgtgcagtgagcaccagtcatggcgactgaccggaggcgcagatcgctgcgagggacaagtggaagtgcacttccgcggagtgtggaatactgtgtgtgattccgagtggtacccaagcgaggcgaaggtcctgtgccaaagtctggggtgtggcacagcagtggaacgaccgaagggtcttccgcactctcttagcggacggatgtattatagttgcaacggcgaggagctcacactcagcaattgtagttggagattcaataattctaacctgtgtagtcagagtttagctgctagggtcctgtgttcagctagtcgttccttacataacttgtcaacgcccgaagtgccagcctcagtccagactgtcacaatcgagtctagtgtgaccgtaaaaattgagaataaagagagccgagagctgatgttgttgataccaagcattgtgcttgggatccttcttctgggtagcctgatttttatcgcttttatcttgctcaggattaagggcaaatatgtgtttatgctgcctatccaggtgcaggccccacctccggaagattctgatagcggcagtgattccgactatgagcactacgacttcagtgctcagccgccagtggcactgacgacattttataattcccaacggcacagagtgaccgatgaggaggtgcagcagagccgattccaaatgccacctttggaagagggcctggaagaactccacgccagccatattcctaccgcgaatcctggtcactgtatcaccgatccgccttcactgggtcctcagtaccaccctcggtccaattcagagagtagcactagcagtggcgaagattactgtaattctcccaaatccaagctacccccatggaatccacaagtgttttcatccgaacgaagcagcttcctggagcagccaccaaacctggagctggcgggtacacagcctgccttttctgggtcaccgtcaccacagccagactccacggacaatgacgactacgacgacatcagcgcagcatag

SEQ ID NO: 217595 - DNA, 1779 bp, synthetic construct
  misc_feature 1..1779: note = Description of Artificial Sequence: Synthetic coding sequence
  source 1..1779: mol_type = other DNA
atgtggctatttttcggtattactggtttactcactgcggcactgtctgggcaccccagccccgcaccacctgaccaactcaatacatcttcggccgagtctgaattatgggaacccggagagaggctcccggtgcggttgaccaacggtagctcaagttgctccggcaccgtagaggtaaggctggaggcgtcatgggagcccgcttgtggagcgttgtgggattcgagggctgccgaggccgtgtgcagggctctgggttgtggcggtgctgaggccgcttcacagcttgctccgccaactccagagctgccacctcctccagccgctggtaacaccagcgtcgccgctaatgcgacgcttgctggtgccccagcactcctctgtagcggcgctgaatggcggctgtgcgaggttgttgagcatgcttgcagatctgatggacgcagagctcgagtcacatgtgccgaaaatcgggcattacgattagtggacggcggtggagcgtgtgccggacgagtcgagatgctggaacacggggagtgggggagcgtgtgcgacgatacatgggacctggaagacgcccacgtcgtatgtaggcagctgggctgcggctgggcagtgcaagctcttccaggactacattttacaccagggcgagggccaattcatcgcgaccaggtgaattgtagcggagccgaggcatatctgtgggactgtccgggactcccaggtcaacattactgcggtcataaggaagatgcaggcgctgtgtgctccgaacaccagagctggcggctgaccggcggagctgaccggtgcgaaggacaggtggaggttcactttcggggagtgtggaataccgtttgcgactctgaatggtaccccagcgaggcgaaggtattgtgccaaagtcttggctgcggaacggcagtggagcggcctaagggactgcctcattctctgagtgggaggatgtactactcttgtaacggagaggaactgaccctgtccaactgtagctggcgcttcaacaatagtaatctctgcagtcagagtttggctgcccgagtgttgtgctccgcatcaaggtcattacataacctgagcaccccggaggtgcctgcatctgtacagacggtcactattgagtccagcgttaccgtcaagatcgagaacaaggagagccgggagctgatgctgctaatcccgtccatagtcctgggtatcctcctgctcgggagcttaatcttcatcgcattcattctacttcgaataaagggaaaatatgccctgccggtgatggtcaaccatcagcatctgcctacaaccatccctgctggctccaacagctaccagccagtaccaattactattcctaaagaagatagccagaggcaccgtgtcacggacgaggaagttcagcaatcgaggtttcaaatgcccccactagaggagggcctagaggagttgcacgcctctcacattcctaccgccaaccctgggcattgtattacagaccccccatccctagggccacaataccaccctcgatctaactctgagtcttcaacgtcaagtggcgaagactactgtaattccccaaagtcgaagttgccaccctggaacccccaggtgttttcctccgagcgctctagttttctcgagcagcctcctaaccttgagctggccggaacacagccagccttttccggcagccccagtccccagcctgactctaccgataatgacgactatgacgatatcagcgcagcatag

SEQ ID NO: 217596 - DNA, 717 bp, synthetic construct
  misc_feature 1..717: note = Description of Artificial Sequence: Synthetic coding sequence
  source 1..717: mol_type = other DNA
atggctgtggaaggaggtatgaagtgcgtcaaatttctcttgtacgtgctgctcctcgctttctgcgcgtgtgccgtcggactgatcgcagttggggtgggtgcacaactggtcctgagtcagaccattatccagggtgctaccccgggtagcctgcttcctgtcgtgatcatagccgtcggagtgtttttatttctagtagcgttcgtggggtgttgcggcgcttgcaaagagaactactgcctgatgatcacattcgctatctttctctctctgatcatgctcgtagaagttgccgcagctattgcagggtatgttttcagggacaaagtgatgtccgaatttaacaacaactttaggcagcagatggagaactatcctaaaaacaaccacacagcctctatcctagaccgaatgcaagcggacttcaagtgctgtggggctgcaaattacacagattgggaaaaaatccctagcatgagtaaaaacagggtcccagactcctgttgcatcaatgttacagtggggtgtgggatcaactttaacgaaaaggccatccataaggaaggatgcgtcgagaaaatcggcggatggttgcggaagaacgtcctggtggtcgccgctgccgcactcgggatagcctttgttgaagtcctgggcattgtttttgcttgttgtctcgtgaagtctattaggagtgggtatgaagtgatgtag

SEQ ID NO: 217597 - DNA, 711 bp, synthetic construct
  misc_feature 1..711: note = Description of Artificial Sequence: Synthetic coding sequence
  source 1..711: mol_type = other DNA
atggccgtggaagggggaatgaaatgcgtcaaattcctgctgtatgtgctcttgctggccttttgcgcatgcgctgttgggctgatcgccgtgggggtgggagcccaactggtactttcccaaacgatcatccagggtgctacccctggtagtctcctccccgtcgtgatcatcgccgtcggcgtgtttctctttctagtagcgttcgtgggatgttgtggtgcttgcaaagagaactattgtctgatgataacttttgctatctttctcagcttgatcatgctcgtcgaggttgcggcagctattgcaggctacgtgtttcgcgacaaggtcatgtcagagtttaataataattttaggcagcagatggagaactaccccaaaaacaatcatacggccagtattctggaccgcatgcaggccgatttcaagtgctgtggagcggcaaactacactgattgggaaaagatcccatcaatgtcaaagaaccgggtgcccgatagctgctgcataaatgtaacggtgggctgcggaatcaattttaacgaaaaggcaatccataaggaggggtgtgtggagaaaatcggcggatggctgcggaaaaacgtcttggtagtggccgctgccgctctggggatcgcattcgtgttaggaatcgtattcgcctgctgcctggtgaaaagtattcggagcggctatgaggtaatgtag

SEQ ID NO: 217598 - DNA, 402 bp, synthetic construct
  misc_feature 1..402: note = Description of Artificial Sequence: Synthetic coding sequence
  source 1..402: mol_type = other DNA
atggccgtagaaggtggaatgaaatgcgtaaagttcctgctgtatgtgcttctcctggccttttgcgcatgcgccgttgggctcatagcggtaggagtgggggcacaactggtgttatcgcagacaatcattcagggtgccacgccaggttcactgctacctgtggtgatcatcgcggttggtgtctttttattcctcgtggcattcgtcgggtgctgcggggcttgcaaggagaactactgtcttatgattacattcgccattttcctgtccctgattatgttggttgaagtcgcagccgctatcgcgggatatgtgttcagagacaaagtgatgagtgagtttaacaataatttccgccaacagatggagaattaccctaagaataatcatacagcttag

SEQ ID NO: 217599 - DNA, 717 bp, synthetic construct
  misc_feature 1..717: note = Description of Artificial Sequence: Synthetic coding sequence
  source 1..717: mol_type = other DNA
atggctgttgaaggaggaatgaaatgcgtcaagttcttgctgtatgtgctcctcttagccttttgcgcatgcgcggtcggactaatcgccgtgggtgttggcgctcagctcgtgctctcccaaaccattatccagggtgctactccaggaagcctgctccctgttgtcattattgccgtgggcgttttcctgtttcttgtagctttcgtgggatgctgcggtgcctgtaaggagaactattgcctaatgattaccttcgcaattttcctgagcctcataatgttggtggaggtggccgcagctatagcgggatacgtgtttagagacaaagtgatgagtgagtttaacaataactttaggcagcagatggagaattatcccaaaaataatcacacggccagtattttggacaggatgcaagccgactttaaatgttgcggggcagccaactacacggactgggaaaaaatccccagtatgtctaaaaaccgcgttcctgacagttgttgtattaacgtcaccgtcggttgcgggatcaacttcaacgaaaaagccatccataaagaggggtgtgtggaaaagattggtggctggctgcggaaaaacgtcctcgtcgtagctgcggctgcacttggcattgcttttgtggaggtgctcgggatagtcttcgcctgctgtctggtcaagtctatcagatccggctacgaagtgatgtag

SEQ ID NO: 217600 - DNA, 648 bp, synthetic construct
  misc_feature 1..648: note = Description of Artificial Sequence: Synthetic coding sequence
  source 1..648: mol_type = other DNA
atggcagtggagggaggaatgaagtgcgttaagttcctgctttatgtgctcctcctggccttctgcgcctgtgccgtcggtctgatcgccgtgggagtaggggctcagctcgtgctgtcccagactatcattcaaggtgctacaccagggtctctcttgcctgtggtcataatagccgtaggcgtgtttctgttcttggtagcatttgttggttgctgtggtgcctgtaaggagaattactgccttatgataactttcgccatatttctgtccttaattatgctcgttgaggtagcagctgccatcgccggttacgtctttagggataaggtgatgagtgaatttaataataatttccggcagcagatggaaaactaccctaaaaataatcatacagccagcatactggacaggatgcaggccgacttcaaatgttgtggcgcagctaactataccgattgggagaagatcccctcaatgagcaagaacagggtgcccgatagctgctgcataaacgtcaccgtgggttgcggcattaactttaacgagaaggccatccataaagaaggttgtgtcgagaagatcggtggatggttgcggaagaatgtactcgttgtcgcagccgctgcactgggcatcgctttctag

SEQ ID NO: 217601 - DNA, 654 bp, synthetic construct
  misc_feature 1..654: note = Description of Artificial Sequence: Synthetic coding sequence
  source 1..654: mol_type = other DNA
atggcggtggagggaggcatgaagtgcgtcaaattcctcctgtacgttttgttactcgcgttctgtgcctgtgcagtgggcctcatcgccgtgggcgtcggagcacagcttgtgttaagtcagactattattcaaggcgcaacacccggtagtctgcttcctgtcgtcattatcgcagtcggagtcttcctgttcctcgtcgcttttgtcggctgttgtggcgcatgtaaagagaattactgtctgatgattacctttgctattttcctgtccctgatcatgctcgtggaggtggcggctgcaattgcagggtacgttttccgtgacaaggttatgtctgaatttaataacaactttaggcagcagatggagaattaccccaaaaacaatcacacggcttctattttggaccgtatgcaggcagatttcaaatgctgtggcgctgcgaactacaccgactgggagaaaatcccgagcatgtctaagaaccgagttcccgatagctgttgcatcaacgtgactgtgggttgtgggataaatttcaatgagaaggctattcacaaggaaggatgcgtggaaaaaatcgggggatggctgcgcaaaaatgtgctggtcgttgccgctgctgcactcggcatcgctttcgtcgaatag

SEQ ID NO: 217602 - DNA, 717 bp, synthetic construct
  misc_feature 1..717: note = Description of Artificial Sequence: Synthetic coding sequence
  source 1..717: mol_type = other DNA
atggccgttgaggggggaatgaagtgcgtcaagttcttactctacgttttgctgctggcgttctgcgcatgcgctgtcggtctaatcgcagtgggagtgggcgctcagcttgttctttctcaaacaataatacaaggagctacacctggttcactgctgccagtggtgataatcgccgtgggggtgtttctgttcttagtggcttttgttgggtgttgcggtgcttgtaaagaaaactactgccttatgatcacgtttgctattttcctgagtctgatcatgctggtggaggtggcagcagccatcgcaggctacgtattccgtgataaggtgatgagcgaattcaacaataactttcgacagcagatggaaaactacccaaaaaacaatcataccgcctctattctggatcggatgcaggccgactttaagtgctgcggtgctgccaattataccgattgggagaagatcccatccatgagtaagaacagggtgccagactcttgctgtataaatgtcactgtgggatgcggtatcaattttaacgaaaaggcgatccataaagaggggtgcgtggaaaagattgggggatggctgcgcaagaacgtgcttgtggtggctgctgcagccctgggaatcgcattcgtggaggtgctcggcatagtgttcgcttgctgcctcgtcaagagcatacggagcggttatgaagtgatgtag

SEQ ID NO: 217603 - DNA, 648 bp, synthetic construct
  misc_feature 1..648: note = Description of Artificial Sequence: Synthetic coding sequence
  source 1..648: mol_type = other DNA
atggccgtcgagggaggcatgaaatgtgtcaaatttctactgtatgtcttactcctcgccttctgtggggctactcctggcagtctcctgccagttgtaataatcgccgtgggggtcttcctgttcttggtggctttcgtaggttgttgcggcgcatgtaaagagaactattgtttaatgataacattcgcaatatttctttctctaatcatgttggtggaagtggctgctgccatagccggatacgtcttcagggacaaggtcatgtcagagttcaacaataacttcaggcagcagatggaaaattaccccaaaaacaaccacacagcatccatccttgatcggatgcaggccgatttcaagtgctgcggcgcagccaattataccgactgggaaaagatcccctccatgagcaaaaatcgagtgcctgactcctgttgcatcaacgtaactgttgggtgcggcatcaactttaatgagaaggctatccacaaagaaggatgcgtggagaagatcggaggttggctgcggaaaaatgtcctcgtggtcgcagccgctgctttgggaattgctttcgtggaagttctcggcattgtgttcgcatgctgcctcgtcaagagcatccggtcaggatacgaagtgatgtag

SEQ ID NO: 217604 - DNA, 471 bp, synthetic construct
  misc_feature 1..471: note = Description of Artificial Sequence: Synthetic coding sequence
  source 1..471: mol_type = other DNA
atgatcactttcgcaatctttctaagcctgattatgctggtcgaagtcgctgcagccatcgccggttacgtcttcagagacaaagtgatgtcagagttcaataacaattttcgtcaacagatggagaattatccaaagaacaatcacacggctagcatcctcgatcgtatgcaggcagactttaagtgctgcggagcagcgaactataccgattgggaaaagattccctctatgtctaaaaacagggtgccggactcctgttgcattaatgtgaccgtcggatgtggtattaacttcaatgagaaagcgatccataaagaagggtgcgtggaaaagatcggcggatggttacgaaaaaacgtgttggtggtggccgcagctgctctcggcatcgcatttgtggaagtgctgggcatcgtgtttgcctgctgtttggtcaaaagtataaggtccggatacgaagtaatgtag

SEQ ID NO: 217605 - DNA, 471 bp, synthetic construct
  misc_feature 1..471: note = Description of Artificial Sequence: Synthetic coding sequence
  source 1..471: mol_type = other DNA
atgatcactttcgccatttttttgagtctgatcatgctcgttgaagttgcagcggcaattgctggctacgtcttccgggataaggttatgtcggagtttaataataatttccgacagcaaatggaaaactaccccaagaacaaccacacagctagcattttagatcgcatgcaggctgactttaagtgctgcggtgccgctaattacactgactgggagaaaatcccatcgatgtcaaaaaaccgggtgccagatagctgctgtataaacgtaacagtgggatgtggaatcaactttaatgagaaggcaatccacaaagagggctgcgttgaaaaaattgggggttggctgagaaagaatgtgctggtcgtagctgctgccgctctgggcatcgcctttgtggaggtgctgggcatcgtgttcgcatgttgtctggtaaaatccattcgctccggctatgaggtaatgtag

SEQ ID NO: 217606 - DNA, 1065 bp, synthetic construct
  misc_feature 1..1065: note = Description of Artificial Sequence: Synthetic coding sequence
  source 1..1065: mol_type = other DNA
atgcggctggccgtcctgttttcaggcgctcttctcgggctgctggctgcacagggaacgggaaatgattgtccccacaagaagtcggctacgttactgccaagtttcacagtgactcccacagtgacagagagtacaggaacaactagccataggaccacaaaatcacataagacaactacacatagaactacaactacgggcacgacctcacatggtcccaccaccgccacccacaatcctacaaccacatctcatggaaacgtgaccgtgcatcccacgagtaactccactgcaaccagtcaaggcccttccactgccactcactcacccgctacgacctcacacggcaatgcaacggtccacccaacatccaatagcacagctacttcacccggattcacatcttctgcccaccctgagccaccccctccatctccttcccccagccccacatctaaggaaacaataggggactacacttggacgaatgggagtcagccatgtgtccatctgcaggctcagatacaaataagagtgatgtataccactcaggggggaggcgaagcatggggcatctcagtgctgaatccaaacaagactaaagtgcaaggaagctgcgagggagcccacccacacctgcttttgagcttcccgtacggacacctcagctttggctttatgcaggatctgcagcaaaaagttgtttacttatcttacatggcagtcgagtataatgtgtccttccctcacgccgcacagtggactttcagtgctcagaacgcatctctgcgagacctccaggccccactcggacaatcattctcttgttccaactcctcgatcatcctttccccagccgtgcatttggatctgctgagcctacgcctgcaagccgctcagttaccccacaccggggtgtttgggcagagcttctcctgtccgagcgaccggtctatcctccttcccctgatcattggactgatactcttgggcttgctggctctagtgcttatcgcattttgtatcattaggcgcagaccatctgcctaccaggctctgtag

SEQ ID NO: 217607 - DNA, 894 bp, synthetic construct
  misc_feature 1..894: note = Description of Artificial Sequence: Synthetic coding sequence
  source 1..894: mol_type = other DNA
atgagactcgccgtgcttttttctggcgctctccttgggcttctagccgagtctaccggcacgactagccatcgtaccactaagtctcataaaaccaccactcacaggactactacaaccggcacgacaagccacggacctacgaccgcgacccacaatccgaccacaacatcccacggcaatgccactgtgcaccccacaagcaattctacagcaacctcaccgggtttcaccagctcagcacaccctgagccccctcctccctcccccagcccctcccctaccagcaaggagacaattggcgattatacatggacgaacggcagccagccttgtgtccatttgcaagcacagattcagattagagtcatgtacactacccaaggtggtggcgaagcatggggcatcagcgtgctcaatccaaacaagacaaaggtacaaggtagttgtgagggggctcacccacatctcttactctctttcccttacggacacctcagttttgggtttatgcaagatctgcagcagaaagtggtctatctgagctacatggcagtcgaatataacgtgtcatttccccatgctgcccagtggaccttcagtgcccagaatgcatcgctcagggacctgcaggcgcctttaggacagtcgttctcttgcagcaactcctccattattttatcccctgccgtccatctagatctcctgagtttacggttacaggctgcccagctgccacatacaggcgtgttcggtcagtcctttagttgccccagcgaccgatctatccttctccccctgataattggcctcatccttctggggctgctcgccctggtgctgattgcgttttgtattatcagaagacgtccctccgcttaccaagcactctag

SEQ ID NO: 217608 - DNA, 3018 bp, synthetic construct
  misc_feature 1..3018: note = Description of Artificial Sequence: Synthetic coding sequence
  source 1..3018: mol_type = other DNA
atgatgagcgacgcctccgatatgttggcggcagcactggagcaaatggacggcataattgcaggctctaaagccctggagtattcgaacgggattttcgattgccagtctccaacttcacccttcatgggcagccttcgcgcactgcatttagtcgaggacctgcgagggttacttgagatgatggagacggatgagaaggaagggctgaggtgtcagatacccgattccacggctgaaacactggtagagtggcttcagtcccagatgacaaatggtcatctgcccggtaatggtgacgtttaccaggaaaggcttgccagactcgagaacgataaggagagcttggtcctgcaagtgtccgtgttgacggatcaagtcgaggcccagggggaaaaaattcgggacctagagttctgccttgaagaacatcgcgagaaagtaaatgcgaccgaggaaatgctgcaacaggagctgctgtctcggacctcgctggaaacccagaagcttgatctcatggctgagatcagtaatctgaaactcaagttgactgccgtagaaaaggacaggttggactacgaggacaagttccgagacaccgaggggcttatacaagagatcaatgacctgcgcttgaaggtgagtgaaatggattccgagcgccttcagtatgaaaaaaagcttaagtctactaaggatgagctggccagcttgaaagagcagctggaggagaaggagtccgaagtgaaacgtctgcaggaaaagctcgtgtgcaagatgaagggagaaggagttgagattgtcgacagagacgagaactttaaaaagaagctgaaggagaagaacattgaagtccagaagatgaaaaaagctgtcgagtcattaatggccgcaaacgaggaaaaagatcgaaaaattgaagacctgcggcagtgcctcaataggtacaaaaagatgcaggatacggtggtgctggcccaaggcaagaaggggaaagatggagaatatgaagaactgctgaatagcagttcaattagctccctgctggatgcccagggtttctccgacctggaaaaaagcccatccccaacccctgtaatgggttccccgtcgtgtgatcccttcaacacatcagtgccggaagagtttcatacaacaattctccaagtgtcaataccatctctactgccagcaacagtgtccatggagacatccgagaaaagtaaactgactccaaagcctgagacaagctttgaggagaatgacggcaacattattctgggcgctacagttgacacacagctatgtgataaactgcttaccagtagcctgcagaagtcaagctcactcggtaatctaaagaaggaaacctcggatggcgagaaagagaccattcaaaaaacaagcgaggacagagccccagctgaatcaaggccatttgggacgcttccgccacggcctcccggacaggatacaagcatggacgataaccctttcggcacaagaaaggtcagatcttcatttggaagggggttctttaaaattaaatctaacaagcgcacggcctccgcacctaacctggatcgaaagaggagcgctagcgccccaaccttagctgaaaccgaaaaggagaccgctgaacacctcgacctagccggagcttcaagtcggccaaaagatagccagcggaattctccatttcagatcccacctccctcccccgacagtaagaaaaaatctcgtgggatcatgaaattatttggtaagctccggaggtcccagagcaccacatttaaccccgatgatatgtcggaaccagagttcaagcggggaggtacaagagccaccgcagggcctagattaggctggagcagagatttggggcagagcaatagcgacttggacatgcctttcgcgaagtggactaaggagcaggtgtgtaactggctgatggagcagggcttaggtagctacttgaactccgggaagcactggattgccagtgggcagacgttactgcaggccagccagcaggatctggaaaaggagttaggaatcaaacattctctgcaccgaaaaaagctccagttggccctacaagctttaggcagtgaggaagagactaaccatggcaagttagacttcaattgggtgacgagatggcttgacgacattggactgccacagtacaagacccagttcgatgaagggcgagtggacggtagaatgctccattacatgaccgtggacgatctgttgtctctgaaggtcgtgagtgtgttgcatcacttatctattaagcgggcaattcaggtattgcggatcaacaattttgaaccaaattgcctccggagaaggcccagcgacgagaatacaattgccccatccgaggtacagaagtggacgaatcatagagtcatggaatggctccgcagcgtggacttagcagagtacgcacctaacttgcggggtagtggagtgcatggagggttgatggtactggaacctagatttaatgtcgagacaatggcccagctgttgaacataccgccaaataagacactcctcaggcgccacttagctacccatttcaacctgctaattggcgctgaggcccaacaccagaaaagggatgccatggaactccccgattatgtgctgttaaccgccacagcaaaagtcaagccaaagaagctggctttctctaatttcggtaaccttaggaaaaaaaagcaggaggacggagaagaatatgtatgcccaatggagctgggacaggcctctgggtctgcttcgaagaagggatttaaacctggcttggacatgcggctgtacgaggaggacgatctggaccgcttggagcagatggaggactccgagggtactgtccgacagataggtgcttttagtgaggggattaataatctgacccacatgcttaaagaggacgatatgtttaaggacttcgcagccagaagtccaagcgcttcaattaccgacgaagatagcaatgtatag

SEQ ID NO: 217609 - DNA, 495 bp, synthetic construct
  misc_feature 1..495: note = Description of Artificial Sequence: Synthetic coding sequence
  source 1..495: mol_type = other DNA
atgagctccgaaaactgttttgtggcagaaaactccagcttacatcctgaatcaggccaggagaacgacgcgacgtcgccgcacttctcaactcgacacgagggcagcttccaagttccagttctctgcgcagtgatgaatgtggtgttcataacgatactgattatagccctgattgcactcagcgtggggcagtataactgccccggtcaatacacattctcaatgccttccgactctcacgtctcctcatgcagtgaagactgggtaggataccagcgtaagtgctatttcataagtacggtgaagcggtcctggacctctgcccagaacgcctgtagtgagcacggtgccactctggccgtgatagatagcgagaaggacatgaatttcctaaagcggtacgccggaagagaggagcactgggtggggctgaagaaagagcctggccatccttggaagtggtcaaatggaaaggagttcaataactggtag

SEQ ID NO: 217610 - DNA, 723 bp, synthetic construct
  misc_feature 1..723: note = Description of Artificial Sequence: Synthetic coding sequence
  source 1..723: mol_type = other DNA
atggccggaccaccccgtttgttactgctgccattactgctcgccctcgcgagagggctccctggagctttagcagcccaggaggtgcaacagtcaccccactgcaccactgtcccagttggggctagcgtgaatatcacgtgctccacctccggcggactgagggggatttatctgagacaactgggacctcagccccaggatataatatattatgaagatggagtggttcccactacggacaggaggtttcgaggacggattgatttctccggcagccaggacaatctcaccattacaatgcatcggctgcagttgtccgatacagggacctacacctgccaggcaatcacagaagtgaatgtctacggtagtgggactctggtcttagtgactgaggaacagtcccagggttggcaccggtgcagcgatgctccacctcgcgcttctgctctcccagccccacctactggtagcgccctgcccgaccctcaaactgcttctgctcttccagatccaccagccgcttctgctctgcctgccgcacttgccgtaatctccttcctgttaggacttggactgggcgtcgcttgtgtgctggctagaactcagattaagaaactttgctcctggagggacaagaactccgctgcgtgcgtggtctacgaggacatgagccactcaagatgtaatacgctgtcttctccaaaccagtaccagtag

SEQ ID NO: 217611 - DNA, 1080 bp, synthetic construct
  misc_feature 1..1080: note = Description of Artificial Sequence: Synthetic coding sequence
  source 1..1080: mol_type = other DNA
atggccgaggccattacctacgcagaccttaggtttgtgaaggccccactcaagaagagtatctcatctagacttggacaggatccaggggctgatgacgacggggagattacatatgaaaacgtccaggtaccggctgtgctcggcgttccttcctccctggcaagcagcgtcttgggagacaaagccgctgttaagtctgaacaacccacggcttcttggcgcgctgtcacctctcccgctgttggaaggatactaccttgccggactacctgcctcaggtacctgctgttgggcctgctgcttacctgcctgctgctgggcgttactgcaatctgtcttggcgtgcggtaccttcaggttagtcaacagctgcagcaaaccaatcgcgttttggaggtgactaacagcagcctgagacaacagctaaggcttaagattacccaattgggacagtctgccgaggatctgcagggctcaaggcgagagcttgcacaaagccaagaggccctgcaggtggagcagagagcccaccaagctgctgaagggcaactgcaggcttgtcaggcggatcgccaaaaaacaaaagagacgttgcagagtgaggaacagcaaagaagggccctggagcaaaaactgtcgaacatggaaaaccggctgaagccctttttcacctgtggctccgctgatacctgttgtcctagtggctggataatgcatcagaagtcctgcttctatatttccctgactagtaaaaactggcaggaatcgcagaagcagtgcgagacgctgtcgtcgaagttggccaccttcagcgaaatttatccccaaagccactcttactacttcttgaatagtttactgccaaatggcggatcgggaaattcatactggactggactttctagtaacaaagattggaaacttaccgatgacacccagaggacccgcacctacgcacagagcagcaagtgcaacaaagtgcacaagacgtggtcctggtggacactagagtctgagagctgccgctcttctttaccatatatttgtgaaatgactgccttccgatttccagactag

SEQ ID NO: 217612 - DNA, 363 bp, synthetic construct
  misc_feature 1..363: note = Description of Artificial Sequence: Synthetic coding sequence
  source 1..363: mol_type = other DNA
atggcggaggccattacttacgccgacctccggtttgtgaaggccccactgaaaaagtccataagtagcaggttgggccaagacccaggcgcagacgacgacggtgagataacttacgagaacgtccaagtgcccgcagttttgggggtgccttcttcacttgcaagtagtgtgctcggagacaaagccgctgtgaagagcgaacaacctaccgcctcatggagagccgtgacgagtcccgcagtgggccgaatacttccttgcgagtgcgcctgcgcgggacaaccgaggggacaggtgctggccccagtacccgcagctgatggagctggtccacgaggtgtccagctactccccggttag

SEQ ID NO: 217613 - DNA, 360 bp, synthetic construct
  misc_feature 1..360: note = Description of Artificial Sequence: Synthetic coding sequence
  source 1..360: mol_type = other DNA
atggctgaggctatcacctatgcggacctgcgcttcgtgaaggccccactgaaaaagagtatttccagtcgccttggccaggacccaggcgcagatgacgatggagagattacttatgaaaatgtccaagtcccggctgtcctcggcgtcccatcatctcttgccagttccgtcttaggtgacaaggcagccgttaagagcgagcagcccacggcctcatggagggccgtaacgagcccagctgtgggacgaatacttccatgcagaaccacatgcctccggtaccttttactggggttactcctaacttgccttctcctgggtgtgactgcgatatgtcttggcgtcagatgcgagtag

SEQ ID NO: 217614 - DNA, 1080 bp, synthetic construct
  misc_feature 1..1080: note = Description of Artificial Sequence: Synthetic coding sequence
  source 1..1080: mol_type = other DNA
atggccgaggctatcacctacgcagatctccgctttgtcaaggcacccctgaagaagtctatcagcagcaggctgggacaggaccccggtgcagacgatgatggggagatcacgtacgagaacgtgcaagtgccagctgtgctaggcgtcccttctagtttagcatcttctgtgcttggggacaaggccgcagtgaagagtgagcagcccacggcatcctggcgggcagtaaccagccctgcggttgggcgtatcctgccgtgccgcaccacatgtctccgctatctcctgctggggctgttgttgacgtgtctcctcttaggggttaccgctatctgtttgggtgtccgctacctccaggtgtcacagcagctgcagcagacaaacagggtgctggaggtgacaaattccagcctgaggcagcagctgcgccttaagatcacacagcttggacagagtgccgaggacctccagggaagtagaagagaactcgctcagtcccaggaggctctgcaggttgagcagcgcgctcatcaagctgcagagggccagctgcaggcttgtcaggcagatagacagaagacgaaagaaacccttcagagtgaggagcagcaacggcgagcactggagcaaaagctttcgaatatggagaaccgattgaaaccattcttcacatgtggctcggcagatacgtgttgtccgagtgggtggatcatgcatcaaaaatcctgtttctacattagtttgacatcaaagaattggcaggaatctcagaagcagtgtgagactttgtctagcaaactggccactttcagcgagatttatccacaatcacactcatattattttctaaattcgttgctccctaatggtggctccgggaactcttactggacaggcctgagttcaaataaggactggaagctgactgacgatacacaaagaacgagaacttacgcccagagcagcaaatgcaataaagtccacaagacatggtcttggtggaccctcgaatcagagagctgccgctcttctctcccttacatttgcgagatgacagcttttaggttccctgactag

SEQ ID NO: 217615 - DNA, 1080 bp, synthetic construct
  misc_feature 1..1080: note = Description of Artificial Sequence: Synthetic coding sequence
  source 1..1080: mol_type = other DNA
atgcagacccgcaacccacagagccacggagagaacggcgctagtccatggtcctggggtgacaggctcgggccaggtcctgatccgggagcagacgatgacggtgaaataacctacgagaatgttcaggtgcccgcagtactcggtgttccctcatccctggccagcagtgtgctgggagacaaagcagcagtgaagagtgaacagcccactgcctcctggagagcggttacttctcctgcagtcggtcgaattctgccctgtaggacgacatgccttcgctatctgctcttgggactcctccttacttgcctattactgggcgttacagcaatctgcctcggtgtgaggtatctccaggtatcacagcaacttcagcagaccaaccgggttctggaagtgaccaactcctcattaaggcagcagctgaggttgaagatcacccagctgggccaatccgccgaggacctccaaggtagccgcagagagttggcgcaaagtcaagaggccctgcaggtcgaacaacgggctcatcaggcggcagaagggcaactacaagcttgtcaagcggatcgacagaaaacgaaagagactctccagtctgaggaacagcagagacgggctctggagcagaaactctcaaacatggaaaaccgacttaagccattcttcacttgtggatcagccgacacctgttgccccagtggatggatcatgcaccagaaatcatgcttttacatttcgcttacatccaagaattggcaggagagccagaaacagtgcgagacactgtccagcaagcttgccaccttctccgagatctatcctcagtcgcatagttattatttccttaattctctcttgcccaacggtggctcaggcaactcttactggactggactctcctccaacaaagactggaaactcactgacgatacccagcgtacaagaacctatgcgcagtcgtcaaaatgtaacaaagtccacaagacctggtcatggtggacattagaatcggaatcttgtcgcagctccctgccgtacatttgcgaaatgacagccttcaggtttcctgactag

SEQ ID NO: 217616 - DNA, 891 bp, synthetic construct
  misc_feature 1..891: note = Description of Artificial Sequence: Synthetic coding sequence
  source 1..891: mol_type = other DNA
atgcaccgtcgtcgatctcgcagttgccgggaggaccagaagcccgttatggacgatcagagggatcttatttctaacaacgagcagctacccatgctcggcagaaggcctggggctccggagtccaagtgcagtcgtggcgctctgtacaccggcttcagtatactagtgactctgctactggcaggccaagctacaactgcatattttctgtaccagcagcagggacgccttgataagctgacagtcaccagccagaatctgcagctcgagaacctgaggatgaagctgcccaagccccctaagcctgtttccaagatgcgaatggccacgcctctgttaatgcaggcacttcctatgggggctctgcctcaaggcccaatgcagaatgccaccaagtacggaaatatgacagaggatcatgtgatgcacctcttgcaaaatgctgacccattaaaagtgtacccgcctctgaaagggagcttccccgagaatctccggcatctcaaaaacaccatggagacgatcgactggaaggtcttcgaaagctggatgcatcactggctgctgtttgagatgagccgacactcactggagcagaagcccacagacgccccaccaaaggttttgaccaagtgccaggaggaggtgagtcacatacccgctgttcatcctggctccttcagaccaaagtgtgacgagaacggcaactatctcccactccagtgttacggcagcatcgggtactgttggtgtgtgtttccaaatggtaccgaagttcccaatactcgcagtagggggcaccacaattgctctgaatccctggaactcgaagacccttcaagcggactgggcgtgacaaaacaggacctcggaccagtccccatgtag

SEQ ID NO: 217617 - DNA, 699 bp, synthetic construct
  misc_feature 1..699: note = Description of Artificial Sequence: Synthetic coding sequence
  source 1..699: mol_type = other DNA
atgcatagaaggcggtcgcgaagctgcagagaggatcaaaaaccagtgatggatgaccagagggatctcatatctaacaatgagcagctccctatgctgggccgtaggcccggagcccctgaatcaaagtgttctcggggagccctgtatacaggcttctcaattctcgtgaccctgttgctggctggccaggctaccacagcttactttctctatcagcaacaaggcagactcgacaagctgacagtgacgagccagaacctgcagctggaaaatttacgtatgaaactgccaaagccgcctaagcccgtctccaaaatgcggatggcgaccccactgttaatgcaagcactgcccatgggggcactgccgcaaggaccaatgcagaacgcaacaaaatacgggaatatgacagaagatcacgtgatgcatctgcttcaaaatgctgatcccctgaaggtttacccccctctcaaagggtcttttcccgagaatcttcggcatctgaaaaacaccatggagaccattgactggaaggtcttcgaaagctggatgcatcactggctgttgtttgagatgagtcggcattcccttgaacagaaacccactgacgccccacctaaagagtcgctggagttggaggatcctagcagtggcctgggcgtcaccaagcaggacctaggcccagtacccatgtag

SEQ ID NO: 217618 - DNA, 483 bp, synthetic construct
  misc_feature 1..483: note = Description of Artificial Sequence: Synthetic coding sequence
  source 1..483: mol_type = other DNA
atgcatcggagaaggagcaggtcgtgtagggaagatcagaagcctgtaatggacgaccagagggacctcatctcaaataatgaacagctgcctatgctgggtcgcagacccggtgcgccagaatcgaagtgctcacgaggcgctctgtataccgggttctccatacttgttaccctcttactagctggccaagcaaccacagcctatttcctttatcagcagcaggggcgactcgacaagctcaccgtgacgtcacagaatcttcagctagaaaacctgcggatgaaactcccaaagccacctaaaccggtttccaaaatgcggatggccacacctttgcttatgcaggcattgcccatgggagccctgccacagggccctatgcagaatgctactaagtacggaaacatgacggaagatcacgtgatgcacctccttcaatctcattggaattggcggacccgtctcttgggctgggtgtag

SEQ ID NO: 217619 - DNA, 951 bp, synthetic construct
  misc_feature 1..951: note = Description of Artificial Sequence: Synthetic coding sequence
  source 1..951: mol_type = other DNA
tgacggtcctgccgcgaagatcagaaacccgttatggatgaccagcgagatttgatctcaaataatgaacagctaccaatgctgggtcgccgtcccggagcacctgagtcaaagtgttcccgtggcgcactgtacacaggattctccatcctggttaccctgcttttggccggacaggccacaaccgcttacttcctataccagcagcaggggagactggacaaactgaccgtgacatcccagaatctccaattggagaatttgcggatgaagcttccgaagccaccaaaacctgtatccaaaatgagaatggctactcctttgctgatgcaagctctgcccatgggtgccctgccacagggacccatgcagaatgcgaccaagtatggaaatatgaccgaggaccacgtcatgcacctcctgcagaatgctgatccgctgaaggtgtatccacccctgaaggggtctttccccgagaatcttaggcacttgaagaataccatggagaccatcgattggaaagtgttcgagtcatggatgcaccactggttgctgtttgagatgtcaagacattctctggaacaaaaaccgacggacgcccctcccaaggtgctaaccaaatgccaagaagaggtgagccacatcccagccgtacacccaggcagcttccggccaaagtgtgacgagaacggtaactatctgccgcttcagtgctacggttctattggttattgttggtgcgtctttcctaatggtaccgaagttccaaacacccgcagtcgcggtcatcacaattgcagcgagagcctggaattggaagaccccagtagcggtctaggcgtaaccaagcaagatctggggccaggtaaagggcttgctgagggtcatctggtgacctctagttcctctccggcaggacctgccccactttgggccggagaaggcgtgtag

SEQ ID NO: 217620 - DNA, 369 bp, synthetic construct
  misc_feature 1..369: note = Description of Artificial Sequence: Synthetic coding sequence
  source 1..369: mol_type = other DNA
atgcacagaaggcgatcacgctcttgtcgggaggaccagaagcctgtgatggacgaccagcgtgatttgatcagcaataacgagcagcttccgatgctcggtagaagacctggcgctcccgagagtaaatgctcgcgaggcgcattatataccggctttagtattttggtgactctgcttctcgccggacaagcgaccactgcctattttttgtaccagcaacaggggagactcgataagttgacagtaacctcgcaaaacctccaactagaaaacctgcgaatgaagctgcccaaacctcatgctgagtgccatcaggtgtggcagcacgacagagggccatgcgatgccccagcacccgaatgctag

SEQ ID NO: 217621 - DNA, 459 bp, synthetic construct
  misc_feature 1..459: note = Description of Artificial Sequence: Synthetic coding sequence
  source 1..459: mol_type = other DNA
atgcatcggagaagatcccggtcttgccgggaggaccagaaaccggtgatggacgaccagagggacctgatctccaacaacgaacaattgcctatgctcgggcgtcgacctggtgcccctgaatctaagtgttcccgcggagccctctacaccggcttcagtatcctggtcactctcctgctggccggtcaagccacaaccgcctatttcctgtaccagcaacaaggtcgccttgacaaattgaccgtaacatcccaaaacctacagctggagaatctgagaatgaaactccccaagcctccaaagccggtatccaagatgagaatggcaacccctttactgatgcaggccttacccatgggagccctgccacagggccctatgcagaatgccacaaaatacggtaacatgactgaggatcatgtgatgcacctattacaggaggttgctaaaagctag

SEQ ID NO: 217622 - DNA, 690 bp, synthetic construct
  misc_feature 1..690: note = Description of Artificial Sequence: Synthetic coding sequence
  source 1..690: mol_type = other DNA
atggcgcgtctcgcattatcacctgtgccctcacactggatggtggcgcttttgctgttactgagcgccgaacccgttcccgcagcgcgatcggaagatcggtaccgcaacccgaaagggagcgcatgctccagaatatggcaatcaccccgtttcatcgctcgtaagaggggattcacagtcaagatgcactgctacatgaatagcgccagtggcaacgtgtcctggctttggaagcaggagatggacgagaatccccaacaactaaagcttgaaaaaggtcgtatggaggaaagccaaaatgagtccctcgccaccctcacaattcagggtattagattcgaggacaatggcatctacttttgccagcagaagtgtaataacacaagtgaagtatatcaaggatgtggcacagagttaagggtgatgggcttcagcactttggcgcagctgaaacaacgcaacacgctgaaagacggtatcatcatgatccagactttgctgatcattctgtttatcatcgtgccgatcttcctgctgctagacaaggacgactccaaagcgggaatggaagaggatcacacctacgagggactggacatcgatcagacagccacctatgaagacatcgtgacactccggacaggagaggtcaaatggtccgttggagagcaccctggtcaggaatag

SEQ ID NO: 217623 - DNA, 378 bp, synthetic construct
  misc_feature 1..378: note = Description of Artificial Sequence: Synthetic coding sequence
  source 1..378: mol_type = other DNA
atggcaagactcgcactctctccggtgccctcccactggatggtggccttgctccttctcctcagtgctgagcccgtgcccgctgccagaagcgaggacaggtataggaaccccaaaggctttagcacgctcgcgcaactgaagcagaggaacacactaaaggatgggatcattatgattcagacccttttaatcatcctctttatcatcgtgccgatatttctgctactggacaaggacgattccaaggccggaatggaagaggaccacacctacgaaggtcttgacatcgaccagactgccacttacgaagacatcgttactctgcgaactggagaggttaagtggtcagtgggggagcacccaggccaggagtag

SEQ ID NO: 217624 - DNA, 693 bp, synthetic construct
  misc_feature 1..693: note = Description of Artificial Sequence: Synthetic coding sequence
  source 1..693: mol_type = other DNA
atggctcgattagccctgtcccccgtgcccagccactggatggtcgcgctgttactcctactgtccgccgcagaacctgtacccgcagctcgctcagaagatagatatcgcaacccaaaaggctctgcttgctctaggatttggcaaagtccccgtttcatcgcaagaaaacgcggattcacagtcaagatgcattgctatatgaattccgctagcggcaacgtcagctggctgtggaagcaggaaatggacgagaacccccagcagttgaagttggaaaaagggagaatggaggagtctcagaacgagtctctagccacactgactatacagggcatccggtttgaagataacggaatatatttttgtcagcaaaagtgcaacaacacaagtgaagtctatcagggatgcggcaccgaactcagggtgatgggtttttccacattagcacagcttaagcagagaaacaccttgaaagatggcataattatgatccagaccttgctgattatcctgttcattatcgtcccgattttcctgttgttagataaggacgacagcaaggctggtatggaagaggaccatacgtacgagggcctggatattgatcagaccgccacctatgaggacattgtgacactgcggaccggagaagtgaaatggagcgtaggcgaacaccccggacaggaatag

SEQ ID NO: 217625 - DNA, 711 bp, synthetic construct
  misc_feature 1..711: note = Description of Artificial Sequence: Synthetic coding sequence
  source 1..711: mol_type = other DNA
atgggggtggaggggtgtactaagtgcatcaagtatctcttgttcgtctttaacttcgtcttctggctggccggaggggtgatcctgggcgttgccctttggctcaggcacgatccccagaccacaaaccttctttatctagagctgggcgacaaaccagcccctaacacgttctacgtgggcatatatatcctgatcgctgttggcgctgtgatgatgtttgtgggctttttagggtgctacggcgctatccaggaaagccaatgcttactcggcactttctttacatgtctggtcatcttgttcgcgtgtgaagtagccgcaggaatctgggggttcgtcaataaggaccagattgcaaaagacgtcaagcagttctacgaccaggccctacagcaggctgtagtcgatgacgatgcaaataacgccaaagccgtggtgaagacgtttcacgaaactctcgattgctgcggttcttctacacttacagccctaacaacatctgtcctgaagaacaacctgtgccctagcggatcgaatatcatcagtaacctgtttaaggaagactgtcatcagaagatcgatgatctgttcagcgggaagctgtatctaatagggatcgccgcaatcgtggtggctgtgattatgatctttgagatgattcttagtatggtgttgtgctgtggcatccgaaattcatcagtatactag

SEQ ID NO: 217626 - DNA, 618 bp, synthetic construct
  misc_feature 1..618: note = Description of Artificial Sequence: Synthetic coding sequence
  source 1..618: mol_type = other DNA
atgtctagaggcctacaactccttctgctttcatgcgcgtacagcctggccccagctaccccagaggtgaaagtcgcttgtagtgaggatgttgacttgccttgcacggccccttgggacccccaagtgccctacacagtctcatgggtaaaactccttgagggcggagaagaacgtatggagacccctcaggaagaccatctgagaggacaacactaccatcagaagggtcagaacggctcatttgacgctccaaatgaacggccatatagcctgaagattagaaacactacctcttgtaacagtggcacctacaggtgcactctacaagacccagatggccagcggaatctaagcggcaaggtgatcctgagggtcaccggatgccctgctcaacggaaggaagaaaccttcaagaagtatcgggctgaaatcgtcctgcttctagcccttgtaattttctatctaactctaattatatttacctgtaaatttgcccgtttgcaatcaatattccctgattttagcaaagccggaatggaacgagccttcctgcccgtgacctcgcctaataagcatctggggctcgttacgcctcacaagaccgaattggtgtag

SEQ ID NO: 217627 - DNA, 351 bp, synthetic construct
  misc_feature 1..351: note = Description of Artificial Sequence: Synthetic coding sequence
  source 1..351: mol_type = other DNA
atggatccgcaatgcacaatgggcctgagtaatatcctgttcgtcatggcctttctactgtcagagctggaggatcctcagcctccacccgatcacattccctggataacagcagttctgcccaccgttattatttgcgtaatggtgttttgtttaattctgtggaaatggaagaaaaaaaaacggcctcgcaacagttacaaatgcggtaccaacaccatggagcgggaggaatccgaacagacaaaaaagagagaaaagattcacatccccgagcggtctgacgaggcccagagggtttttaagtcatctaaaactagttcctgcgataaatccgatacgtgcttttag

SEQ ID NO: 217628 - DNA, 990 bp, synthetic construct
  misc_feature 1..990: note = Description of Artificial Sequence: Synthetic coding sequence
  source 1..990: mol_type = other DNA
atggatccccaatgtacaatgggtctgagcaacattttattcgtgatggcatttcttctgtccggcgcagcacccctcaaaattcaggcctacttcaatgaaacagccgacctgccgtgccagtttgccaattctcaaaaccagtcactcagtgaacttgtggtcttttggcaggatcaggagaatctagtgcttaacgaggtgtatctcggaaaggaaaagtttgactctgttcacagtaagtacatgggtcggacatccttcgatagcgacagttggacgctacgcttgcacaacctccaaataaaagacaaagggttgtaccagtgcattatacaccataagaaacctaccggtatgatcagaattcaccagatgaactccgagctatcagtcctggctaatttttcacagcccgaaatcgtacctatttccaacatcacagaaaatgtatacatcaatctgacatgttccagtatacacgggtaccccgaacctaaaaagatgtcagtcctgttaagaactaaaaactctactattgagtatgacggcgtgatgcagaaaagccaggacaacgtgacagaactgtatgacgtctccatttctctgtcggtgagctttcctgacgtcacaagtaacatgaccatattttgtatcctcgagactgataaaacccggcttctgtccagccctttcagtatcgaactcgaagacccccagccaccaccggaccacataccatggattactgctgtcctgccaaccgtgatcatttgcgtaatggttttctgtctgattctctggaagtggaagaagaaaaagagaccacggaactcatacaagtgtgggacaaataccatggagcgtgaagagagtgagcagaccaagaaacgcgagaagattcatataccggagcgcagcgatgaggcacagcgcgttttcaagtcaagcaagacctcttcctgcgataaaagtgacacatgcttctag

SEQ ID NO: 217629 - DNA, 972 bp, synthetic construct
  misc_feature 1..972: note = Description of Artificial Sequence: Synthetic coding sequence
  source 1..972: mol_type = other DNA
atgggactttcaaatattctgttcgtgatggcctttttgctctcaggtgcagccccactcaaaattcaggcctacttcaacgagactgcggacctgccttgccagtttgccaacagtcagaaccaaagcttaagcgaattggtggttttttggcaggaccaggagaatcttgtattaaacgaggtgtacctcggtaaggaaaaatttgatagcgtccacagcaaatatatgggcaggactagcttcgactccgatagttggacactgaggctacataatctgcagatcaaggacaagggattgtaccaatgtatcatccaccacaaaaagcctaccggaatgattaggatccatcagatgaactcggagttatctgtgctagctaatttctcacagcccgagatagttccaatctctaacattacggagaatgtttacattaatctgacgtgctccagcattcatggataccccgagcctaaaaagatgtccgtattactccgcacaaaaaattctaccattgaatacgacggtgtcatgcaaaaatctcaggataatgttaccgaactgtacgatgtgagtatatctctgtcagtgagtttcccggacgtgacaagcaatatgacgatcttctgcatcctggagactgataagactcggctcttgagcagcccattttccatcgagctggaagatccccagccccctccagatcatattccctggataaccgctgtgttacctaccgttattatctgtgtcatggtgttctgtctgattctgtggaaatggaaaaagaaaaagcgcccaagaaattcatataagtgcggcactaataccatggaacgcgaggagagcgaacaaaccaagaagcgtgaaaagatacatatccccgagcggtccgacgaagctcaaagagtctttaaatccagcaaaaccagctcttgtgataaaagcgacacatgcttctag

SEQ ID NO: 217630 - DNA, 504 bp, synthetic construct
  misc_feature 1..504: note = Description of Artificial Sequence: Synthetic coding sequence
  source 1..504: mol_type = other DNA
atgggcctatccaacatcttattcgtgatggccttcttgctgagcggggctgcccctttgaagatccaggcgtatttcaacgaaaccgccgatctcccttgccagttcgctaatagccagaatcagtctctgtctgaactcgttgtgttctggcaggatcaagaaaacctagtattgaacgaggtatacttaggcaaagagaaatttgactctgtgcacagcaagtacatggggagaacctcttttgactccgatagctggacccttcggctgcataatctccagatcaaggataaggggctgtatcagtgcattatccaccacaaaaagcccaccggtatgattcggattcaccagatgaactctgaactgtccgttttagcaaacttctctcagcccgagatcgtgcccatcagcaacattacagagaacgtctacatcaaccttacatgcagctccattcacggttaccctgagcccaaaaagatgagtgtgctgctttag

SEQ ID NO: 217631 - DNA, 744 bp, synthetic construct
  misc_feature 1..744: note = Description of Artificial Sequence: Synthetic coding sequence
  source 1..744: mol_type = other DNA
atgggccgaacaagttttgacagcgacagctggacgctgagattgcacaatctccagattaaagacaaggggctctaccagtgtatcattcaccacaagaagccgacgggcatgattcgcatccatcagatgaattccgaactatcagttctggctaacttcagccagccagagattgtgccgatttctaacatcacggaaaacgtgtatatcaaccttacctgcagttccatccatggttatcccgaaccaaagaagatgagtgtgcttctgaggacaaaaaactctacaattgagtatgatggcgtaatgcagaagtcacaggacaacgtcacggaactctacgacgtctcaatctcactatctgtgagcttcccagatgttacatcgaacatgacgattttctgcattctcgagactgacaagacaagactattaagctcccccttttccatcgaactagaggacccgcagccacccccagaccacatcccgtggatcaccgccgtcctccccacagtaatcatttgtgtgatggtcttttgtttaattctgtggaagtggaagaaaaaaaagcgccctagaaatagctacaaatgtggaacaaacacaatggagagggaagagtccgaacagacaaaaaagagagaaaagattcacatcccggagaggtctgatgaggctcagcgcgtgttcaagagtagtaaaacaagctcatgcgacaagtctgatacctgcttctag

SEQ ID NO: 217632 - DNA, 654 bp, synthetic construct
  misc_feature 1..654: note = Description of Artificial Sequence: Synthetic coding sequence
  source 1..654: mol_type = other DNA
atggacccgcagtgcaccatgggcctcagtaatattctgtttgtgatggcatttcttctgtccgccaacttcagtcagcccgagattgtcccaatctccaatattactgagaacgtgtatattaatctgacctgttcatctatacacggatacccagagcccaaaaagatgtctgtgcttttacgtacaaaaaactcaacgattgagtacgacggcgttatgcagaagagtcaagacaacgtgaccgaactttacgacgtctccatctccctctccgtgtctttccctgatgtgacaagtaacatgaccatattttgtatcctcgagacagacaaaacccggctcctcagctctcccttctctatcgagctggaggatccccagcctccccctgaccacattccatggattacggccgtactgcccactgttataatttgcgtcatggttttctgtctgattctctggaaatggaaaaaaaagaaacgtcctcgcaactcttacaagtgcgggacaaataccatggagagggaagaaagtgaacagactaagaagcgcgaaaagatccatattccggaacggtcggacgaggcacagagagtgtttaagtccagcaaaacctcctcttgtgacaagagcgatacatgcttctag

SEQ ID NO: 217633 - DNA, 732 bp, synthetic construct
  misc_feature 1..732: note = Description of Artificial Sequence: Synthetic coding sequence
  source 1..732: mol_type = other DNA
atgcggccaagactctggctgctgctggccgctcagctaactgtgctgcacgggaattccgtcctgcagcagacaccagcatatatcaaggtgcagaccaacaaaatggttatgctgagttgcgaagccaaaatttcgctaagcaatatgaggatctactggttgagacagcgacaggccccatcgagtgactcgcaccacgagtttctggccctgtgggattccgccaagggtacgattcacggcgaggaagttgaacaggagaagatagccgtgttccgtgatgcctcccgttttattcttaacctcacctctgtgaagccagaggacagtggtatatacttttgcatgatcgttgggtccccagaacttactttcgggaagggtactcaactgagcgtggtggacttcctgccaactacagctcagcccaccaagaaatcaactcttaaaaagagagtttgtagactgccgcgtccagagactcagaaggggccactgtgtagcccaatcacactaggtcttctggttgctggggtgctcgtgctgcttgtcagtttgggagtggccattcacctctgctgtcgccgacgtcgcgctaggctgcggttcatgaaacagccacaaggggaaggtataagtggtacgtttgtgccccagtgtctgcatggttattactcaaacactaccacctcccaaaaactgctcaatccatggattcttaagacctag

SEQ ID NO: 217634 - DNA, 642 bp, synthetic construct
  misc_feature 1..642: note = Description of Artificial Sequence: Synthetic coding sequence
  source 1..642: mol_type = other DNA
atgaggccaaggctctggctgctgctggcggctcagctgaccgttctgcacggcaattcagtcctgcagcagacccccgcatatatcaaggtccagactaataaaatggtgatgctctcctgtgaagcaaagatctccctctcgaacatgcggatatattggctgagacaacgccaagcaccctcctccgacagccaccacgaatttctagccttgtgggatagtgcaaaaggcaccatccacggcgaggaagtggaacaagaaaaaattgctgtgtttagagatgctagtaggttcatcctgaatctgactagcgtaaaacctgaagactctggcatctacttctgcatgatcgtaggctcaccagagctgacctttggcaaaggcacccagctgagcgtcgtggatttcctccctactacagcacaacccactaagaagagcacccttaaaaagcgtgtctgtcggctgccccgacccgagacccagaagggacgaagacgtcgcgcaaggctgaggttcatgaagcagccccagggtgaagggatttccgggacttttgttccacagtgcctgcacggctactatagcaacacaacaacgtcccagaaactgctgaacccttggatcctcaaaacctag

SEQ ID NO: 217635 - DNA, 633 bp, synthetic construct
  misc_feature 1..633: note = Description of Artificial Sequence: Synthetic coding sequence
  source 1..633: mol_type = other DNA
atgaggccccgattatggttgcttctggccgcacaactcaccgttcttcatggaaactcagtcctgcaacagaccccagcctacatcaaagtgcaaacaaataaaatggttatgctgtcatgcgaggccaagattagcctcagtaatatgcgaatttactggctgagacagcgccaggccccatcaagtgactcccaccatgaatttctcgcactgtgggacagcgcgaaaggtacaatccatggtgaggaagtcgaacaggagaagatcgctgtcttccgcgacgcctcccggtttattttgaatctgacttctgttaagccagaagattcaggaatttacttttgtatgatcgtcggttcacccgaattgacgtttggcaagggcacccagcttagtgttgtagacttcctgcctactaccgcccagccaacaaaaaagtctaccttgaaaaagagggtgtgcaggttgcccaggcccgaaactcagaaaggaccgttgtgtagtccaattacactcggcctgttggtggccggtgtcctggtgctgctggtttcccttggggtggctattcacttgtgttgtagaagacggagggccaggcttaggttcatgaagcaattctacaagtag

SEQ ID NO: 217636 - DNA, 666 bp, synthetic construct
  misc_feature 1..666: note = Description of Artificial Sequence: Synthetic coding sequence
  source 1..666: mol_type = other DNA
atgcggcctaggctctggctactgcttgccgctcaactgacggtactacacggcaactccgtactccagcagacacccgcttatatcaaagttcagaccaacaaaatggttatgctaagttgtgaagctaagatctctctgtctaatatgcggatatactggctccggcagcggcaggcgcctagttcagattctcatcatgaattcttggctctctgggacagcgccaaaggtacaatccacggcgaggaagtcgaacaggaaaagatcgcggtgtttcgggacgcgagccggttcatccttaatctgacttccgtgaaaccagaggatagcggcatttacttctgcatgatcgtggggtcacctgagctgacattcggaaaaggcacgcagctgagcgttgtcgatttcctccccacgaccgcgcagcccactaaaaaaagcaccctgaaaaagcgggtctgtcgactgcccaggcccgaaacacaaaagggaccgctctgcagcccaatcaccctcggtctgttagtggcaggggtcctggtattactcgtgtcattaggggttgccattcacttgtgctgccgcaggcggcgtgctagactccggttcatgaagcaacttaggttacatcccctggaaaaatgttctagaatggactattag

SEQ ID NO: 217637 - DNA, 597 bp, synthetic construct
  misc_feature 1..597: note = Description of Artificial Sequence: Synthetic coding sequence
  source 1..597: mol_type = other DNA
atgcggcctagactctggcttttgttggccgcacaactgaccgtactgcatggcaattccgtgctccagcagacgccagcctacatcaaggtccaaactaataagatggtgatgttgagttgtgaggctaagatcagcctctcaaatatgcgcatctattggctgaggcaacggcaggcgccatcttctgactcccaccacgagtttcttgccctttgggatagtgctaaggggacaatccatggggaggaagtggaacaagagaaaatcgccgtgttccgtgatgccagccggtttattttgaacttaactagcgtcaaacctgaagactccggtatctatttttgcatgatcgtcggatctcctgagcttactttcgggaagggcacgcagctgagcgtggtcgattttctgccaacgaccgctcagccaactaagaagagcacacttaagaagagggtgtgcagacttccacgaccagagacccagaagggcctcaagggcaaggtgtatcaagaacccttatcacccaacgcctgtatggacacaaccgccatactgcagcctcacaggagctgcctaacccacggaagctag

SEQ ID NO: 217638 - DNA, 93 bp, synthetic construct
  misc_feature 1..93: note = Description of Artificial Sequence: Synthetic coding sequence
  source 1..93: mol_type = other DNA
atgcggcctaggctctggttgctgctggccgctcagctgacaggcagaagacgccgagcgaggttacgattcatgaagcagctgtacaaatag

SEQ ID NO: 217639 - DNA, 624 bp, synthetic construct
  misc_feature 1..624: note = Description of Artificial Sequence: Synthetic coding sequence
  source 1..624: mol_type = other DNA
atgcggccaaggctttggctgctgctggcggcacagctcaccgtgctgcacggaaattccgttctacagcaaactcccgcttatatcaaggttcagaccaacaaaatggtcatgctttcctgcgaggccaagatctctttaagcaacatgagaatttattggctgcgacagagacaggcccctagctccgattcacatcacgagttcctcgctctgtgggacagcgccaagggaactattcatggtgaagaggtggaacaggagaagattgctgtgttcagggacgcttctcgtttcatacttaatctgactagcgtgaagcccgaagacagcgggatttatttctgtatgattgtgggaagccccgagctgacttttgggaaaggaactcagttaagcgtcgtggactttctccccaccaccgcccagcccactaagaagtccactttgaaaaagagggtttgcaggctaccacggccagaaacacagaaggggcctctatgcagcccaattacgttgggcctgttggttgcgggagtcctggtcttgttggtgtctctgggagtcgccattcatctgtgctgtcgacgcaggcgagccagattgaggtttatgaaacagtag

SEQ ID NO: 217640 - DNA, 153 bp, synthetic construct
  misc_feature 1..153: note = Description of Artificial Sequence: Synthetic coding sequence
  source 1..153: mol_type = other DNA
gagcgcggaagggagagaagagtcaagttgcgcttctcagctcggcctcagggagaaggaatcagcggaaccttcgttccacagtgtctacacgggtactactccaatactacaacatctcaaaagctgctaaacccctggatcctcaaatag

SEQ ID NO: 217641 - DNA, 687 bp, synthetic construct
  misc_feature 1..687: note = Description of Artificial Sequence: Synthetic coding sequence
  source 1..687: mol_type = other DNA
atgcccgtgaagggcggaaccaaatgcattaagtacctgctcttcggatttaatttcattttttggttagccggtattgcggtcctggcaataggactctggttgagatttgattcccagacgaagtccatctttgagcaggaaaccaataataacaacagtagcttctacaccggtgtgtacattctcatcggagccggagccctgatgatgctggtgggcttcctgggttgctgcggcgcagtacaggaatcacaatgcatgctgggtctattcttcggttttctcctggtaatcttcgctatcgaaattgccgcagcaatttggggttacagccataaggacgaggtgataaaagaagtccaggagttttataaggacacttacaacaagctaaagacaaaagacgaaccacagagagaaacactgaaagccattcattatgccctgaattgctgcggacttgctgggggagtcgagcagtttatcagtgatatatgcccgaagaaggatgtactggaaacatttaccgtaaaaagctgtccagacgcaatcaaagaagtcttcgacaacaagttccatatcatcggcgcagtcggaattggaatcgcagttgtgatgatctttggcatgatcttctccatgatactttgctgtgcgattcgaagaaatagggaaatggtgtag

SEQ ID NO: 217642 - DNA, 480 bp, synthetic construct
  misc_feature 1..480: note = Description of Artificial Sequence: Synthetic coding sequence
  source 1..480: mol_type = other DNA
atgatgctcgtaggcttcctgggctgctgcggagcagtgcaggagagccaatgtatgcttgggttgtttttcggcttccttctggtaatcttcgctattgaaattgctgcagccatctggggctacagccataaggacgaggtcattaaagaagtccaggagttctataaggatacatataataaattgaagacgaaagacgaacctcagcgcgaaacgttgaaggctattcactacgcactgaactgttgtggcctagctggcggtgtggagcagttcattagcgacatttgtccaaagaaagacgtgctggaaaccttcaccgtgaaatcctgtcccgacgcaatcaaagaagtcttcgacaacaagttccacattattggtgccgttggcattgggatagcggtggtgatgatatttggcatgatttttagtatgatcctgtgctgcgccatcagaaggaacagggaaatggtgtag

SEQ ID NO: 217643 - DNA, 687 bp, synthetic construct
  misc_feature 1..687: note = Description of Artificial Sequence: Synthetic coding sequence
  source 1..687: mol_type = other DNA
atgcctgtgaagggtggtacaaagtgtatcaaatacttgctcttcggttttaacttcatcttttggttagctggcatcgcagtcttagccattggcctgtggcttcggttcgactctcaaactaagagtattttcgaacaagagactaacaataacaactctagtttttatactggtgtgtacatcctgattggagcgggagccctgatgatgctcgtggggttcctagggtgctgtggcgctgtgcaagagagccagtgcatgcttggcctcttcttcggatttttactcgttatcttcgccattgaaattgctgcagctatttggggctatagccataaggatgaggtgatcaaggaagtgcaggaattctacaaagacacatacaataaactgaaaaccaaagatgagccgcagagggagactttaaaggcaattcattatgccttaaattgctgcggcttagctggcggtgtggagcagtttatctcagatatctgcccgaagaaagatgttttagaaacgttcacggtcaagagttgtcccgacgccattaaagaagtgtttgacaacaagttccacatcatcggtgcagtgggcatcggaattgctgtagtgatgatctttggcatgattttcagcatgatcctttgctgcgcgattcgtcgtaaccgggagatggtgtag

SEQ ID NO: 217644 - DNA, 687 bp, synthetic construct
  misc_feature 1..687: note = Description of Artificial Sequence: Synthetic coding sequence
  source 1..687: mol_type = other DNA
atgccagtgaaaggcggtaccaagtgcatcaagtacctgctatttggctttaacttcatcttttggcttgctggaattgccgtcctcgccattgggctgtggctgcggtttgattcacaaaccaagagcatcttcgagcaggagacgaataacaataacagttctttttacaccggcgtctatatactaataggggctggagctctgatgatgcttgtaggctttctgggatgctgcggcgctgtccaggaatcacagtgcatgctgggactcgcaaccaaacggacgatgttcccccctttcctagaggaccatgtgtgttttttctcactgaacccccagtttttcggattcctcctggtcattttcgcaattgaaatagccgctgctatctggggctattcacacaaagacgaggtaattaaggaagtgcaggaattctataaagacacttacaataagctcaagaccaaagatgagccccaaagggaaacgctgaaggccattcactatgccttaaactgttgtggactcgccggaggcgtagaacagttcatctcagacatatgtccgaaaaaggatgtactcgagaccttcacagtgaagtcttgcccagatgccattaaagaagtcttcgacaacaaattccatatcatcggagctgtggggatcggcatcgcagtttag

SEQ ID NO: 217645 - DNA, 546 bp, synthetic construct
  misc_feature 1..546: note = Description of Artificial Sequence: Synthetic coding sequence
  source 1..546: mol_type = other DNA
atgcctgtaaagggtggaacaaaatgcattaaatatctgctcttcggctttaacttcattttctggctggccggaatcgcggtgctcgcaatcgggctttggttacggttcgattcgcagaccaaaagtatctttgaacaagaaactaacaataacaactcctcattttacaccggcgtgtacattctaatcggtgccggtgcccttatgatgttggtcggatttcttggatgctgtggggcagtgcaggaaagccagtgtatgctaggactcttctttggctttctcttagtgatattcgccatagaaatcgcggctgcaatttggggctacagccataaagatgaggtgatcaaagaggtccaggagttttataaggatacctataataagctgaaaactaaggacgagccccagagggagaccctcaaagccattcactacgcgctcaatctgtggttcggctgggggcgtggcaccgtgtatttgagacacttaccccaggagggcagaaccaggaatctacatagggaggtcctgagttag

SEQ ID NO: 217646 - DNA, 426 bp, synthetic construct
  misc_feature 1..426: note = Description of Artificial Sequence: Synthetic coding sequence
  source 1..426: mol_type = other DNA
atgctggggttgttctttggattcctgcttgtgatctttgcaattgagattgccgcagccatctgggggtacagtcacaaagacgaagtcattaaggaggtgcaggaattctacaaggacacgtacaataagttaaagaccaaagacgagccgcagagggagaccctgaaggcaatccactacgccctaaactgctgcggccttgcgggtggggtagagcagttcatctcagatatttgcccaaaaaaggacgtactggagacgttcaccgtcaaatcctgcccagacgctataaaggaagtctttgacaataagttccacatcatcggcgctgtcggaattggcatcgcagtcgttatgattttcggtatgatttttagcatgatcctgtgttgcgcaattaggagaaatagagaaatggtctag

SEQ ID NO: 217647 - DNA, 1758 bp, synthetic construct
  misc_feature 1..1758: note = Description of Artificial Sequence: Synthetic coding sequence
  source 1..1758: mol_type = other DNA
atggaaaaaaagtggaagtactgtgcagtgtactatataatccagattcactttgtcaaaggagtgtgggaaaagacagtgaatacagaggaaaatgtttatgctaccctggggagcgatgttaacctgacatgtcagacccagaccgtcggcttcttcgtgcagatgcagtggtctaaggtcacaaacaaaattgacttgatcgcggtgtaccacccacaatacggtttctactgtgcctacggacgtccttgtgagagcctggtgacatttaccgagacacctgaaaacgggtccaaatggaccttgcaccttaggaatatgagctgttcagtgagcgggcgatatgagtgcatgctcgtgctataccctgagggaattcagacaaagatctacaacctgctcattcagacacacgtaaccgccgatgaatggaactccaaccacaccatcgaaatcgaaatcaaccagacgctggaaattccctgttttcagaactccagcagcaaaatttcaagtgagtttacatacgcctggtccgtcgaaaactcatccaccgattcctgggtgctgctcagcaaaggaataaaggaggataacggcacacaggaaaccctcatctcgcaaaaccatctgatcagtaactcaacccttttaaaggatagggtcaagttgggtaccgattaccgcctacacctgtcccccgtgcagatattcgacgatgggcgaaaattttcatgccacattagagtcggccctaacaagatccttcgttcaagcacaaccgtgaaagtctttgccaagccggaaattccagttatagtggaaaacaattcaaccgatgtgcttgtcgaaagacggtttacatgcctactgaagaacgtgtttcctaaagccaatataacttggttcattgatggaagctttctgcacgacgaaaaggaaggcatctatatcaccaatgaggagcgcaagggcaaagacggatttctggagttaaagagcgttctcacgcgtgtgcatagcaataaacccgcacagtcagacaatctgacaatctggtgtatggcattatcacccgtacccggtaataaggtgtggaatatcagctctgagaaaattacatttttgctgggctcggaaattagtagtaccgaccccccactctctgtgaccgaatcgaccctggatactcagccgagtcctgcctctagcgtgagccctgcccgttacccagctacatcatccgtaactctggtggatgtgagtgcactgcgtccaaatacaactcctcagcccagcaatagcagcatgactactcgtggctttaattacccatggacatcctctggtacagacaccaagaagtccgtctcaaggatcccttctgagacctattcttctagcccatccggtgccggatctacgttacacgacaacgtgtttaccagtacggctcgagccttttccgaagtccccacgactgccaatgggtccacaaagaccaatcacgtccacatcactggcatcgtagttaataagccaaaggacgggatgtcctggcctgttatagtcgcagcccttctgttctgttgcatgattctatttggccttggtgtgagaaaatggtgtcagtatcagaaggagatcatggaacgccctccaccctttaagccccctccaccacctatcaaatatacgtgcatccaagaacccaacgaaagtgatctcccttaccacgagatggagacgctgtag

SEQ ID NO: 217648 - DNA, 1710 bp, synthetic construct
  misc_feature 1..1710: note = Description of Artificial Sequence: Synthetic coding sequence
  source 1..1710: mol_type = other DNA
atggagaagaaatggaagtattgcgccgtctactacattatccaaatccactttgtaaagggagtgtgggagaaaactgttaataccgaggagaacgtgtacgctacactcgggagtgacgtcaatctgacctgccagacccagaccgtggggttctttgttcagatgcaatggtcgaaggtgacaaacaaaatcgacctgatcgctgtgtatcacccccaatacggattttactgcgcctatggacgaccctgcgagtcgcttgttaccttcaccgaaacccctgagaatggatcaaaatggactctgcaccttaggaatatgagttgcagcgtttctggacgatatgaatgcatgctcgtgctctatcccgaaggcatccagacaaaaatctacaacctccttatccaaacccacgtgacagctgacgaatggaatagtaatcacaccattgaaatcgagattaatcaaacactggaaatcccctgttttcagaattcttcgtccaagatctctagtgagtttacttacgcctggagcgtcgaggacaacgggacccaggagactctgatcagtcagaaccacctcatttccaatagcacactgctgaaggatcgcgtgaagctgggaaccgattaccgacttcacctctcacccgtacaaatcttcgatgacggtagaaaattcagctgtcacatcagggtaggccctaataagattctgcgatcatctactacggttaaggtgtttgcgaagcccgaaatcccagtaattgttgagaacaactccactgacgtgctcgtggagcgtcggtttacctgcctgctgaagaacgtgtttcccaaagcaaatatcacgtggttcattgatggtagttttttgcacgacgaaaaagagggcatttatatcactaatgaagagcgcaagggcaaagatggctttttagagctcaaaagcgttttgacgagagttcattctaataaacccgcacagtcggataacctcactatatggtgtatggccttaagtccggtacctgggaataaggtatggaatattagttcagagaagatcactttccttctgggcagtgaaatcagctccaccgaccccccactttctgtaacagaaagtaccctggacacgcaaccgagtccagcctcttccgtctcccctgctcggtatccagccacttccagcgtgaccctggtggacgttagtgcactgcgaccaaacactaccccacagccatccaattccagcatgacgacacgaggtttcaattatccatggacaagctcagggacggatacgaagaagtcagtgtccaggataccttcagaaacctactcaagcagcccctcaggcgctgggtcaaccctgcatgataatgtgttcacgtcaaccgcccgagcctttagcgaggtccccacgactgccaacggcagcacaaagacaaaccatgttcatatcacgggtattgtggtgaataaacctaaggacggcatgtcttggcctgtcatagtcgccgcactgcttttctgctgcatgatccttttcggcctcggagtgagaaagtggtgccaatatcagaaggaaatcatggaaagacccccacctttcaagccaccacctccccctattaagtatacctgtattcaggagccaaacgagagcgacctgccataccacgaaatggagacgttatag

SEQ ID NO: 217649 - DNA, 2508 bp, synthetic construct
  misc_feature 1..2508: note = Description of Artificial Sequence: Synthetic coding sequence
  source 1..2508: mol_type = other DNA
atgggaggtagagtgtttctcgccttttgcgtatggctgaccctgccgggtgctgagacacaggatagcagaggctgcgcacgctggtgtccccagaactcttcctgtgttaatgctacggcctgcaggtgcaaccccggattttcgtccttttctgaaattataaccacaccaacggaaacctgcgatgatattaacgaatgtgccaccccctccaaggtgtcatgtgggaaattctcagattgttggaataccgagggctcttatgattgtgtgtgttcacctgggtatgagccggtgtcaggagctaaaacctttaaaaatgaatcagaaaacacctgtcaagacgtggacgaatgccaacagaatccacggctgtgtaaatcctatggaacctgtgttaatacactcgggagctatacctgtcagtgcctgcccggattcaaattcatccctgaggatcctaaagtctgtaccgatgtgaatgagtgcacctcaggtcagaacccctgccatagttccacgcactgtctgaacaacgtcggcagctatcagtgtcgctgcaggcctggctggcagcctattcccggatctccaaacgggccaaacaacactgtgtgtgaagacgtggacgaatgcagcagcgggcaacaccaatgcgatagctctactgtgtgtttcaacaccgtggggagttacagttgccggtgccgtcccggatggaaacccaggcacgggatcccgaacaaccagaaagataccgtgtgcgaagacatgacattttcaacatggacgccaccgccaggggtgcactctcaaacactgagtaggttcttcgataaggtgcaggatctaggccgagatagcaaaacgtctagcgcagaagtaactatacaaaacgtcatcaagttggtggacgagcttatggaggccccaggagacgtggaggcccttgcaccccctgtgaggcacctgatagctactcagctgctcagtaacctggaagatattatgaggatcttggccaagtccctaccgaaagggcctttcacgtatatctccccttcaaacactgaactaaccctcatgattcaagagcggggagataaaaacgtcacgatgggtcagagctctgctagaatgaagctgaactgggccgtcgccgctggagctgaggatccaggaccggcagtagccggtatactgtccatacaaaatatgaccacactgcttgccaatgcgtctttaaacctgcattccaaaaagcaggcggagttagaagagatctacgagtcttcaatccgcggagtccagttacggaggctgagcgcagttaactccatttttctttcacataataatactaaggaactgaatagtcctatcctattcgcattctcccatctcgagtcaagcgacggagaagccggtagagatcctccggcaaaggacgtcatgccgggtccgagacaggaactactttgcgcattctggaagtctgacagcgatcggggtgggcattgggctacagaagggtgccaagtgcttgggtccaagaacggctccaccacatgtcaatgttcacatctaagtagctttgcaattttgatggcccactatgatgtcgaagattggaagttgactctgattaccagggttggcttggctcttagtctgttttgtttgctgctgtgcatcctcacgtttctcctggttcggccaatccagggaagcagaacaacaatccatctacatttgtgtatctgtctgttcgtcggctccacaattttcctggcgggaattgaaaatgaggggggacaggtaggcctgaggtgccgattggtggcgggtctcctgcattactgttttttggctgcattctgctggatgagcctggagggcctcgaattgtactttcttgtggtgcgcgtcttccaggggcaaggcctgtccacacggtggctgtgcttgattgggtatggcgtgcctctgctgattgttggtgtcagcgctgcaatttattccaaaggttatggaagacctagatactgttggttagactttgagcaaggctttctttggagtttcttaggtcctgtgacctttattatcctgtgtaatgctgtcatctttgtcacaacagtatggaagttaactcagaagttcagtgagataaatcccgatatgaaaaaacttaagaaggcacgagcactgacaattaccgccatagcgcagttatttctccttgggtgtacctgggtcttcggtctgttcattttcgatgacaggtcgttggttctgacctacgtgttcacaatactcaattgtttgcaaggcgctttcctgtacctgcttcactgtctgcttaataagaaagttcgcgaggagtatcgcaagtgggcttgtctggttgctgggggaagtaaatattcggagttcacttcaaccacctctggcacaggccacaaccaaacccgcgctctcagagcctccgagtctggtatctag

SEQ ID NO: 217650 - DNA, 2361 bp, synthetic construct
  misc_feature 1..2361: note = Description of Artificial Sequence: Synthetic coding sequence
  source 1..2361: mol_type = other DNA
atgggaggcagagtgttcctggctttttgcgtctggctgaccctgcctggggctgagacacaggattctcggggatgcgccagatggtgcccccagaatagtagttgcgtcaacgcaactgcttgtcgctgtaatcccggtttctcttccttttcagaaatcataactacgccaaccgaaacatgcgatgatatcaacgagtgcgctactccctccaaggtgagttgcgggaagttctccgactgttggaacacagaaggcagctacgattgtgtctgctctcccggatacgagcccgtttccggagccaaaacattcaagaatgagtccgaaaacacttgtcaagatgtggacgagtgtcagcagaatccacgactgtgtaagtcctatggcacctgcgtgaacacactgggatcatatacatgccaatgtcttccaggcttcaaattcataccggaagatcccaaagtgtgcacagatgtggacgaatgtagcagtggccagcaccagtgtgattcatctacggtctgttttaatactgtcggatcatactcctgccggtgcagacccggatggaagccaaggcatggcattcccaacaatcaaaaagacacagtgtgcgaggacatgaccttttctacgtggactcccccaccaggcgtgcactcacagacacttagccgcttcttcgacaaggtccaagatctgggacgcgacagcaaaacatcctccgccgaggtgacaatacaaaatgtaatcaagctcgttgacgagctgatggaggcacctggggatgtcgaagcattggcgcctcccgttagacacctgatcgccacccaactgctgtcaaacctagaggacatcatgcgcatcctggcaaagtctctgccaaagggcccttttacctatatttctccttctaatacggaactaacgctgatgatacaggagcgcggagataagaatgtgaccatgggacagtctagtgctcggatgaaactaaactgggccgtggcagctggcgcagaagatcccggtcccgcagtggctggaatactgtcgattcagaatatgacaacgctgctggctaacgcaagtctgaatcttcatagcaaaaaacaagccgaactagaggagatttacgagtcttccatccggggagttcaactgaggcgactcagcgccgtcaattcaatttttttgtctcataataacactaaagaattgaactcccctatcctttttgctttctctcacctggagtcaagtgacggcgaggcgggacgagatcctccggcaaaggacgtcatgcccggacccagacaggagcttttatgcgctttttggaagagcgactcagaccgtggcggacactgggctacagagggctgtcaggtgctggggtccaaaaacggtagcaccacctgtcagtgtagtcacctaagcagttttgcgatcctgatggcgcactatgacgtagaggattggaagctgacactgattactcgcgtcggattagcattgtctttattttgccttctactttgtattctcactttcctgctcgtccgccctatccagggaagtagaacgacgattcacttacacctttgtatctgcctcttcgtcgggagcacaattttcctcgctggtatcgagaacgaggggggtcaggtgggcctgcgctgccgcctggtcgcgggtctcctgcactactgctttctcgctgcattctgctggatgtctctagagggactcgagctgtattttctggttgtgcgtgtgttccagggccagggtttgagcaccaggtggttgtgtttgatagggtacggggtccccctcctgatcgtgggagtttcggccgctatttactctaaaggttacggcagacctcggtactgctggctggatttcgaacaggggtttctctggtctttcctgggcccagtgacattcatcatcttatgtaacgccgttatctttgtgactactgtgtggaagttgactcagaagttctccgagattaacccggacatgaagaagttgaagaaagccagagctcttactatcactgccattgctcaactcttcctgctgggctgcacatgggtgtttggattgtttatctttgatgacagaagtttggtgctcacatacgtctttactattttgaactgcctgcaaggagcttttctgtacctcctccactgtctcctcaacaaaaaggtgcgggaagagtatagaaagtgggcctgtctggtagcagggggtagcaaatactcggaatttaccagtaccacttcaggtacaggccacaaccaaacacgcgctctaagagcatccgagtccggcatttag

SEQ ID NO: 217651 - DNA, 2229 bp, synthetic construct
  misc_feature 1..2229: note = Description of Artificial Sequence: Synthetic coding sequence
  source 1..2229: mol_type = other DNA
atgggagggagggtattcctcgctttctgtgtttggctaacccttcccggagccgagacccaagacagcaggggctgcgcaaggtggtgtccccagaattcttcctgcgtgaatgccacagcctgtcgctgcaaccccggattttctagttttagtgagattataactacaccgactgaaacatgcgacgacattaacgagtgcgccactccctcaaaggtctcatgtggcaagttcagcgattgctggaatacagagggcagttatgattgcgtgtgctccccgggatacgagccagtgtctggagcaaaaactttcaagaacgaatctgaaaacacttgtcaagatgtggatgagtgttccagcggccagcaccaatgcgattcctcaacggtgtgtttcaacactgtcgggtcttatagttgccgttgtcgccctgggtggaaacctcgacacggaatacccaataatcaaaaggacacagtgtgtgaggacatgactttctctacctggactccacccccaggcgtgcattctcagactttatctagattcttcgacaaggtgcaggacctgggtcgcgactccaagacatccagcgcggaagtgacgatccagaacgtgataaagttagtggacgagttgatggaggcgccaggagacgtggaggccttggcccctcccgtgaggcacctgatagctacacagctgctgtctaaccttgaggacatcatgagaatcctggccaagtccctgcctaagggcccattcacgtacatttctcccagtaataccgagttgacactgatgattcaggaacgtggagacaagaatgtgacaatgggtcaaagctccgctcggatgaaattaaactgggcagtggccgcaggagccgaggatcccggaccggcagtcgccggaattctgagcattcagaatatgactactcttctggcaaacgcgtcactcaacctgcatagtaagaagcaagccgagctagaggaaatctacgagagttccattaggggtgtccaattgcggagactctccgctgttaactctatctttctgtctcataataacactaaagaactgaactcaccaatactgtttgctttttctcatctggaatcttcagacggcgaggctgggagggaccccccagcgaaggatgtgatgcccggtccacgacaggaactcctctgcgccttctggaagtcagactcggatcggggaggtcactgggccaccgaagggtgtcaggtgttggggtctaagaacggctcaacaacatgccagtgtagccatctcagctcctttgccattctgatggcacactacgacgtggaagactggaaattgactctcatcacgcgcgtcggcctcgcccttagcctcttctgtctgctgctctgtatactgacattcctattggtgcggcctatccagggaagccgaacaaccatccacctgcatctgtgcatctgtctgttcgtcggtagtacgatcttcctcgctggaattgagaatgaaggcggtcaggtgggtctgcggtgcaggctggtggctgggctcctccattattgcttccttgcagctttttgctggatgtccctcgagggtctcgagctgtactttctggttgtgagggtttttcaagggcagggcctctcaacacgctggttatgccttattggctatggcgtgccgttgctcatcgttggagtcagcgcagccatctattcgaaaggctacggacgacctagatactgctggctggacttcgagcagggatttttgtggtcattcctcggccctgttaccttcatcattctctgtaacgctgttattttcgttactacggtctggaaactcacccaaaaattctcagagatcaatcccgacatgaaaaagttaaaaaaagcacgcgctctgacaatcacagccattgcgcagcttttcctactcggttgcacctgggtgttcggacttttcatattcgatgatcgctcacttgtgctaacgtacgtttttacgatcctgaactgtttgcagggggcattcctgtacctgctgcattgtctgttaaataagaaggtgcgcgaggaatatcggaaatgggcctgcctggtggccggaggttccaagtactccgagtttacatctaccacttccgggacaggacacaaccagaccagggccttgcgtgcctcagagagcggtatctag

SEQ ID NO: 217652 - DNA, 2358 bp, synthetic construct
  misc_feature 1..2358: note = Description of Artificial Sequence: Synthetic coding sequence
  source 1..2358: mol_type = other DNA
ggaggtcgaattatgagagcgttctgcgtctggttgacactcccaggcgcagaaacgcaagactcccggggttgcgcaaggtggtgcccgcagaactcaagctgtgtgaatgccaccgcttgtcgctgcaatccaggctttagttcgttctctgagataatcaccactcccaccgaaacctgcgacgacatcaatgagtgtgctacaccttctaaggtgtcgtgtgggaagttcagcgattgctggaatacagagggtagctacgattgtgtgtgcagccccggatatgaacctgtgtccggcgctaagacgttcaagaatgaaagtgagaacacttgccaggatgttgacgagtgtcagcagaatcctagactctgtaagtcttacggaacctgcgtcaatactctgggtagctatacttgtcagtgcttgcccggattcaagtttattcctgaggatcctaaagtgtgcactgatgtcgatgaatgtagtagtggacagcatcagtgtgattcgagcactgtttgtttcaatacggtgggtagttactcgtgccgctgcagacccggatggaagccgaggcacggaatccctaataatcagaaggatactgtgtgtgaggatatgacattcagcacatggacaccccctccaggggtacactctcagactctgtcacgtttcttcgacaaggtgcaagatctcggacgggattctaagacgagttcagctgaggtgaccattcaaaacgtgatcaaactggtagatgagctaatggaggccccaggtgatgttgaggcactggctcctccagtccgtcatctgatagcaacacagctgctgtccaatctggaggacatcatgaggatccttgctaaaagtctcccaaagggaccttttacatacatctctcccagcaacactgagctgactctgatgatccaggagagaggggacaagaatgtcacaatgggacagagcagcgcaagaatgaaactcaactgggctgttgcagctggggctgaggacccagggcctgccgtggccggtatattgtccatccagaacatgaccacgctcctggctaatgccagcctcaatcttcactcaaagaaacaagctgagctggaagagatctacgagagctcaataaggggcgtccagctccgcagactaagcgccgtgaattccatattcctctcgcacaataacacaaaggagctcaactccccaatactttttgctttctcacacctggagtcttcggatggcgaggcaggcagagacccccctgccaaagacgtgatgccaggaccgagacaagagcttctctgcgctttttggaaatccgacagtgacagaggaggtcattgggctacagaggggtgccaagtgttgggaagtaagaatggcagtactacttgccagtgttcccacctctcgtctttcgccattctgatggctcattatgatgtggaggactggaaactcacactgatcacacgcgtgggcctcgccctctccttgttctgcctgctgctgtgtatactgacctttcttttagtccggccaatccaggggtccaggacaactatccatttgcatttgtgcatctgcttgtttgtgggatccaccatttttctcgcaggaattgagaacgaaggaggccaggtgggcttacgctgcaggctcgtggccggtctgttgcactactgcttcctggccgctttctgctggatgagtctggagggactagagttgtattttcttgtggttcgcgtcttccaggggcaggggttgtccacccgttggctgtgtctgattgggtatggcgtcccactgttgattgtcggggtgagcgcagccatttacagcaagggctatgggagaccaaggtactgttggctggattttgagcaaggcttcctatggagctttctcggaccagtgactttcattatcctgtgtaacgccgtgatcttcgtaaccacagtgtggaagcttactcaaaagtttagtgagattaatccggatatgaaaaagctgaagaaggccagggcgctgacaataaccgctatcgcacagctattcctgttgggatgcacttgggttttcgggctattcatcttcgacgacagatcccttgtgctgacatacgtgttcactatcctcaattgcctccagggcgcattcttatatctcctgcactgtctgctgaataaaaaagtgcgagaggagtaccggaagtgggcttgtttagtggccggtggctctaagtatagcgaattcacatccactacttccggtactggacacaaccagaccagggcgctgagagccagcgagtccggaatttag

SEQ ID NO: 217653 - DNA, 297 bp, synthetic construct
  misc_feature 1..297: note = Description of Artificial Sequence: Synthetic coding sequence
  source 1..297: mol_type = other DNA
atgagcgtgagacttcacgttccatcgggtagtcgcggatcagaattatccgcgttgatacaggccatcggagcatccacctctgggaaacccaaatgcttcgtctgcatcctaagaagcggtctgagcgtggcgctgtctctgagcgtgtactttctactgctatttagcagaactcgcggaggtggacatggagaaccaccggagtgtcagcgcagagcatcttgctccgcgtattcattcagggagattgaagattgcaggcagaagcagcctcgtagatggcagcaaggatag

SEQ ID NO: 217654 - DNA, 231 bp, synthetic construct
  misc_feature 1..231: note = Description of Artificial Sequence: Synthetic coding sequence
  source 1..231: mol_type = other DNA
atggctcgcggagctgcgttagctctgctcttattcggcctgctgggagtgctggttgccgcacccggttttggtgacctgaggctccaagcagcaaggggaggcaggccaggcgtggcctgtcacagtcacgccctgaggcccggtcccaaatttgggatcgcccgatcccttcgtccaggatggtggggtgaagggaaagaaaaacttgagaagaattttgaaccttag

SEQ ID NO: 217655 - DNA, 534 bp, synthetic construct
  misc_feature 1..534: note = Description of Artificial Sequence: Synthetic coding sequence
  source 1..534: mol_type = other DNA
atggctaggggcgctgcactggcactgctgcttttcggcttgctgggcgttctggtggccgctccagacggaggcttcgatctctccgatgcactgcctgataatgagaataagaaaccaaccgccatccccaagaagccctcagccggagatgacttcgacctcggggacgctgtagtggacggggagaacgatgaccccagacctccaaacccccctaaaccaatgcctaaccccaaccctaaccacccgtcatcatcgggaagtttttcggacgccgatcttgccgatggggttagtgggggtgagggcaagggcggatctgacgggggagggagtcaccggaaggagggcgaggaggccgacgctccaggcgtgattccaggcatcgtgggcgcagtcgttgtggcggttgctggggctattagtagctttatcgcctatcaaaaaaaaaagctgtgcttcaaagagaacggccagcttgcaggttcccttggtccatgcattggcatcagaagagaagctgacggctag

SEQ ID NO: 217656 - DNA, 510 bp, synthetic construct
  misc_feature 1..510: note = Description of Artificial Sequence: Synthetic coding sequence
  source 1..510: mol_type = other DNA
atggctagaggagccgctttagccttgttattgttcggactgctgggcgtccttgtcgccgctcccgacggtggttttgacctctccgacgccctgcccggagatgatttcgatcttggcgacgcggtagtggatggggagaatgatgatccacgccctccaaatcccccaaagcccatgcccaatccaaaccctaaccatccatcttcctcgggatctttttctgacgccgacctggcagatggagtgtctgggggagagggaaagggaggtagtgacggtggtggctcacatcggaaggagggcgaggaggccgatgcgccaggggtgatccccggaatcgtaggcgcagtggtggtggctgtggctggggcaattagttcattcattgcctaccagaagaagaagctgtgtttcaaggagaatgccgaacaaggcgaagttgatatggaatcccatagaaacgccaatgccgaacctgccgtacaacgcacactgctggaaaagtag

SEQ ID NO: 217657 - DNA, 558 bp, synthetic construct
  misc_feature 1..558: note = Description of Artificial Sequence: Synthetic coding sequence
  source 1..558: mol_type = other DNA
atggcacgcggtgccgctctcgcactgctcctgttcgggttattgggcgtactggttgccgctccggacggagggttcgatctcagcgatgccctgcccgataatgagaacaaaaaacccactgctatccctaaaaaaccttccgccggtgacgattttgacctaggagacgctgtggtggacggtgagaatgacgatcctcgccctcctaacccgcctaagcccatgcccaatcccaacccaaaccatccatctagtagtgggagcttctctgacgccgatctagcggacggagtgtctggcggagaaggtaagggaggttctgacggcggaggctctcaccgcaaggagggtgaagaagcagacgctccaggtgttatccctggcattgtgggtgccgttgtggtggccgtggcaggagcaatctcttcatttatagcataccagaagaagaagctttgttttaaggagaatgctgagcagggcgaggtggacatggagagccaccgtaacgcgaacgctgaacctgctgtgcagcggacgctgttagaaaagtag

SEQ ID NO: 217658 - DNA, 606 bp, synthetic construct
  misc_feature 1..606: note = Description of Artificial Sequence: Synthetic coding sequence
  source 1..606: mol_type = other DNA
agacgctggggacggcctgccggaactcccggagcttcatccctgcccggtcggacgcgatgcgcacacggtggcccaggtccagaggaggcacctactttcagccccacactgtttcttgagccatttcagagggagaagagcgcatttgttgttggggtggccaatagctacatgtggggcggactaggtagagacggcggatttgacctttccgatgcgctccctgacaatgagaacaaaaagcccactgccatacctaagaagccatcagcgggagacgatttcgaccttggagatgccgtcgtcgacggtgaaaacgacgaccctaggccccctaacccgcctaaaccaatgcctaacccgaatcccaaccacccaagcagcagcggctcctttagcgacgcagaccttgcagacggtgtgagtgggggtgaaggaaaaggagggagcgacgggggtgggtcccatcgaaaggagggggaggaggccgacgcccctggcgtgattccagggatcgtcggcgctgttgtcgtcgccgttgctggcgcaatctctagctttatcgcataccagaaaaaaaaattatgcttcaaagagaactag

SEQ ID NO: 217659 - DNA, 438 bp, synthetic construct
  misc_feature 1..438: note = Description of Artificial Sequence: Synthetic coding sequence
  source 1..438: mol_type = other DNA
atggtcgcttggaggagcgcgtttctcgtctgtcttgcctttagtctggctaccctggtgcaaaggggatcaggggatttcgacgatttcaacttggaagatgcggtaaaagagaccagtagcgtgaagcccgcactgggaatgtatcacaagctagacgggttaaaacagcagaattttatcctgagtctgttctggatgcttgaagtgttataccaaggtgtgggctgggccaccttttctcttaaggccctggggaagaatctgagtctgacctttccgacttccggaggctccaggtgtagcctggtctgtggttgcattacacctatcagcgcatccgtggtcacatggtgttcccccttctgtgtctcactgttgtcgttgacaaagatgctggtgagcggtttcaaagcacacctcgataatcccggatag

SEQ ID NO: 217660 - DNA, 573 bp, synthetic construct
  misc_feature 1..573: note = Description of Artificial Sequence: Synthetic coding sequence
  source 1..573: mol_type = other DNA
atggtcgcctggaggagtgcgttcttagtttgtctggcatttagcctggccaccctggtgcagcgcggatctggagatttcgatgattttaacctggaggatgctgtcaaggaaacctcttctgtaaagcgaaatgacttcgatctggctgatgcacttgacgatcgcaacgatagagatgatggcaggcgtaagccaatagccggaggtggcggattcagcgacaaagacctcgaggatatcgtgggtggtggggaatataagccagataagggcaagggggatggaagatatgggtctaatgacgatccaggctctggaatggttgcagaacccggtaccatcgcaggcgtcgcctcagccctcgctatggccctcatcggggctgtgtcttcctatatttcatatcagcaaaaaaagttttgttttagcatccagcaggggctcaatgcagattacgttaaaggagagaatctggaagcagtggtgtgtgaagaaccacaggtgaaatatagtacactgcacacccaaagcgcagaacctcccccacccccagagccggctcggatttag

SEQ ID NO: 217661 - DNA, 789 bp, synthetic construct
  misc_feature 1..789: note = Description of Artificial Sequence: Synthetic coding sequence
  source 1..789: mol_type = other DNA
atggttgcctggcggtctgcctttctggtctgcctcgccttctctctggctactctggtgcaacggggatcaggtgacttcgatgacttcaaccttgaggacgctgttaaggagacgtctagcgtcaaacaaccatgggaccacaccaccaccaccacaacaaatcgtcctggcaccacaagagcacctgctaagccccctggaagcggccttgatctggccgacgccctggatgaccaagatgacggaagaagaaagcccggaataggaggcagagagcggtggaaccatgtgaccacaacaactaaaaggcccgtgacgacacgtgcgcctgctaataccctgggaaatgacttcgatctcgccgacgcattggatgatcgcaacgaccgggatgatggtcgcagaaagcctatcgctgggggaggtggttttagcgacaaggacctggaggatattgtcggcggaggcgagtataaacctgacaagggaaaaggcgatggcagatacggctccaacgacgatccaggatccggtatggtggcagagccaggaactattgccggagtggcatctgccctggcgatggccctgattggagcggtttccagctacattagctatcagcagaagaagttctgttttagtattcagcagggtctgaacgctgactatgtgaagggcgagaacttagaagcagtcgtatgcgaagagccacaggtaaaatatagcaccctgcacactcagtccgccgagccccctcctcctccagaaccggctagaatctag

SEQ ID NO: 217662 - DNA, 474 bp, synthetic construct
  misc_feature 1..474: note = Description of Artificial Sequence: Synthetic coding sequence
  source 1..474: mol_type = other DNA
gagacaagctctgtcaagcagccttgggatcataccaccactacaacaactaacagacccggaaccactagagcgcctgccaagcccccagggagtggcctggaccttgccgacgccttggacgatcaagatgatggcagaaggaagccaggtataggtggacgggagagatggaaccatgtgaccacaactactaaaaggccagtgactaccagagcccctgccaatacacttggaaatgattttgatctggcagacgcccttgatgatagaaacgacagagatgatggcagacgcaagcccatcgcgggtggaggaggcttctcggataaggacctggaggatattgttggcggtggtgagtataagcccgataagggtaagggggatggccgatacggcagtaatgacgacccaggatctggcggtttcttgaaccccgaggctccagtaggccacgtaaaggggaagtag

SEQ ID NO: 217663 - DNA, 570 bp, synthetic construct
  misc_feature 1..570: note = Description of Artificial Sequence: Synthetic coding sequence
  source 1..570: mol_type = other DNA
atggtcgcctggcggtccgctttcctggtgtgtctggcgttctccctcgctaccctggtccagagaggtagcggagacttcgatgacttcaacctcgaggacgccgtgaaggaaacctctagtgtcaagcagccatgggaccatactaccaccacgaccaccaacagacctggcaccacgcgggctccagctaagccacctggatccggacttgatctcgccgacgcccttgatgatcaggatgacgggagacgaaaaccaggcattggtggccgtggcgatggtcgatatggttctaatgatgaccctggatccggcatggtagccgagcctgggacaatcgcaggggtggcatctgccctggccatggcactgatcggagctgtctcctcctacatcagctatcagcagaagaagttttgctttagtatccagcaagggttgaacgcggactacgtcaagggggaaaatctggaggctgtggtctgcgaggaaccgcaggtgaagtacagcacacttcatacccagtccgcagagccgccaccgcctccagagcctgcacgcatctag

SEQ ID NO: 217664 - DNA, 819 bp, synthetic construct
  misc_feature 1..819: note = Description of Artificial Sequence: Synthetic coding sequence
  source 1..819: mol_type = other DNA
atggttgcttggcgatccgcttttctggtatgcctggcttttagcctcgccaccctggtgcagagaggatccggggattttgatgacttcaatttagaagatgcagtgaaagaaactagttccgtcaaacaaccttgggaccacaccaccactacaacaaccaataggcccggaaccacaagggcccctgctaagcctcccggaccaacagagggctccgggctggacctggccgatgcattggatgatcaggatgatggaaggagaaaaccaggaattggcggaagggagaggtggaatcacgtgacgaccactactaaacgaccagtgactacaagggccccagccaacacacttgggaatgacttcgatctcgctgatgccctcgacgaccgtaacgacagggacgatggtaggagaaagccaatagcgggaggtggtggcttttccgacaaggacttggaagacattgtcggtggcggagagtacaagcctgataagggcaagggagatggcagatacggatctaacgacgatcctggttctgggatggtggcagaaccaggaacaatcgctggcgttgctagcgccctcgctatggccctgattggagctgttagctcttacatatcttaccagcagaagaagttctgtttttccatccaacacgctgcagccggacaggaaggtctcaacgccgattacgtaaaaggtgagaacctcgaggccgttgtgtgcgaggaaccacaagtcaagtactctactttgcacacgcagtctgcagaaccccctccacccccagagcctgccagaatatag

SEQ ID NO: 217665 - DNA, 642 bp, synthetic construct
  misc_feature 1..642: note = Description of Artificial Sequence: Synthetic coding sequence
  source 1..642: mol_type = other DNA
atggtcgcctggcggtcagcgttcctggtgtgcttagcattcagtctggcaacacttgtgcaaagaggctccggcgacttcgacgatttcaacctcgaggatgccgtgaaagagaccagcagcgttaaacaaagatggaaccatgtgaccaccacaactaaaagaccagtgactacccgggctccggctaatactctgggaaatgactttgacttggctgacgctctggacgatcgaaatgaccgagacgacggtcgcagaaagccaatcgctggcggtggcggattttccgacaaagatctcgaggacatcgtgggtggcggagagtataagcctgacaagggaaaaggcgacgggcgttacggctccaacgacgacccaggctcgggtatggtagcagaaccaggaacgattgcgggagtcgccagcgcgttggccatggctttgatcggggctgtctccagttacatttcctaccagcagaagaaattctgcttttcaattcagcagggactgaacgccgattatgtcaagggagagaacttagaggccgttgtttgcgaggaaccccaggtgaagtatagtacccttcacacccagtcagccgaacccccaccaccaccagaacccgctaggatatag

SEQ ID NO: 217666 - DNA, 1785 bp, synthetic construct
  misc_feature 1..1785: note = Description of Artificial Sequence: Synthetic coding sequence
  source 1..1785: mol_type = other DNA
atggctgccgagtcaggtgaactgatcggcgcttgtgagttcatgaaggaccgcctctactttgcaactttgcggaataggccgaaatctaccgttaatactcactatttttctatcgatgaagaacttgtgtacgagaacttttacgctgacttcggaccactcaatctagccatggtatatcgatattgctgtaaactgaataagaaactgaaatcatatagcctgtcacgcaagaaaattgtgcactacacctgctttgaccagcggaaaagagcaaacgcagcatttctgatcggcgcatatgctgtcatctatctgaagaagactcccgaggaggcgtatcgagcactgttgagcggctccaaccctccttatttaccatttagggacgccagcttcggcaactgtacctacaacctcaccatcctcgactgccttcaggggatcaggaagggactccagcacgggttttttgactttgagacctttgacgtggatgaatacgagcattatgaaagagtggaaaatggagacttcaactggattgtgcccggtaagttcctggctttctcaggtccgcatcctaaatctaagatcgagaatggctacccccttcatgcacccgaggcatactttccatattttaagaagcacaatgtgactgcggtcgtccgattgaacaaaaagatttatgaggccaagaggttcacagacgctggcttcgagcactacgatttattttttattgacggcagtacccccagcgataatattgtgcgaaggtttctcaacatttgtgagaatacggagggcgcaatcgccgttcattgtaaggccggattaggcagaacggggaccctgattgcctgttatgtgatgaaacattacaggttcacacatgccgaaattattgcgtggatacggatctgtcggccaggctctatcatcggtccccaacagcactttcttgaggagaaacaggctagtttgtgggtccagggtgatatctttcgatccaagttaaaaaatcgaccctccagtgagggatccatcaacaagatattatccggacttgatgacatgtccataggaggaaacctctccaaaacccagaacatggagcggtttggcgaggacaacctggaggacgatgacgtagaaatgaagaacggcattacgcagggtgacaaattgagagctcttaagagtcagcggcagccacggacatcgccttcctgtgcctttaggtcagatgacacaaagggccacccaagagcagtctcacagccttttaggctgagctcctctctgcaggggagcgctgtaactttgaagacaagtaagatggctctctccccaagtgcaactgctaagcgcatcaatagaacttcccttagtagcggagctacagtcaggagctttagcatcaacagcagacttgcctcttccttaggcaatcttaatgccgcaaccgacgaccccgaaaataaaaaaacaagttcctcctctaaagctggttttactgccagtccttttactaacctgctaaacggatcatctcagccaaccaccaggaactacccagagcttaataataaccagtataacagatcctctaactctaacggcggaaaccttaattcaccccctgggccacactctgctaaaaccgaagagcatacaacaatactgcgaccatcttatactgggttgagctccagttcagctaggttcctctcacggagtatcccatccctgcagagcgagtacgttcactactag

SEQ ID NO: 217667 - DNA, 1872 bp, synthetic construct
  misc_feature 1..1872: note = Description of Artificial Sequence: Synthetic coding sequence
  source 1..1872: mol_type = other DNA
atggccgcagagagcggagaactgatcggggcttgtgagtttatgaaagatcgcctgtactttgccactctccgcaacagacctaagagcactgttaacactcactacttcagtatcgacgaagagttggtgtacgagaacttttacgctgacttcggccctttgaaccttgccatggtctatagatactgttgcaaactgaataagaaacttaagtcctactctctttcccggaaaaaaatcgtccactatacctgctttgatcagcgcaagcgggctaacgcggcattcctgattggggcttacgcagtgatatacctgaaaaagacacctgaggaggcctacagagccctcctcagcgggtctaacccaccatatctaccatttagagacgcctccttcgggaactgcacatataacctcacaattctggactgtcttcaagggatccgaaagggtttgcaacatggattctttgatttcgaaacgttcgacgtggacgaatatgaacattacgagagagtggaaaacggggattttaactggatcgtcccaggcaagtttcttgccttttcagggccacaccctaaatccaaaatagaaaacggatacccccttcacgctccagaggcttattttccatacttcaagaaacacaacgtgactgcggtcgtcagactcaacaagaagatctatgaagccaagcgcttcaccgacgctggtttcgagcactatgatctttttttcatagacggctcgactcccagcgacaacatcgttcgccgtttccttaatatatgcgaaaacaccgagggagccatcgctgtccattgcaaggccggtctgggcagaactggtactttgatcgcctgctacgtgatgaagcattaccgcttcacccatgccgaaattattgcctggatcaggatttgtaggcccggatccattatcggaccccaacagcattttctcgaagagaaacaggcctccctgtgggtccagggcgatatctttagaagcaaattaaagaacagaccttctagcgaggggtctatcaataaaatcctgtcagggctggacgatatgtccattggaggcaatctgtcaaaaacacagaatatggaaagatttggggaggacaatttggaagatgacgacgtagaaatgaagaatggtatcacccagggcgacaaacttagggccctcaaatctcaacgccaacctcgcacgtctccatcctgtgcctttcgatcggacgatacaaaaggacaccccagagccgtcagccagccctttcgcctctccagttccctgcagggatccgcagttacattgaaaacatcaaagatggctctgagccccagcgctactgctaaacgcataaaccgcacctctctctcctctggggcaaccgtgcgatcattttcgatcaatagccgcctggccagcagcctaggtaacctgaacgctgccacggacgaccctgagaacaaaaaaacatcctcatcaagcaaggcagggttcactgcgagtccgtttaccaacctgcttaacgggtcttcacagccaactactcgtaactaccctgaacttaacaataaccagtacaatcgttcctctaatagtaacgggggaaatctgaatagcccacccggtcctcattccgccaaaaccgaggagcatactaccattcttaggccatcttacaccggcctttcctcttcctccgctcgcttcctgtcacggtccatccctgtctcagctcagacgcccccacctggaccccagaaccctgagtgcaatttttgcgcgctgccgagccagccccgtctcccacccaaaaaattcaactcagctaaggaagctttctag

SEQ ID NO: 217668 - DNA, 1152 bp, synthetic construct
  misc_feature 1..1152: note = Description of Artificial Sequence: Synthetic coding sequence
  source 1..1152: mol_type = other DNA
atggccgctgaatccggcgagctcatcggcgcttgtgagttcatgaaagatcgactctacttcgcaacgctgagaaacagacctaagagcactgtgaatactcactatttctcgatcgatgaggagctcgtttatgaaaatttttacgcagactttggccctctaaaccttgctatggtgtacaggtattgttgcaagctaaataagaagctgaaaagctactccctctcacggaaaaagatcgtccactacacatgcttcgaccagcggaagagagcaaatgctgctttcctgattggagcctacgcagtcatctacttgaagaagactccggaggaggcctacagagctctgctgtccggatctaaccccccttacctgcctttcagggatgcatctttcggtaattgcacttataaccttactatcctggactgccttcagggaatcaggaaagggctccaacatgggttctttgatttcgaaacattcgatgttgatgagtatgagcattacgagagggtggagaatggagacttcaattggattgtgccagggaagttcctagccttctctggaccccacccaaaaagcaagattgagaacggctaccctctccacgcacctgaagcctactttccttatttcaagaaacataacgttactgctgttgtacgactcaataagaagatctacgaagcaaaacggttcacggacgctgggttcgagcattatgacctgtttttcattgacggcagcacgcccagtgataacatcgtccgtcgattcttgaacatatgcgaaaacacagaaggagccatagctgtccactgcaaagccggactcggcaggacaggaactcttattgcttgctatgtgatgaagcactatcggttcactcatgctgagataattgcctggattcggatctgcaggcctggttctattatcggccctcagcagcactttctggaggagaagcaggcctcactctgggtccagggcgatatcttcagatcgaaactcaagaatcggccaagctctgaggggagtataaacaagatcctttctggtctagatgacatgtctatcgggggaaacctgtcaaagacacaaaatatggagcgatttggcgaagtcagctttccatag

SEQ ID NO: 217669 - DNA, 576 bp, synthetic construct
  misc_feature 1..576: note = Description of Artificial Sequence: Synthetic coding sequence
  source 1..576: mol_type = other DNA
atggcagccgaaagtggagaactgatcggggcatgtgagttcatgaaagatcggctgtatttcgccacgcttcgcaatagacccaagtctacagtaaacactcattacttctcaattgatgaagaactggtatacgaaaacttttacgcagacttcgggcctctcaatctggccatggtgtaccgctattgctgtaagctgaataagaaactgaaatcgtactccctatctaggaaaaagattgtgcattacacatgcttcgaccagcgaaagcgcgctaacgcagctttcctcataggcgcatatgccgtgatttatctgaaaaagacaccagaagaagcctatcgtgccttgctcagcggatctaatccgccttatctgcctttccgggacgcctctttcggaaactgtacatacaatctcacgattctggactgtctgcagggaattcgtaagggcctgcaacacgggtttttcgacttcgaaacttttgacgttgacgagtatgaacattatgaagtcatcctgttcaccccactcaagccaacatttctgatttcaaagagtattatgtag

SEQ ID NO: 217670 - DNA, 822 bp, synthetic construct
  misc_feature 1..822: note = Description of Artificial Sequence: Synthetic coding sequence
  source 1..822: mol_type = other DNA
atggggaattttctgagcagagaaaacaaagttcaggtcatttctgagtcagatcgactgtactttgccacactaagaaaccggcctaagtccaccgtgaacacacactacttttccattgacgaggaattggtttacgagaacttctatgctgatttcggaccccttaatctggccatggtataccgctactgttgcaagttgaataagaagctcaagtcttattccctgagccgaaagaagattgtccattacacctgttttgatcagcggaaacgcgctaatgctgccttcctgattggtgcctatgcagtgatatatctgaagaaaacccccgaggaggcctaccgagctctgcttagtggcagtaaccccccatacctcccattcagagacgcttcttttggaaactgtacatataatctgactattcttgattgcctccaggggatccgtaaggggttgcagcacgggttcttcgacttcgagaccttcgacgtggatgaatatgagcactacgaaagagtggaaaacggagacttcaattggatcgtgcctggaaaattcctagcattcagcggacctcacccaaagtcaaagatcgagaacgggtatcccctgcatgcccctgaggcctactttccgtacttcaagaagcataacgtcacagccgtggtgcgactgaataaaaaaatatatgaagctaagcgttttacagatgccggatttgaacactacgacctattcttcatagacggctccactccgtcagacaatatcgtgcgccgattcctcaacatttgcgagaataccgaggggtag

SEQ ID NO: 217671 - DNA, 1698 bp, synthetic construct
  misc_feature 1..1698: note = Description of Artificial Sequence: Synthetic coding sequence
  source 1..1698: mol_type = other DNA
atggtgtaccgctactgctgtaaattaaataagaaactgaaatcgtattccttatcacgaaagaagatcgttcattatacctgtttcgatcaaagaaaacgcgcaaatgccgcattcctgataggtgcttacgctgtgatctaccttaagaagactcccgaagaggcctatcgggctttgttaagtggctcgaatcccccttacttaccttttcgcgacgcgtcctttgggaattgtacatacaatttaaccattcttgattgtctgcagggtataaggaaaggactgcagcacggcttctttgactttgagaccttcgacgttgatgaatacgagcattacgaacgcgtggagaacggagactttaactggatcgtcccaggcaaattccttgctttcagcgggcctcacccaaagagtaagattgagaacggatatcctttgcatgctccggaggcctattttccctacttcaagaagcacaacgtgacagctgtggttcgcctcaataagaaaatttacgaggccaagcggttcacagatgccggatttgagcactacgatttgttctttattgacggttctacacccagcgataatatcgtacggcgtttcctgaacatctgcgagaacaccgagggtgccatagctgtgcactgcaaagccggtctcggaaggacagggacgctcattgcttgctacgtcatgaagcactataggtttacccatgccgaaatcatcgcctggattagaatctgccgaccgggttccatcattggtccacagcagcacttcctcgaagaaaagcaggcttccctttgggtgcagggggacattttccgatctaagctgaaaaatcggccatcatccgaaggttccattaataagatcctgtctgggctggatgacatgtctataggtggcaacctgagcaaaacccagaatatggagagatttggagaggacaatctggaggacgatgacgtggagatgaagaatggcattactcagggcgataaactgagagccctgaagtctcaaaggcaaccaaggacaagccctagctgtgctttccgctccgatgataccaagggacacccaagggcagtgtcacaaccattcaggctgtcttcctctctgcaaggctccgcggtgacgctaaagacctccaaaatggcactaagtccatccgctactgctaaaaggatcaacaggacttctctttcttccggcgcaacagtccgctccttctcaatcaattctcgactagcttcctccctgggaaatctgaatgccgcaactgacgacccagaaaacaaaaaaacgagcagctcaagcaaagctggctttaccgcctctccctttaccaacctgctgaacggctctagccagcctacaactcgcaattaccccgaactgaacaacaaccagtataataggtcttctaacagcaacgggggaaacctgaactccccaccagggccacattccgcgaaaacagaggagcatacaacaatcctacggccatcctataccggcctgtcatccagttcagctagattccttagcaggagcatccctgtttcagcccaaactccccctcctggtccccagaaccccgaatgtaacttctgcgccctcccgtctcagccgaggctgccaccaaaaaaatttaattctgccaaggaagccttttag

SEQ ID NO: 217672 - DNA, 1833 bp, synthetic construct
  misc_feature 1..1833: note = Description of Artificial Sequence: Synthetic coding sequence
  source 1..1833: mol_type = other DNA
atggctgccgagtctggcgaactgatcggtgcttgcgagttcatgaaggacaggttatacttcgcgacactgcgtaacaggcctaaaagcacagttaacacgcattacttctctatcgacgaggaactagtgtatgaaaacttttacgctgactttggcccactcaatctggcaatggtgtacaggtattgttgcaagttaaacaagaagctcaagagctattccctgtcccggaagaaaatcgtgcactacacttgtttcgaccagcgcaagcgagccaacgccgcttttctgatcggcgcttatgctgtaatttatcttaaaaaaacaccagaagaggcgtatagggctctgctgtcaggaagtaaccctccttatctcccttttcgagacgcaagttttggaaattgtacctataatctgacaatccttgactgcttacagggcatccgtaaaggactacagcatggctttttcgattttgagacattcgatgtggacgagtatgagcattacgagagggttgagaacggtgacttcaactggattgtgccagggaaattcctggcttttagcggtccccatcccaaaagtaagatcgagaatgggtaccccctgcatgcaccagaagcctacttcccctacttcaaaaaacataacgttaccgccgttgtgcggcttaacaaaaaaatttacgaagccaagcgctttacagacgccggatttgagcattatgacctgtttttcatcgatggatcaaccccttccgataatatcgtaaggcgatttctgaatatatgcgaaaacacagagggcgcaattgcggtgcactgtaaagccggtctggggagaacagggactctgatagcatgctacgttatgaaacactatcgcttcacccatgccgagatcattgcttggatccgaatctgtcgcccaggatccatcatcggtccgcagcagcactttctggaggagaagcaggcctctctctgggtgcaaggcgacatttttcgttcgaagctgaagaacaggccctcttccgaaggctcgattaacaaaattctcagcggtctcgacgacatgagcatcggagggaatttgtctaagacgcagaacatggagcgttttggggaggataatctcgaggacgatgacgtggaaatgaaaaacggcattactcagggtgataagttgcgggcactgaagtcccagcggcagcctagaacctctccgtcctgcgcctttcggagtgacgacacaaaaggtcacccacgcgcagtatcacagccgttcagactctccagttccttacaggggtcagccgtgacactgaaaacgtcaaagatggccctgtcacctagcgcaaccgcaaagcgaattaatcggacaagcttgtcttccggtgccacggtcaggtcctttagcatcaattcccggctggcctcttcacttggcaacttgaatgcggctactgacgatcctgaaaacaaaaagaccagttcatcatccaaagcaggatttactgcgtcgccgttcacgaatctgctcaatggatcctcacagcctaccaccaggaattaccccgaactgaacaataatcagtacaatcgttcttccaatagtaacggaggtaatctgaattcaccaccagggcctcattcggctaagaccgaagaacacaccaccatcctccggccttcttacacaggtctcagctcttcctcagctcggttcctgtcacgcagcatcccatgttcctgccttctcctggtcttcagaaagccatttctcggttccccccttctcagtctaccgataagtcacctgtag

SEQ ID NO: 217673 - DNA, 1416 bp, synthetic construct
  misc_feature 1..1416: note = Description of Artificial Sequence: Synthetic coding sequence
  source 1..1416: mol_type = other DNA
atgaagcgaaagtcggagagaaggagctcctgggccgctgcccctccttgttctcgtcggtgttcctctacaagcccaggcgtcaagaaaattcgatcctcaacccaacaggacccaagaagaagggatcctcaggatgacgtgtatctcgatatcactgatcgtctgtgctttgctattctgtattcaaggcctaagtctgcatccaacgtgcattattttagtatcgataacgaactcgagtacgagaacttctatgcagactttggccctctcaacctagctatggtgtatagatactgctgcaagattaataaaaagctaaaaagtattacaatgctccgcaagaaaatagtgcattttactgggtccgaccagagaaaacaggccaatgccgcttttctggtaggatgctacatggtcatctatctggggcgtacgcctgaggaggcttaccgaattcttatcttcggtgaaacgtcctatatcccattcagagatgccgcatatggctcgtgtaacttttatattacacttcttgattgtttccacgcagtgaagaaggcaatgcagtacggtttcttaaatttcaattccttcaacctagacgagtatgagcactatgagaaagccgagaacggtgatctgaactggatcattcctgaccggttcatcgcattttgcgggccacatagccgagctaggcttgaaagcggctatcaccagcatagccctgaaacatacattcagtacttcaagaaccacaacgtgaccacaataattaggttaaataagcggatgtatgacgctaaaagattcactgacgcgggtttcgatcaccacgatctcttttttgccgacgggagcactcccacagacgccattgtaaaggagtttcttgatatctgtgagaatgctgagggagctatcgcagtgcattgcaaggcaggcctgggccgtaccgggaccctgattgcttgctacattatgaagcattaccggatgacggccgcagagaccatcgcctgggtgagaatctgtcgtcctggctcagtaatcggtcctcagcagcaatttctggttatgaaacaaactaacctgtggctagaaggggactacttcaggcagaaactgaagggtcaagaaaatgggcagcatagggcagccttctccaagctgctgagtggtgtggatgacatttccataaacggcgtcgagaatcaggatcagcaggaacccgaaccctacagtgatgatgatgagattaacggtgtcacccaaggcgacaggcttagagcacttaagtcacggaggcagtcgaagaccaatgctattccgctgactgatggatggctgagtcaggcagtgacattcctggatcgccttctaatatggctcggaatccacaaagactag

SEQ ID NO: 217674 - DNA, 1458 bp, synthetic construct
  misc_feature 1..1458: note = Description of Artificial Sequence: Synthetic coding sequence
  source 1..1458: mol_type = other DNA
atgaagaggaaatccgagaggcgcagctcttgggccgcagcccctccatgttccagacggtgctcgtcaacctctccaggcgttaaaaaaatccgcagcagcacccaacaggaccccagacggcgtgacccccaggatgatgtatacttagatattacagataggctatgttttgccatcctttatagccggccaaagagtgctagcaatgtgcactactttagcatcgacaacgaactcgagtatgagaacttctatgctgactttgggcctctcaatctagcaatggtctatcggtactgctgcaagattaacaagaagctcaagtcaatcacaatgctccgtaaaaagatagtccatttcacaggctctgatcagcgtaaacaggccaacgcagcattcctggtggggtgttacatggttatctacctgggccgaaccccggaagaagcttacaggatcttgattttcggagaaacatcctatataccgttccgagatgcggcatacggtagctgtaatttttatatcacgctgctcgactgttttcatgccgtcaagaaagctatgcagtatggctttttaaactttaacagcttcaatctggatgagtatgaacactacgagaaagccgagaatggggaccttaactggatcatcccagaccggttcattgccttctgcggccctcacagccgggctcgactggagtccggataccaccaacacagccctgagacttatattcagtattttaagaaccacaacgttactacgattattcggctcaataaaagaatgtacgatgccaagcgctttactgacgctggctttgatcatcacgacttgtttttcgcagacgggagcactcccacggatgccattgtaaaagagttcctcgatatttgcgagaatgccgagggcgctattgcggtccattgcaaagcaggactggggaggactgggactctcattgcatgctatatcatgaagcattacaggatgactgctgccgagactatcgcctgggtgcgcatctgcagacccggatctgtcattggccctcagcaacagtttctagttatgaagcaaaccaatctttggttagagggtgattattttcggcagaagttgaagggacaggagaacggacagcatagggcagctttcagtaaactgttgtccggagtggatgacatctctattaacggggtcgagaatcaagaccagcaggaaccagagccctattctgatgacgatgaaatcaacggggtgactcagggggaccgcctccgagcactcaaatcccgacgccagagcaagaccaacgccatacccctgacatgccctcttgccgtgctgactagcgccctctgctcagtagttatctggtggatcgtctgcgattacatcctgcccatacttctgttctgtcttgacggattccgaactcaatag

SEQ ID NO: 217675 - DNA, 1380 bp, synthetic construct
  misc_feature 1..1380: note = Description of Artificial Sequence: Synthetic coding sequence
  source 1..1380: mol_type = other DNA
atgaagaggaagtctgagaggcgcagtagctgggccgcagctcccccttgctctcgcaggtgcagcagcactagccccggagttaaaaagattaggtcctcaacccaacaggacccgagacgaagagatccgcaggatgatgtgtatctggatatcaccgaccgcctctgtttcgccattctctactcccgcccaaagagcgcctccaatgtgcactacttctccatagacaacgagttagaatacgagaacttttatgccgatttcggacctctgaatctggcaatggtgtatcggtattgttgcaaaatcaacaaaaagcttaaatctataaccatgttacgaaaaaagattgtgcattttactggatctgaccagcgcaagcaggccaatgccgcatttcttgtagggtgctatatggtcatctatttaggaaggacacccgaagaggcataccgaatcctgatctttggagaaactagctacattccttttcgggatgctgcatacggatcttgcaacttctacataaccctccttgattgctttcacgccgtcaagaaggccatgcagtatggtttcctgaacttcaatagctttaacctggatgagtatgaacactacgagaaagccgaaaatggcgatctcaactggattattcctgataggttcatagccttttgcgggccacattcgcgagctcgtctggaatctggttatcatcagcacagcccagagacctacatccagtattttaagaaccacaacgtcactactattatacggctgaataagagaatgtatgacgcgaagaggttcactgacgcgggttttgatcaccacgacttgttcttcgccgatgggagcacccccacagacgctatagtgaaggaattcctggatatctgtgaaaacgcagaaggggcaatagctgttcattgtaaagcagggctgggtaggaccggaaccctgatcgcctgttacattatgaagcactatcgtatgacagccgctgagaccatagcttgggtaagaatctgcaggcccggttcggttatcggcccacagcagcagttcctggtcatgaagcaaactaacctgtggcttgagggagactactttaggcaaaagctaaagggacaggagaatggtcaacatagagctgcattttctaaattgcttagcggggtagatgatatcagcattaatggagtcgaaaatcaggaccagcaggaacccgaaccctattccgatgacgacgagattaatggcgtcacccagggggaccgtctaagggccctcaagagccggaggcagagcaagactaacgctatcccactgactctgagcataagccgtacgaagactgtgctccgctag

SEQ ID NO: 217676 - DNA, 1497 bp, synthetic construct
  misc_feature 1..1497: note = Description of Artificial Sequence: Synthetic coding sequence
  source 1..1497: mol_type = other DNA
atgaagagaaagtccgaaagaagatcttcatgggccgctgctccaccatgtagcagaaggtgtagcagcacatctcctggtgtcaaaaagatacgatctagtacacagcaggatccacgccgacgcgaccctcaggatgacgtttacctggacataactgatagactgtgtttcgcaatcctttacagcagacccaagtcagcatcgaatgtgcactatttctccattgacaatgaactcgagtatgaaaacttttacgcggacttcggtccactgaatttagccatggtttaccgctactgctgtaaaattaacaagaagctgaagtccattacgatgttgcgtaaaaagattgtgcattttaccgggtcggatcaaaggaaacaagccaatgccgcttttttggtgggatgctatatggtgatttacctcggaagaaccccagaagaggcataccgtatcctgatcttcggagagacctcttatatacctttcagagatgccgcttatgggagctgcaatttctatatcaccctccttgattgtttccatgcggtgaaaaaagcgatgcaatacggatttctgaactttaattcttttaatctcgacgagtatgagcactatgagaaggcagagaacggggacctgaattggattatccctgaccggttcattgccttctgcggcccacattcccgggctcggttagaatctgggtatcaccaacattctcctgaaacctatattcaatactttaagaaccataatgttactaccattatccgcctcaataaaagaatgtatgacgctaaacgattcaccgatgccggttttgatcaccatgatctattttttgctgatggatcgaccccaaccgatgcgattgttaaagaattcctggatatctgcgagaacgcagagggtgccatcgctgtccactgcaaagccggtctgggacggaccggtactctaattgcatgttacattatgaaacactacaggatgacagccgctgaaacaatcgcctgggtccgaatttgccgcccagggtccgtcattggcccacaacagcaatttctggtgatgaaacagaccaacttatggcttgagggtgattacttccgccagaagctcaagggccaagaaaacggacagcacagggccgcttttagcaaactgctgtccggcgtagacgacatcagtattaacggcgtcgaaaaccaggaccagcaggagcctgaaccgtactctgatgatgacgagatcaatggtgtgacccagggagaccgattgagggctctgaagagtcgccgtcagtcaaaaacaaacgctattccactcaccgtcatcttgcagagttctgttcaaagctgcaaaaccagcgaaccaaatatttctggcagtgccggtatcactaagagaacaacccgctcagcctctcgcaagtcttctgtcaaatccctttccattagtagaacgaaaacagtcctgcgatag

SEQ ID NO: 217677 - DNA, 1386 bp, synthetic construct
  misc_feature 1..1386: note = Description of Artificial Sequence: Synthetic coding sequence
  source 1..1386: mol_type = other DNA
atgtcaagggaaggtgccggtgcagcactagtagctgaagttattaaagacaggctgtgctttgctattctgtattcccgtcccaaatctgcttctaatgtacattatttttcgattgacaatgagctcgaatacgagaatttttacgctgacttcgggccactgaacctggctatggtatatcgatactgctgcaaaataaataaaaagctgaaatcaattactatgctgaggaagaaaattgtgcactttaccggaagtgatcagagaaaacaggcaaacgccgcattcctcgttggctgctatatggtcatctacctcggcagaactcccgaggaagcctatagaatcctcatattcggggagacaagttacatcccttttagagacgccgcttacggaagctgcaatttttatatcacgctgctggattgcttccatgcggtgaaaaaagccatgcagtatgggtttctcaacttcaactcttttaacctcgatgagtatgaacactacgagaaagctgaaaacggggaccttaattggatcatccccgaccggttcatcgcattctgcggccctcattccagggcaaggctcgaatctggctaccaccagcacagcccggaaacttatatacagtacttcaaaaatcacaatgtgaccacaataattcgcctgaataagagaatgtatgacgcaaaacggttcactgatgcgggattcgaccatcatgacctcttcttcgcagatggatccacccctacggacgcaatagtcaaagaattcctcgatatttgcgagaacgccgagggggctatcgccgtccattgtaaggccggattgggacggaccggaactttaattgcctgctatatcatgaagcactataggatgaccgctgccgagacaatagcctgggtccgaatctgcagacccggtagcgtgattggacctcagcagcaattcctggtgatgaaacaaaccaacctgtggctggaaggcgattacttccgccagaaactgaaaggtcaggagaatggccagcatagggccgctttcagtaaactcctgtcaggagttgatgatatcagcataaatggtgtcgaaaaccaggatcaacaagaacccgaaccatattccgacgatgatgaaattaacggggttacccagggagaccgccttcgggcactgaagtcaaggagacaatccaagaccaacgccattccactcaccgtgatactgcaaagcagtgttcagtcatgcaagactagcgaacccaatatttctggatcagctggaataactaagcgaactactcggtccgcaagccgcaagtcgtcagtcaagagtttgtccatatcccggaccaagaccgttttgaggtag

SEQ ID NO: 217678 - DNA, 1458 bp, synthetic construct
  misc_feature 1..1458: note = Description of Artificial Sequence: Synthetic coding sequence
  source 1..1458: mol_type = other DNA
atgaagcggaagtcagaacgacggagtagctgggctgccgcaccaccatgttcacgccgttgtagcagcacttcccccggagtgaagaagattcggtcgtcaacacagcaagatccacgcaggcgggaccctcaagatgacgtctacctggacattaccgatagattatgctttgcaattctttacagcagacccaaatccgcttcaaatgtgcactatttctctattgacaacgagcttgagtacgagaatttctatgctgactttggccctcttaaccttgccatggtgtacaggtattgctgtaaaattaacaaaaaactgaagagcattactatgcttagaaaaaagattgtgcacttcaccggatccgatcagcgtaaacaggctaacgccgcatttctggtgggctgctacatggtgatttacctcggcaggactccggaggaggcataccgtattctgatctttggcgagacatcatacattcctttccgggacgccgcatatggatcttgcaatttctatatcacccttctggactgctttcacgcagtgaaaaaggccatgcagtatgggtttctgaatttcaatagcttcaacctcgacgaatacgagcattacgagaaggcagagaacggcgatctcaactggatcatccccgataggttcatagcgttttgcggacctcatagccgagcaaggttagagagtggatatcaccagcacagccccgaaacgtatattcagtacttcaagaatcacaacgtgaccactataataagactgaacaagcgtatgtatgatgctaaaagatttacagatgcaggctttgatcatcacgatctgttcttcgccgacggatcaacgcctacagacgccatagtgaaagagtttctcgacatctgtgaaaacgcagaaggcgcaattgccgtccattgtaaggccggtctcggccgtacaggtaccctaatcgcatgttatatcatgaaacattacagaatgaccgcagcagaaactatcgcctgggtgaggatctgtcggcctgggtccgttatagggcctcagcagcagtttctggtcatgaagcaaaccaacctgtggttagaaggtgattacttccgacaaaagctaaagggccaggagaacgggcagcacagggctgccttctctaagctattatccggggtggatgacatctcgataaatggggtggagaaccaggaccagcaagagcctgagccttattctgacgacgatgaaatcaatggggttacccagggcgatcgcctgcgagcgctgaagagtaggcggcaatccaaaaccaatgccatccctctgacgtgccctctggccgtcctgacttctgcactctgctcggtggtgatttggtggattgtttgcgattatatactgccaatcttgctgttctgcctggatggatttcgcacgcagtag

SEQ ID NO: 217679 - DNA, 5345 bp, synthetic construct
  misc_feature 1..5345: note = Description of Artificial Sequence: Synthetic coding sequence
  source 1..5345: mol_type = other DNA
atgtcaggagaggtgaggttgagacagctagagcagtttatcctcgatggacccgcacaaaccaacggacagtgtttcagcgttgagacattgttggacattctgatatgtctgtatgacgagtgcaacaactcaccactgagacgcgagaaaaatatcctcgaatacctggaatgggcgaaaccctttacatcaaaagtgaaacagatgcgactgcaccgggaggattttgagatcctgaaagtgattggacgcggagcttttggagaagttgcggttgtgaagttgaaaaacgctgacaaagtattcgccatgaagatacttaataaatgggagatgctgaaaagggctgaaaccgcctgttttcgagaggagcgagacgtgctcgtaaatggtgacaacaaatggattactaccctgcactacgcatttcaggacgataacaatctgtacctggtgatggactattatgtcgggggagaccttctgactttgctgagtaaattcgaggacagactacccgaagacatggcgaggttctacttagccgagatggtaattgccatcgacagtgtccaccagttgcattatgtgcacagagacattaagcctgataacatcttgatggatatgaatggtcacatccgcctcgccgacttcggctcttgcctgaaattgatggaggatggcacagtgcagtccagtgtcgccgtggggaccccggactacatctcgcctgagattctccaggccatggaggacggaaaaggacgatatggtcccgagtgtgactggtggtctctgggggtttgcatgtatgagatgctctatggtgagacccccttttatgccgaaagcctcgtggagacatatggaaagattatgaaccataaagagcggtttcaatttcctgcgcaggtcaccgacgttagtgaaaacgcaaaggacctcattcgacgcctgatctgtagcagggaacatcggctcggacaaaacgggatcgaggattttaagaaacacccctttttctctggtatagattgggacaacatcaggaactgcgaggccccatatatacccgaggtaagcagtccgactgatacgagtaactttgacgtcgacgatgattgtctgaaaaatagcgagacaatgcccccacctacacacacggccttctccgggcatcacttaccatttgtcggcttcacttacacatcttcctgcgtcctctccgatagatcatgcctgcgcgtcactgcagggccaaccagcctggacttggacgtaaatgtgcagcgaaccctcgacaacaatctggctaccgaagcgtatgagaggaggataaagcggttggaacaggagaagctggaactgagcagaaaactgcaggaaagtacccaaaccgtccaggctttacagtactctacagtggacgggcctttgaccgcttccaaggacctggagattaaaaacctgaaggaggagattgaaaaactgcggaagcaagtgaccgagtcatcccacctggagcaacaactggaggaagccaacgcagttcgccaggaactggatgatgccttccgccagataaaagcatacgagaagcaaattaaaacgctgcagcaggaaagagaagatttaaataaggaactggtacaggcttctgaacgcctgaaaaaccagtcgaaggagttgaaagacgcccattgccagcggaaactggcaatgcaggaatttatggaaattaacgaacgtctgacggagcttcatacccagaagcaaaagttagccagacatgtgagagataaagaggaggaggtggatttggttatgcagaaggtggagtcactccgccaggaactccgaaggaccgaacgtgctaagaaagaactggaagtccatacagaagcattagcggcagaagcctcgaaggacaggaagttgcgggaacagtcagaacactactccaaacagctcgaaaacgaactcgaaggcttaaagcagaagcagatttcatactcccccggagtgtgctcaatcgaacaccagcaggagatcaccaagctgaaaaccgaccttgaaaagaaatctatcttttacgaggaggaattatcaaaacgggaggggattcacgctaacgagattaaaaatctgaaaaaagaactccacgatagtgagggccagcagctcgccttaaacaaagagataatgattctcaaagacaagctggagaagacgcggagagagtcccagagcgaacgcgaagagtttgaatcagagttcaagcagcaatacgagcgggagaaagtgcttctcacggaggaaaacaaaaagttaacatctgaattggataagctcacaacactttacgaaaacctgtctatccataaccagcaactcgaggaggaggtaaaggacctggccgataagaaagagagcgtggcccactgggaggcacagataaccgagattattcagtgggtcagcgacgagaaagatgcccgaggctatctgcaggcacttgcatctaaaatgacggaggaactggaggccttaaggaacagctcgctgggaactagagcaacggatatgccatggaaaatgagaaggtttgcgaaacttgacatgagtgccaggctggagttacagagtgcccttgacgccgagatcagggccaaacaggcaatccaggaagagttgaacaaagtcaaagctagtaatatcatcacagagtgcaagctgaaggacagtgaaaagaaaaacctcgagctgctatctgagatcgagcagctgatcaaagacacagaagagctgaggtctgaaaaaggaatcgaacatcaggactcgcagcactcttttttggccttcttgaacacaccaacagatgcacttgatcagtttgagactgtcgattctacgcccctatcggttcacactcctacactccggaagaaggggtgtcccggtagcacaggattcccacctaagcgcaagacccatcagttcttcgtaaagtcctttacgaccccaacaaaatgccaccagtgcaccagcctgatggttggcttaatcagacagggatgcagctgtgaagtgtgcgggttcagctgccatatcacatgtgtgaacaaggccccaacgacgtgccctgtcccacctgagcagactaagggccctctaggcattgatccccagaagggaattgggaccgcatatgaaggacatgtgcggattccaaagccagcaggggtgaaaaaggggtggcagcgggcattggccatcgtgtgcgactttaagctgtttctctacgacatcgctgagggcaaggcatcacagccatcagtcgtgatcagccaggtgattgatatgcgtgatgaagaattttctgtcagctcggtgctagcgtcggatgttatccacgctagtcgcaaagatatcccatgtatcttcagagtcaccgcatcccaactgtccgcctctaataataagtgcagtatacttatgcttgccgataccgagaacgaaaagaacaaatgggtcggagttttgtccgaactgcacaaaatcctaaagaaaaataaattccgagatcgctccgtctatgtgcccaaggaagcatacgacagtactctccccctaattaaaactacccaggccgctgctattattgatcacgaacgcatcgccctgggaaacgaagagggccttttcgtggtccacgtcacgaaggatgagatcatcagggtgggcgataacaaaaagattcaccagattgagctcattccaaatgaccagctggtggctgtcatctcaggtagaaatcggcacgtccggctattccccatgtccgctcttgacggcagggaaacggatttctataaactgtccgagaccaaagggtgtcagacagtcacctccgggaaggtaaggcacggcgcactgacgtgcctctgtgtggcaatgaaacgccaagtactgtgctacgaattgtttcagagtaaaacaagacaccgtaaattcaaggagatacaagtgccttacaatgtccagtggatggcgatcttcagcgaacagttgtgcgtggggttccaatccggatttctgcggtaccctctgaacggcgagggtaacccgtatagtatgctgcactccaatgatcacactctttctttcatcgcccaccagccaatggatgccatctgcgccgtagaaatctctagcaaggaatacctcctgtgttttaatagcatcggaatttacacggactgtcagggcagacgctcccggcagcaggaactgatgtggccagctaatccctcaagctgttgttataacgccccttatttgagcgtatactctgagaatgcggtcgatatatttgatgtcaatagtatggaatggatacaaacgctgcccttgaagaaggtcagaccccttaacaacgaggggtcattaaacctgctgggactcgaaactatacggctgatttattttaagaacaaaatggccgagggggacgagcttgtggttcccgagacatcagataattcccggaagcaaatggtgcgaaacataaataataaaaggcggtacagtttccgtgtccccgaagaggagagaatgcagcagagacgggagatgttgagggacccagaaatgcgcaacaagttgatttcaaacccaaccaattttaatcatatagcgcacatgggaccaggagatggaattcagatattgaaggatctgccgatgccagggttcccctatccttctcctcaccatcactcaggactaatcagcagccccatcaacttcgaacacatttaccacatgaccgtgaactccgccgagaagtttctcagcccagattccattaacccagagtactcaccctccttaaggagcgttcccggtaccccatcattcatgacacttagaaaccccagaccccaagagtccagaaccgtgttcagtggctccgtctctattccgagcattacaaaatccaggcccgaacccggtcgctcgatgagcgcctctagcggactatctgcgagaagctctgctcagaatggatccgctctcaagcgggagttttctggcggaagttacagcgccaaaagacaaccgatgccttcaccctctgagggcagcctgtccagcggaggaatggatcagggttctgacgcacccgctcgcgacttcgacggggaagactctgactcacccagacactcaacagcttcgaattcgtctaacctgagttcgcctccctcccccgcaagccccagaaagaccaagtctctttctctggagtccaccgacagggggagctgggatcctta

SEQ ID NO: 217680 - DNA, 2457 bp, synthetic construct
  misc_feature 1..2457: note = Description of Artificial Sequence: Synthetic coding sequence
  source 1..2457: mol_type = other DNA
atgattttgaaggataagctggagaaaacccgtagagaaagccagtccgagagagaggaatttgagtctgaatttaagcaacagtacgaaagagagaaagtcttgctgaccgaagagaataaaaagctgacttcagagcttgacaaattaaccacattgtatgaaaatctgtctatacacaatcaacagctggaagaagaagtcaaagacttggctgacaaaaaagaatctgttgcccactgggaggcacaaattacggaaatcatccagtgggtgtctgatgagaaagatgcgagaggctatctgcaggccctcgcctctaagatgaccgaagagttggaagcgctccgaaactcgagcctggggactcgagcaactgacatgccctggaaaatgcgcaggtttgctaagcttgatatgagtgctcggcttgagctccagtcagctctggacgccgagatcagagccaagcaggcgattcaagaggagctgaacaaagtaaaggcctccaatattataaccgaatgtaaactcaaagattcggagaaaaagaacttagaactactcagtgagattgagcagctaatcaaagatactgaggagctccgttccgagaaagggatcgagcatcaggactcccaacactcttttctcgccttcttaaacacacctaccgatgctttggatcagttcgaggattcattttcctcttcaagtagttctctgatagatttccttgacgacaccgatcccgtggagaatacctatgtgtggaatccaagcgtgaaattccatatccagagcaggagcacctccccaagtacatctagtgaagctgaaccagttaaaaccgtggattccaccccactgagcgtgcacacgccgactctgcgtaagaaggggtgcccagggagcaccggcttccccccaaagagaaagacacaccagttcttcgtcaaaagttttaccacacccaccaagtgtcatcaatgtacctccctgatggtgggactgatcaggcagggctgcagctgtgaagtctgcggcttttcttgccacatcacttgcgtgaataaagcgccaaccacttgtcctgtccctcctgaacagaccaagggtccgctgggaatcgaccctcaaaaaggcatcggaacagcctatgagggccacgtgcggatccctaaaccagctggggtaaaaaaaggctggcaaagagcgttggccattgtctgcgatttcaagctgttcttatacgacatcgccgagggtaaagcttcccaaccttctgtggttatttcacaggtcatcgatatgcgtgacgaggagttctcagtgtcatccgtgctggctagtgacgtgatccacgcgtcgcgaaaagacatcccctgcattttcagggtgaccgcctcacagctgagcgcttcaaataacaagtgctccattctgatgttagccgacacggaaaatgaaaagaataaatgggtgggagtgctctcagaactgcataagatcctgaagaagaataaattcagggatcggtcagtctatgtgccgaaggaagcatacgacagcacactccccctcattaagacaacccaggccgctgctatcattgatcatgagagaattgccctgggaaatgaggagggtctgtttgtcgtccacgtcaccaaggatgaaattatccgggtgggcgataataaaaaaattcaccaaatcgagctgattccaaatgatcagcttgtggccgtgataagcggaagaaatcgccatgtgcgtctcttcccgatgtcagccttggacggcagagaaaccgatttttacaagcttagcgaaacaaaaggatgtcagactgtaaccagcggtaaggttcggcacggtgccctcacctgcctttgtgttgccatgaagcggcaggtactgtgttatgagctattccaatcaaaaacccggcatcgcaaattcaaggagattcaggtgccctacaatgtgcagtggatggctattttctccgagcaactatgtgttggatttcagtcaggcttcctgcgttaccctctaaatggagagggaaatccttactccatgcttcatagcaacgaccacactttgtcttttatagcgcatcagcctatggacgccatttgcgccgtggagatatcgagcaaagaatacctgctttgctttaatagcatcggtatctacaccgactgccagggacggagaagtaggcagcaggaactcatgtggccagctaaccctagcagctgctgttacaatgccccttatctctcagtctactctgagaacgccgtagatattttcgatgtgaacagtatggagtggatacagaccctacctctgaagaaggttcgaccccttaataatgaaggaagcctgaatcttctcggattggagaccattcgcctgatctactttaagaataagatggcttag

SEQ ID NO: 217681 - DNA, 5075 bp, synthetic construct
  misc_feature 1..5075: note = Description of Artificial Sequence: Synthetic coding sequence
  source 1..5075: mol_type = other DNA
atgagcggtgaggtgagactgaggcagctggagcagttcatcctggatggccctgctcagactaatggccagtgcttttctgtcgagaccctgctcgacattctgatttgtctttatgacgagtgcaataactcgcctcttcggagagagaaaaacatccttgagtatctggagtgggcaaagcccttcacgtctaaggtcaagcagatgagattacatcgggaggacttcgagatcttgaaggtgattggaagaggtgctttcggagaagtcgcggtggtgaaactgaaaaatgctgacaaggtgttcgcgatgaagatactcaataagtgggagatgctgaaacgagcggaaacagcttgcttcagggaggagcgagacgtgctcgtcaatggggataataaatggatcactaccctgcactacgcctttcaagatgacaacaacctttatttggttatggattattatgtgggcggagatctattaacactgctcagtaaatttgaggaccgcttgcctgaagacatggcccgattctacctggccgaaatggtcatcgccattgatagcgtgcaccagctgcattatgtccacagagacatcaagccagataatatccttatggatatgaatggacatattcgcctggcagacttcggctcctgtctgaagctgatggaggatggaacagtgcaatcctcggtggccgtgggaacccccgattatatttctcctgagatcctccaggcaatggaggatggtaagggacggtacggaccagaatgcgattggtggtcacttggggtttgcatgtacgaaatgttgtacggagagaccccattttacgctgagagcctggtggaaacatacggtaaaattatgaaccataaggagcgcttccagtttcctgcccaagtaacagacgtgtccgagaatgctaaggaccttatccgccgattaatttgctctagggaacaccgactgggacagaacggcatcgaggatttcaagaagcatccattctttagtgggatcgactgggacaatatcaggaactgtgaggctccatacatccctgaggtgtcatcacccaccgatacatctaatttcgacgtggacgacgactgtctgaagaacagcgagacaatgcctccacccacccataccgccttctcgggtcatcacctgccattcgtgggctttacatacacgagttcctgtgtcctgagtgataggagctgtttgagggtcaccgctggtcctacaagtttggatctggatgtcaatgttcagcgaaccctcgataacaaccttgccacagaggcatacgagcgacgtatcaaaaggcttgagcaggaaaaattggaattgagtaggaaactgcaggaatctactcagaccgtgcaggccttgcagtattctacagtagacggcccactgacagcctctaaggatctggagataaaaaacctgaaggaggaaatagagaaactcaggaagcaggtgacagagtcaagccacttggagcagcagttggaggaagctaacgctgtgcgccaagaactagacgatgcctttcgtcaaataaaagcatatgaaaaacagatcaagactctgcagcaggagcgggaagatctaaacaaggagctggttcaggctagcgaaagactcaagaatcagtctaaagagttaaaggacgcccactgccaaaggaagttggcgatgcaggaattcatggaaatcaacgagcgtctcacggaactgcacactcagaagcagaagctggcaagacatgtccgagataaggaggaggaggtggaccttgtgatgcagaaggtggagtctttgcgccaggagctccgtagaacagagcgcgcaaaaaaggaactggaagtgcacactgaagctctggccgcagaagcctcgaaggaccgaaagttgcgggaacagtccgagcactactccaagcaattggagaatgagctggagggccttaagcaaaaacagatctcttattcacccggagtttgttcaattgagcatcagcaggaaattacaaagctgaagaccgatctcgagaaaaagtccatcttctatgaggaagagctctctaaaagagaaggaatacacgctaatgagatcaagaacctgaagaaggagctccacgacagcgagggccaacagctggctctgaacaaggaaataatgatcctgaaggataagctggagaagacacgtagagaaagtcagtcagagagggaggagttcgagagcgaatttaagcagcaatacgagagagaaaaagtcctcctgaccgaggagaacaaaaaacttacatccgagttggacaagcttactaccctgtacgagaatctcagcattcataaccagcaacttgaagaggaggtcaaggatctggccgacaaaaaggagtccgtcgcccactgggaagcccagatcaccgaaatcatccagtgggtctctgacgaaaaagacgcaagaggctaccttcaagcactggcttctaagatgacagaggaactggaagccctgcgcaattcatcattagggacgcgagccaccgatatgccgtggaagatgcgaaggttcgctaaacttgacatgtctgccagactcgagcttcagagcgccctggatgccgagattcgggctaaacaggcaatccaagaggagctcaataaggtaaaggctagcaatatcatcacagagtgtaagctcaaagacagcgagaaaaagaacctggagttgttgtctgagatcgaacaacttatcaaggacactgaggagttacgtagtgaaaaaggtattgagcatcaggattctcagcattcatttttagcgttccttaacacccccacagacgccctggatcagttcgaacgaaaaacccaccagttctttgtcaagagtttcaccacacctacaaaatgtcaccagtgcaccagcctgatggtagggctcatcaggcaggggtgcagctgcgaggtgtgtggattttcctgtcacataacctgtgttaacaaggcaccaacgacttgtcccgtcccccctgaacagaccaaggggcctcttgggatcgacccgcagaaaggaatcggcacagcatatgagggccacgtgcggatccctaaacctgccggtgttaaaaaggggtggcagagagccttagctatcgtgtgcgactttaaattgttcctgtatgatatcgcggaagggaaagccagccaacctagcgtggtgatttcgcaggtgattgatatgagggacgaggaattttcagtgtcaagtgtgctggcttctgatgttatccacgccagccgcaaggatattccatgtatctttcgcgtcaccgcaagccagctgtcagcaagcaataacaaatgttctatcctgatgctggctgacacagagaacgagaaaaacaaatgggtgggcgtcttatccgagctgcataaaatactgaaaaaaaataaattccgggaccggagcgtgtatgtgcccaaggaggcctacgatagtactctgccactgatcaaaacgacacaggcggctgcaatcattgaccacgagcggatagcactggggaatgaagaagggctctttgtggtgcacgttactaaggacgagatcatccgagtgggtgataataagaagattcaccagatcgagttgattcccaacgatcagttagtggcagtaatttctgggcgtaacaggcatgtgcggttgttcccaatgtcagcgcttgatgggagagagaccgacttctataagttaagtgaaactaagggctgccagaccgtgacctccggtaaggtgcgccacggcgctctcacatgtctgtgtgttgccatgaagaggcaggtgctttgctacgaactgtttcagagtaaaactcgccataggaagttcaaggaaatccaggtgccatacaatgtgcagtggatggccatcttttccgagcaactctgcgtagggttccagtcaggcttcctccgctatccactgaacggagagggaaatccatactctatgttgcatagcaatgaccacacactaagctttattgctcaccagcctatggacgccatctgcgctgtcgagatctcttccaaagaatacttattgtgtttcaactccattggcatttataccgattgtcaaggtcggcgttcccggcagcaagaattgatgtggccggcaaatcctagtagttgctgctacaacgctccctatttatccgtgtacagtgaaaacgccgtagacatctttgatgtgaactccatggagtggatacagaccctgccactgaagaaagtgaggccactgaataatgaaggaagtctgaatctgctgggcctggagacaataaggctgatttacttcaagaataagatggccgaaggagatgagcttgtggtgcctgagacaagcgacaatagccggaaacagatggtgcggaacatcaataataagcgacggtatagtttcagggtcccggaagaggagagaatgcagcagaggcgcgaaatgctgagggaccccgagatgagaaataagctgatctcaaatccaaccaactttaatcacatcgcccatatgggccctggggacgggatccaaatactgaaggatcttcctatgaatcctcggccacaggagagccggacagtcttctcaggatcggtaagcatacctagcataacaaagagccgtcccgagccgggacggtcaatgtcggctagtagtggcttaagtgccaggtctagcgcgcagaatggcagcgcgctcaaaagggaattctcgggaggcagctactccgctaaacgccagccaatgccctccccatcggagggctcgcttagcagcggcggaatggaccaaggaagcgacgctccagcgagggacttcgatggagaagacagtgattctccccgacattcgacagctagcaatagctctaatctgtcttcacctccttctcccgcttcaccccgaaagaccaagtctttatccttagagtctaccgacagggggtcctgggatccata

SEQ ID NO: 217682 - DNA, 5198 bp, synthetic construct
  misc_feature 1..5198: note = Description of Artificial Sequence: Synthetic coding sequence
  source 1..5198: mol_type = other DNA
atgtcgggggaagttcggctacggcaattagagcagtttattctggacgggcctgcacaaaccaatgggcagtgcttctcagttgaaacactgcttgatattcttatctgtctgtacgacgaatgcaacaactctcccctccgccgagagaagaatatattggagtatctggagtgggctaagccattcacttccaaagtgaaacagatgcggctccacagggaagacttcgagatattaaaggttatcggccgtggggcttttggtgaagtggctgtggtcaagctgaagaacgccgataaggtgtttgcaatgaaaatcctcaacaagtgggagatgctaaagagagctgagacagcttgttttcgagaagaacgggacgtgctggtcaacggcgataataagtggatcacaacactccattacgcctttcaagatgacaacaacctgtatctggttatggattattatgtgggaggcgacctcctcacacttctcagcaaattcgaagatagactacctgaagacatggccagattttacttagctgagatggtgatcgctatcgactccgtgcaccagctacattatgtccatcgggatatcaagcctgacaacatacttatggacatgaacggacatatcaggctcgcggacttcggcagctgtttgaagctcatggaggatgggaccgtgcagtcatcagttgccgtgggtacgcctgactacatatccccagaaatcctgcaggccatggaagacggcaagggtcggtatggcccagagtgcgactggtggagtctgggggtatgcatgtatgagatgctttacggcgagacacccttttatgcggagagccttgtggagacctacggaaagattatgaaccacaaagagaggttccagtttccggcacaagtgactgatgtctcagagaacgccaaagatctgatacgcaggttgatttgctcacgagaacacagactcggacaaaatggcattgaggactttaaaaaacatcctttcttctcaggaattgactgggataacatcagaaattgtgaggccccttacattcctgaagtgagtagccctacagacacaagcaattttgacgtggacgacgactgcctcaaaaactccgagacaatgccccctccgacccatactgcgttctcaggtcatcatttaccgttcgttggattcacgtacaccagcagttgtgtactctctgaccgaagctgcttgagggtcactgctggacccacctcactggatctcgacgtgaatgtccagcgaaccctcgacaacaatctggccaccgaagcatacgagcgcaggatcaagcggcttgagcaggagaagcttgaactatctcggaagctgcaggagtccactcaaacagtccaggcccttcagtactcgacagtagacgggcctttaacagcttccaaggatctggagattaaaaatctgaaggaggagatcgagaaactgcgaaagcaggtcacagagtcctctcacttggaacagcaacttgaggaggctaacgccgtgcgccaggagcttgacgatgcattccggcagataaaggcgtatgagaaacagataaagacccttcaacaagaaagggaggatctgaataaggagctggtacaggcctccgagaggctgaagaaccagtcaaaagagctcaaggacgcacattgtcagaggaaactcgctatgcaggaatttatggagatcaatgaaagactgaccgagcttcacactcaaaagcagaagctggcacggcacgtgcgtgataaagaggaggaagttgacttggttatgcagaaagtggaatctctgagacaagagcttcgtagaactgaacgcgctaagaaggagctcgaagtgcataccgaagccctggctgctgaggcatccaaggaccggaaactccgggaacaaagtgagcattacagcaagcagctggaaaacgaattagagggcttgaagcagaagcagatcagttacagtcctggcgtgtgttcaatcgagcaccagcaggagatcactaagctgaagactgatctcgaaaaaaaatcaatcttctacgaggaagagttgtctaagagagagggcatccacgccaacgagataaaaaacttaaagaaggaattacacgactccgagggtcagcagcttgcgctgaacaaagaaattatgattctcaaggacaagttggagaagacaaggagggagtctcagtccgaaagagaagaattcgaatccgagtttaaacagcagtacgaacgcgagaaggtgttgctgaccgaagaaaataaaaagctaactagcgagctggacaaactcaccaccctttacgagaacctttctatacataatcagcagctggaggaagaagtgaaagacctggccgacaaaaaggagagcgtggctcattgggaggcacagattacagaaattatacagtgggtctcagacgaaaaggacgccaggggctatttgcaggcactcgcgagtaagatgaccgaggaattggaggcattacggaacagtagtcttggaacacgtgctacggacatgccatggaaaatgcgcagattcgccaaactcgatatgtccgccaggctggagctccagagcgccctcgacgctgaaattagagctaagcaggccattcaggaagagctgaacaaagtcaaagcgagtaatatcattaccgagtgtaagctgaaggactccgaaaaaaagaaccttgaactgttgtccgagatcgagcagctgattaaggacaccgaagagttacgctccgaaaaggggatagaacaccaggactcccagcattctttcctggccttccttaataccccgaccgatgcgctggaccagttcgagcgctctcctagttgcaccccggcaagtaaagggcgacggaccgtggatagcactccattatcagttcacacccctaccctccggaaaaagggttgccccggttctaccggattccccccaaagcgcaaaactcaccagttttttgtgaaatccttcaccactcctaccaagtgccaccagtgcactagcctgatggtgggactgatccgtcagggttgttcttgtgaggtttgtggcttctcctgtcacattacctgtgtcaacaaagcaccaaccacttgtccggttcctccagagcagacaaaagggccactcggcattgacccccagaagggcataggaaccgcctatgaaggccatgtccggatcccaaagccggctggagtcaagaagggatggcagcgcgctctggcgattgtctgcgactttaaactcttcctgtacgacatcgctgaagggaaggccagccagccatccgttgtcatttcccaggtgattgacatgcgcgatgaagaatttagcgtgtcttccgtcctcgccagcgacgtgatccacgcttcaaggaaggacatcccgtgcatcttcagggtgactgccagccaactttctgctagcaataacaaatgttccatcctgatgctcgcggacaccgaaaatgagaagaataagtgggtgggcgtcctgtcagaactccataaaatactcaaaaagaacaagttccgggaccgcagcgtgtacgtgcctaaagaggcctatgattctacactacctctcataaagacaactcaggccgcagcaatcatcgatcatgaacggatcgccctcggtaatgaagaaggtctcttcgtggtacatgtcaccaaggacgaaattattcgcgtaggggacaataagaagatccaccagatagagctgatccctaatgaccagttagtggcagtcatatcaggcagaaaccgtcatgtcaggctgttcccaatgagtgccctggatggccgagagactgacttttacaagctgagcgagactaagggctgtcagaccgtcacctccggcaaagtgaggcacggcgctttaacctgtctgtgcgtggccatgaaacgccaggtcctctgttacgaactatttcaaagtaagacccggcacaggaaatttaaggaaatccaggtcccctacaacgttcagtggatggccattttctccgagcaactttgtgtgggttttcagtctggatttttacgctatcctttaaacggtgagggaaacccttattctatgctgcactctaatgaccacacgctatcattcatcgcacatcaaccaatggatgcaatttgtgcagtggagattagttctaaggagtacctactgtgtttcaattctattgggatctatactgactgtcaggggcgaagatcccgccagcaggagctcatgtggcccgcaaatccgagctcatgctgttataacgctccttaccttagcgtttattccgaaaatgccgttgacatcttcgacgtcaactctatggagtggatccagaccttgcccctgaagaaggtgcgcccactcaacaatgagggctcccttaatctcttgggactggagactattcgcctcatttattttaaaaataaaatggctgagggcgatgagttggtcgtcccggaaacaagtgataattcccggaaacaaatggtcaggaacattaataataaacgacgttactcatttcgggttcctgaggaagagcggatgcagcagcgaagagagatgctgcgtgacccagagatgcgtaacaaactgatcagtaaccccaccaatttcaaccatatcgcccatatggggccaggtgatggtattcaaattctcaaggacctccctatgaatcccaggccccaggaaagccgcacagtattttccggaagcgtgtccattccatctatcacaaaatcaagacctgagccaggcagatcaatgtctgcttctagtgggctctctgctcgctcctctgcccagaacggcagcgccctcaagagagagttctctggaggaagctacagtgcaaaacgccagcctatgcctagcccaagtgagggatcactttcaagcggtggcatggatcagggttctgacgcacccgcaagggacttcgacggagaggacagcgatagccctcggcactccacagcttccaacagctcaaatttgagctcacccccttcgccagctagccctcggaaaactaaatcactgtcactggaaagcactgaccgtggctcttgggatcctta

SEQ ID NO: 217683 - DNA, 5264 bp, synthetic construct
  misc_feature 1..5264: note = Description of Artificial Sequence: Synthetic coding sequence
  source 1..5264: mol_type = other DNA
atgagtggcgaagtgaggctgcgccaattggagcagttcatcctggacggtccagcacagaccaatggtcagtgtttttccgtggagacactgttggacatcctcatttgtctctacgatgagtgtaacaacagtcccttgagaagggaaaaaaacattctggaataccttgagtgggcaaaaccctttacctcaaaagtgaagcaaatgagactacatcgggaggattttgagattctgaaggttataggtagaggcgcattcggcgaggtggccgtggtaaaactgaagaacgccgataaagttttcgctatgaaaatactgaacaagtgggagatgcttaaaagagccgaaaccgcatgctttcgggaagagagggacgtgctcgtgaacggtgacaataaatggataacgaccttgcattacgcctttcaggatgacaataacctgtatctggtgatggattattacgtaggcggtgacctgctgaccctgttgtctaagttcgaagacagattgccagaggatatggctaggttctacttggccgagatggtcatcgccatagactcagtccaccagctgcattatgttcacagggacattaagcctgataacattctgatggacatgaacggacatatccggctcgccgatttcgggagttgcctgaagctgatggaagatggcactgtgcagtcctccgtagccgtcggcaccccagactatatcagtccagagattcttcaagccatggaggatggcaaggggagatacggtcctgaatgtgattggtggagcctcggggtgtgtatgtacgagatgctgtacggcgagactcctttctatgcggaatctctggtcgaaacttacggtaaaatcatgaaccataaagaacggtttcagtttcctgcacaggtcaccgacgtgagtgagaatgcgaaggacctgattcgtcgtctcatctgctcgcgggagcatcggctgggtcaaaatggaatcgaagattttaagaaacatccgttcttttccgggatagactgggacaacatccggaactgcgaggctccatacattcctgaggtgtcttctcccactgatacaagtaatttcgatgtagatgacgattgccttaagaattctgagaccatgcctccacctactcacactgcctttagcggccaccatctcccatttgtaggcttcacttataccagctcctgcgtcttaagcgacagatcctgcctgcgagtgactgctggccctacctcactggaccttgacgtgaatgtgcaacggaccctagataacaacttagccaccgaggcctatgagaggcgcattaagcgactcgaacaagaaaaattggaactgtcaaggaagctgcaggagtctacccagaccgtgcaggctctccagtattccaccgttgatggcccattgactgcctccaaagatctggaaatcaagaaccttaaagaggagatcgagaagttgcggaaacaggtgaccgagtcgagccatctagagcagcagctggaagaagcgaacgcggtccgtcaagaactcgacgacgcgtttcgacagattaaagcatacgaaaagcagatcaaaacgctgcagcaggagagagaggacctgaataaagagctggtgcaggcctccgagagactgaaaaaccagagtaaagagctgaaggacgctcattgccagcgtaagctggctatgcaggaattcatggaaatcaacgagcgtctgacggagctccacacacagaaacagaaacttgcaagacacgtacgcgacaaagaagaagaggtagacctcgtcatgcagaaagttgaatccctccgacaggaactgaggagaaccgagagggccaaaaaggaactggaggtgcataccgaagccctggcggcagaggcatctaaggacagaaagctgagagagcagtccgaacactatagcaagcagctggaaaacgaactggagggtttgaagcaaaagcagatttcatatagtcctggtgtgtgcagtattgaacatcagcaggagatcaccaagctgaagacagatcttgaaaagaagagcatcttttatgaagaagagctctcaaagagagagggcatccacgccaatgaaatcaaaaacctcaagaaagagctgcacgactccgaggggcagcaattggcgctgaataaggaaattatgatcctgaaggacaagctagagaaaaccagacgcgaaagccagagcgaacgcgaagagttcgagagcgaattcaagcagcagtatgagcgcgagaaggttctcctaactgaggagaacaagaagcttacctcagaattggacaaactgacaactctctatgaaaacttatcaattcataatcaacaacttgaggaggaagtgaaggacctcgcagataaaaaagagtcagtcgcgcattgggaggcccagatcacagaaattatccagtgggtgagcgatgagaaagatgctagagggtatctgcaagccctggcgagcaagatgacagaggaactcgaggccctgcgtaattctagtttgggaacaagagccaccgacatgccttggaagatgcggagattcgctaagctcgacatgtccgcaagactggaactgcaaagcgccctggatgccgaaatacgggcaaaacaggcaatccaagaggaactgaacaaggttaaagcatcaaacataataactgagtgtaaactgaaagattctgaaaaaaagaacttggagctcctgtcagagattgagcagctgataaaggacactgaagaactccgcagcgaaaaagggatagagcaccaagactcccagcatagcttcctggcctttctcaacactccaacggacgcactagaccagttcgagaccgatccagtggaaaacacttacgtgtggaatccaagtgtcaaatttcatattcagagcaggtccacatccccctctacctcgagtgaagccgagcctgtcaagacggtggactccacccccctcagtgtgcatacacccaccctgaggaaaaaaggatgccccggatctacaggtttccctcccaaaaggaagacccatcaattttttgtaaaaagtttcacaacaccaaccaaatgccaccagtgcactagcctaatggtgggactgattcgtcagggttgtagttgcgaagtgtgcggcttttcctgtcacatcacgtgtgtaaacaaggcacctaccacatgcccagtccctccagaacaaaccaagggacccctgggaatcgatcctcagaaaggtatcggcaccgcctatgaaggacacgtgcgtattccaaagcccgcaggagtgaagaaaggctggcagagagcactggccatagtgtgcgattttaagttatttttatacgatattgcagagggtaaagccagccagccttccgtggtcataagccaggtgattgacatgcgagacgaagagttctcagtatcctcggtgttggcatccgacgtgatccatgcctcccggaaggatattccgtgtattttccgcgtcaccgcctcccagcttagcgcctcaaacaataagtgctctattctaatgcttgccgacactgaaaacgagaagaataagtgggtgggcgtactttccgaactgcacaagatcctcaaaaagaacaaatttcgcgatagatcagtctacgtccctaaagaggcctacgacagtactttgcccctcatcaagaccacacaagccgcagcaatcatcgatcatgagaggattgccctggggaatgaggaaggtctgtttgttgtacacgtcacaaaagatgagatcataagggtgggggataataaaaagatacatcaaatcgagctgatcccaaacgatcagctggtggcagtcatcagcggcagaaaccggcacgtgcggctgttccctatgtccgctttagacgggagggaaacagacttctataagctgtctgagactaaggggtgccaaaccgtgacaagtggcaaggttcgtcacggggctctcacatgcttatgtgtcgccatgaagaggcaggttctctgttacgagctgtttcaatctaagacgcgacaccgtaaatttaaagaaatccaggtgccatataacgttcagtggatggccattttttctgaacagctatgcgtaggattccaatctgggtttcttcggtaccctcttaatggagaaggtaatccttattctatgcttcatagtaacgaccacactctgtctttcatcgctcaccagcccatggacgcgatttgcgcagtggagatctcaagtaaagagtacctcctgtgcttcaactccatcggtatctacaccgactgtcagggccgtaggagccgtcaacaggagctgatgtggccagccaatcccagcagttgttgctacaacgccccatatttaagtgtttactctgaaaacgctgtcgacatatttgacgtcaactcaatggagtggattcagactctccccttgaaaaaagtcagacctctgaataatgaaggatctcttaatctgctggggctcgagacaatacgactgatttactttaagaacaagatggctgaaggagacgaattggtggtgccagagacatcagataactccagaaagcagatggtccggaatataaataacaaacgcagatatagttttagagtgcctgaagaagagcgcatgcagcagaggcgagaaatgctcagggacccagaaatgcgaaataagttgatatccaatccaactaattttaaccacattgcccatatgggccctggcgacgggatccagattttgaaggacctgcctatgaatcctagaccacaagagtcccgcacagtcttttcgggatctgtcagcatccctagcatcactaaaagtcgacctgagccaggcagatccatgagtgctagcagcgggctttccgctcggtctagcgctcagaacggcagcgctctgaagagggagttctctggcggttcgtactctgccaaacgtcagcccatgccctcaccttccgaggggtctctgagtagcggcggaatggaccaaggttccgacgcccctgccagagacttcgatggcgaggatagcgattccccgcgacactccaccgcctctaattcatctaatctgagctctcccccaagtcccgctagtccacgcaagacgaagagtctaagcctggaatccaccgatcggggatcatgggaccctta

SEQ ID NO: 217684 - DNA, 4916 bp, synthetic construct
  misc_feature 1..4916: note = Description of Artificial Sequence: Synthetic coding sequence
  source 1..4916: mol_type = other DNA
atgtcaggtgaggtccgactccgacagttagagcagttcattctggacggaccggctcagacgaacggccagtgttttagtgtagagaccctgttagacattctaatttgtctctatgacgaatgcaataatagtcctctgcgtcgtgaaaagaacatcctggagtatctggaatgggctaagccatttacaagcaaggtcaagcagatgagattacatcgcgaggacttcgaaatccttaaggtcattggcaggggtgcctttggggaggtggccgtagtgaaactgaagaacgccgataaggtattcgctatgaagattttgaacaaatgggaaatgctaaagagagccgagacagcctgtttccgagaggagagagacgtacttgtcaacggggacaacaagtggatcacaaccttgcattacgcctttcaggatgacaataatctgtacctggtgatggattactatgtggggggtgacctgctaactctgctgagtaagtttgaggatcgtctgccggaggatatggcccgattctatcttgccgaaatggttattgctatcgactctgtgcaccagctgcactatgtacatcgcgacattaagcccgataatatccttatggatatgaacggtcacatcagacttgccgacttcggctcctgtctgaagctaatggaggacggcaccgtgcagtccagtgtggcagtcggaacaccggactacatttcccctgagatactccaagccatggaagatggaaagggcagatacggacccgagtgcgactggtggtcactgggggtatgtatgtacgagatgttatatggcgaaacccccttctacgcagagtcccttgtagaaacatatggcaagatcatgaaccataaggagcggtttcagttccccgctcaggtaacggacgtctccgagaatgccaaagacctcattcggagactgatttgctcacgtgagcatcgcctgggacagaacggaatcgaagattttaagaagcacccttttttctccggaatcgattgggataatattcgcaactgcgaagccccttacataccagaagtttcctccccaactgatacctcaaactttgacgtggatgatgactgcctgaagaactcagagacaatgcccccaccaactcatactgcttttagcggtcatcatctcccattcgtcggctttacatacacctcatcctgcgtactcagtgatagatcctgcttaagagtaaccgcaggcccaaccagtctagacctggatgtcaacgtgcaaagaactctcgacaacaaccttgccaccgaggcctacgagcgcaggatcaaaaggctggaacaggagaagctggagctttctcggaaacttcaagaatctacacagaccgtgcaggcgttacagtacagtaccgtggacggccctttgaccgcgtccaaagacttggagatcaaaaacttgaaggaggaaatcgaaaaactgcggaaacaggtgacagagtcctcccacctggaacagcagctcgaggaggcaaatgcggtgcggcaggagctggatgatgcatttcgccagattaaagcttatgaaaaacagatcaagactctccagcaggaaagggaagacctgaacaaactggaggtgcacacagaagctctggctgcagaagcgagcaaggatagaaagttgcgggaacaaagtgaacactatagcaaacagctggaaaatgaattggagggtctgaagcagaaacaaatcagctacagcccaggcgtgtgctctatcgagcaccagcaggaaattacaaaactcaagaccgacctggagaaaaaatccatcttctatgaagaagagttgtcgaaaagggagggaatccatgctaatgagattaaaaatctgaagaaggaactgcacgattctgaaggccagcagctagccctcaataaggagattatgatcttgaaagacaagcttgagaaaacacgcagagaatctcagagtgaaagggaagaattcgaatcggagtttaagcaacagtatgaacgcgagaaggtactgctgactgaagagaacaaaaaactgacatccgagctggacaagctgaccaccctctacgagaatctcagtatacataatcagcaactcgaggaggaggtaaaagacttggctgacaaaaaagagtcagttgcccattgggaagctcaaatcacagagatcatccagtgggtttccgatgagaaagatgctagaggctatctccaggcgttggcctctaaaatgaccgaagaactggaagccctgaggaattcatcccttgggaccagagccactgatatgccttggaaaatgcgaagattcgccaagttggatatgtcagctcggctggagctgcagtccgctttagatgcagaaattcgcgcaaagcaagctatccaggaggagctcaacaaggtgaaggccagcaacatcattacagagtgcaagctcaaagactcagagaagaaaaaccttgaactactctctgaaattgagcagttgatcaaagatacagaggaactccggagcgaaaagggaatcgagcaccaggacagccagcattcttttttggcattcctgaatacaccaactgatgccctcgatcagtttgaaacagtggattcaacccctctgagtgtgcatacaccaacgctgagaaagaagggatgtcccggtagtaccggatttccccctaaacggaaaacgcaccagttcttcgtcaagtcctttaccacacccactaagtgccaccagtgcaccagcttaatggtcggactaattcgtcagggctgttcctgcgaggtgtgtggttttagctgtcacatcacatgtgtgaacaaagcaccaacaacatgtcccgtccccccagagcaaaccaagggccctctgggtattgatccccagaagggcataggaactgcatacgagggtcacgtcagaataccgaaacccgctggagtgaagaagggctggcaaagagccctggccatagtgtgtgattttaagttgttcttgtacgatatcgctgagggaaaggcttcacagccatccgtggtcatttcccaagtgattgacatgcgtgatgaagaattcagcgtgagttctgttctggcttcagacgtgatacacgcatcccgaaaggacatcccgtgtatcttcagagtgacagcttcccaactgagcgcgagcaacaacaaatgcagtatccttatgcttgctgataccgaaaatgaaaagaacaaatgggtgggggtactctcagaacttcacaagattttgaagaagaataagtttagggacagaagcgtttatgtgccaaaggaggcgtatgactccactctgcctctgatcaagaccacacaagcagccgcaattattgatcacgagcggattgccctgggtaacgaagagggcctctttgttgtgcacgtgaccaaagatgagatcatcagggtgggggataacaagaaaattcaccagatcgagctgatacccaacgatcagctcgtggccgtgattagcggaagaaatcgtcacgtgaggttgtttcccatgtctgccctggacggtcgggagacggacttctacaagctgagcgagacgaagggctgccagacggtgaccagtgggaaggttcgccacggtgccctgacttgcctgtgcgtagcaatgaaacggcaggtcctgtgctatgaactgtttcagtcaaaaacacgacacaggaaatttaaggagatccaggtaccgtacaatgttcagtggatggcaatttttagcgaacaactttgtgtaggttttcagagcggcttcctgagatatccattgaacggagagggtaatccatacagcatgctgcacagcaacgaccataccctctctttcattgcccaccaacccatggacgccatttgcgccgtggagataagcagcaaggagtatctgctgtgttttaattccattgggatttatactgactgccagggtcggcgatctaggcagcaggaactaatgtggcccgcaaaccctagctcatgctgctacaacgccccttacctgtcagtgtactcggagaacgccgtggacatttttgacgtaaattctatggaatggatccagacactccccctcaagaaagtcagaccactcaataacgaaggcagccttaatctcttgggcttagagacaatcaggcttatctacttcaaaaacaaaatggctgagggggatgagctggttgtaccagagacatccgataacagtcgtaagcaaatggtccgcaatattaataacaaaagacgctactcctttcgggttccagaagaagagaggatgcagcagagacgagaaatgctgagggaccccgagatgagaaataaactgatcagcaaccctaccaattttaaccatatcgcccacatgggtccaggcgacggcattcaaatccttaaagatctacccatgaaccctcgcccacaggagtcccgcacggtgttctcaggctctgtgagcatcccttccataaccaaatcacgaccggagccaggtagatctatgtcggcatcatctggcttatccgcgcgaagtagcgcccaaaatggatccgcacttaagcgagaattctccgggggaagttactctgcaaaaagacagccaatgcccagcccctcggaaggaagtctgagctcgggtgggatggaccaggggtctgatgctccagccagagactttgatggagaggacagtgatagtcccaggcactcaacagcctctaattcttccaatttgtcaagtccacccagtccggcttctcctcgtaaaaccaaatccctaagtttagagtcaactgatcgagggtcttgggatccata

SEQ ID NO: 217685 - DNA, 5160 bp, synthetic construct
  misc_feature 1..5160: note = Description of Artificial Sequence: Synthetic coding sequence
  source 1..5160: mol_type = other DNA
atgtcaggtgaagtgcggttacggcaattggaacagtttattctggacgggcctgcccaaactaatggacagtgcttttcggtggagaccctccttgatattcttatttgcctttacgatgagtgtaataattccccactgcgcagagaaaaaaacatcctggagtatctcgaatgggctaagccattcacgtccaaagtcaaacaaatgcggttgcatagagaagattttgagattttgaaggttattggcaggggggcttttggagaggtcgcagtggttaagcttaagaatgccgataaggtgttcgcgatgaaaattttaaacaagtgggagatgctcaagcgggcagaaacagcttgtttccgcgaggaaagggacgtcctcgtcaacggtgacaacaagtggattactacattacactatgctttccaagacgacaataacttgtacctggtcatggattactatgtcggcggtgatttactgacacttctcagtaagtttgaagataggcttcccgaagatatggccagattttaccttgctgagatggttattgccatcgacagcgtgcatcaactgcactacgtccatagggatatcaagccagacaatatcctaatggatatgaatgggcatatccgactagctgatttcggctcttgtttaaagttgatggaggacggaaccgtgcaaagtagtgtggccgtgggaaccccagactacatctctcctgagattctccaggccatggaggatggcaaaggccgttatggtcctgagtgcgactggtggtccctgggcgtgtgcatgtacgagatgctgtatggggaaaccccgttttacgctgagtcgctggttgagacttacggcaagatcatgaaccataaagagaggttccaatttccagcacaagtgactgacgtgagcgagaatgccaaggatctgattagacgactaatttgctcccgggagcacaggctcggccaaaacggcattgaggactttaagaagcacccattttttagcggcatcgactgggataatatccgcaattgcgaagctccgtatattccagaggtaagcagtcccactgatacaagtaacttcgatgttgatgacgactgtctgaagaacagcgaaaccatgccccctcctacacatactgccttctccggacatcacctcccattcgttggattcacatataccagttcatgcgtgctgtccgaccgttcatgcctgagagtcaccgccggacccacctctttggacttggatgtgaatgttcagcggacgctggacaataatctggccaccgaagcctacgagcggaggatcaaacggctggaacaggaaaagttggagttgagtcgtaaacttcaggaatctacacaaacagtgcaggccctgcagtacagcaccgtcgacggcccactcaccgcctcaaaggatctggagattaagaacctgaaggaagagattgagaagcttaggaaacaggtgactgagtccagccaccttgaacaacaactcgaagaggcaaacgctgtgcgacaagaattggacgatgcttttcgacagataaaggcgtatgagaagcagattaagacgctccagcaagaaagggaggatctcaacaaagagctggttcaagcaagcgagaggctcaagaatcagtccaaagagcttaaggacgctcactgccagcgaaagctggccatgcaagaattcatggagataaatgagcggttaacagagttgcacacacagaagcagaaactggccaggcatgtccgagataaagaggaggaagtggaccttgtgatgcagaaggtggagagtctccggcaggaacttcgacgcaccgagagagccaagaaagaacttgaagtccatacagaagccttggccgctgaggcaagcaaggatagaaagctccgtgagcagtccgaacactatagcaagcaactcgagaatgagctcgagggactaaagcaaaaacagatcagctactcccccggtgtctgcagtatcgagcatcagcaggagattaccaagctgaaaacagacttggaaaagaagtcaattttttacgaagaagagctttcaaaaagagaggggatccacgccaatgaaataaagaacctgaagaaagaactgcacgacagtgagggacagcagctggcattaaataaagagattatgattctgaaagacaaactggaaaagacgcgtcgagaatctcaatcagaaagagaagaattcgaatccgaattcaagcaacaatacgagcgggagaaagtcttgctgacagaggagaataaaaagctcacaagtgaactagacaagcttactactctctatgagaatctgtctatccacaatcagcagttagaggaagaggtgaaggacctggccgacaaaaaagagtcggttgcacactgggaggcacagattacagaaataattcaatgggtaagtgatgaaaaggacgcacgtggctacttgcaggctctcgcttccaagatgacggaggagctggaagccttgcgcaattctagcttaggaacccgcgctacagatatgccatggaagatgcggagattcgcgaagttggatatgagtgccagattagagttacaaagcgctctggatgcagaaatccgcgcaaaacaagctattcaagaggagctcaataaggtcaaggcatctaatatcatcacggagtgcaagctaaaagattcagagaaaaagaatctagaattgcttagcgagatcgaacagttgataaaggacactgaggagctgaggtctgaaaaaggaattgagcaccaggatagtcaacattcttttttggcttttctcaatactcctactgacgctcttgaccagtttgagaccgttgactctacgcctctgagcgttcatacgccaaccttgcggaagaaggggtgccctggctccaccgggtttccaccaaaaaggaagacccaccagttcttcgttaagtcatttaccactcccactaagtgccatcagtgcacatctctgatggttgggctgattagacagggttgctcttgcgaagtctgtggtttctcatgtcatatcacatgtgtgaacaaagcacctaccacttgtcccgtgccccctgaacagaccaagggcccactggggatcgaccctcagaaggggatcggaacagcttatgagggccatgtcagaatacccaagccagcaggtgttaaaaagggctggcaaagagcacttgcaatcgtttgtgatttcaagctattcctgtatgatatcgccgagggcaaagcaagccaaccgtcagtagtcatctctcaagtaatcgatatgcgtgacgaagaattttccgtttcttcagtcctggctagcgacgtaatccatgctagtagaaaggacattccctgcatttttcgcgtgacagctagtcaactatctgcaagcaacaacaagtgctcgattcttatgctcgccgacactgaaaatgagaaaaacaaatgggttggcgtcctgtctgaattacataagattctgaaaaaaaataaattccgggatcgctctgtttacgtacctaaggaagcatacgacagtactctgcccttgatcaagacaactcaagctgccgcaataatagaccatgagcgtattgccctgggaaacgaagaaggcctgttcgtcgtccatgtgaccaaagacgaaataattcgcgtgggggacaacaagaaaatacatcaaatcgaactcattcccaacgatcagctcgtggcagtgataagcggcagaaacagacatgtccggttattcccgatgagcgccctggacggtcgtgagacagatttctataagttgtccgaaacaaaaggatgccagactgtgacaagtggcaaagtgagacacggggctctgacttgcctctgcgtagccatgaaacggcaggtgctctgttacgaactgttccagtccaagacccgacaccgaaaatttaaagaaattcaggtcccctacaatgtccaatggatggccatctttagcgaacaactgtgcgtgggcttccagagcgggttcttgagatacccactgaatggtgaaggcaatccttactcgatgcttcactctaacgatcacacactgtcgttcatcgcccatcaacccatggatgctatctgcgctgtcgaaattagctctaaggagtaccttctgtgcttcaatagtatcggcatctacacagattgtcagggaagacggtctaggcaacaggaactcatgtggccagcaaatccatccagctgctgttataacgccccatacctcagcgtgtattccgagaacgcggttgacatctttgatgtgaattcaatggagtggattcaaactttgcccttaaaaaaggtgcggccattgaataatgagggttcgctgaacttgctggggttggaaactattcggctcatttatttcaagaataagatggccgagggcgacgagctggtagtgcctgaaacttccgacaactctcgcaagcagatggtgagaaacatcaacaacaagagacgctattcatttcgggtgccagaagaagaaagaatgcagcagaggagggaaatgttacgagaccccgagatgagaaacaaattaatttctaatcccacaaacttcaaccacattgcgcacatgggacccggtgacggcatccagatcctgaaggacctgccgatgaaccccagaccacaagagtcccggacggtgttcagcggctcagtctcaattcccagcatcacaaagagtaggccggagcctggcagaagcatgagtgcctcatcagggctgagcgccaggagtagtgcccaaaatggatctgcactgaagcgggaattctcagggggatcatacagtgccaaacgccagcccatgccctctccatctgaaggatcactctcctcgggcggaatggatcaggggtccgacgctcctgccagagacttcgatggagaagactcagattcacccagacatagtactgcttcaaatagttccaatctgtcatctccacctagccccgcaagtccacgaaagactaaatccttgagcctggagagtactgatcgagggagctgggacccgtac

SEQ ID NO: 217686 - DNA, 1641 bp, synthetic construct
  misc_feature 1..1641: note = Description of Artificial Sequence: Synthetic coding sequence
  source 1..1641: mol_type = other DNA
tgagacattgcagaaggaaaagcctcacagccttcagtcgtgatcagccaggtgattgatatgcgtgacgaggaatttagtgtgtcctctgtcttggcttcagacgtgatccacgctagcagaaaagacattccgtgtatattcagggttacagcctcacaattatcagcatccaataacaaatgctcaattctgatgctggctgacacggagaatgaaaaaaacaaatgggtgggggtcctttctgaacttcataagattctaaaaaagaacaaatttagggacaggtctgtgtacgtgccgaaggaggcttatgactccacactgccactgattaaaactacacaagcagctgccataattgatcacgaaaggatcgccctcggtaatgaggaaggcctgtttgtcgtacacgttaccaaggacgaaattatccgcgttggcgataataaaaaaattcaccagattgagctcattccaaacgaccagcttgtggccgtgatctctggaaggaacagacatgtaagactgttccctatgtctgcccttgatggacgcgaaacggacttctacaagctttcagagaccaaaggatgccagacagttacttcaggtaaggttcggcatggggcattgacatgtctatgcgtcgctatgaaaagacaagtgctgtgctatgaactgtttcagtccaaaacgcgacacaggaagttcaaggagatccaggtgccatacaacgtgcagtggatggcgatattcagtgagcaattgtgcgtcggatttcaatcaggatttctgcgttatcccctcaacggcgaaggcaatccgtattcaatgcttcactcaaatgaccacactttgtcatttattgctcaccagcccatggatgccatttgtgccgtggaaatctcttctaaagaatacctgttatgcttcaatagtatcggcatctatacagactgtcaaggcaggcgaagccgccagcaggagctgatgtggccggctaaccccagctcgtgctgctacaatgccccatacttgagcgtgtactcggagaacgccgttgacatcttcgatgttaattccatggagtggatccagacccttcctctgaagaaggtccggcctcttaataatgaggggtccctgaatctgctgggcctcgaaacgatacgcctgatctatttcaagaacaaaatggccgagggcgacgaactggtcgtaccagagacctctgacaattccagaaaacagatggtgcggaacataaataacaaacggaggtatagcttccgtgtgcccgaagaggaacgcatgcaacagcggagggagatgctgagagacccagaaatgaggaacaagctcatcagtaacccaacaaactttaatcacatcgcacacatgggccctggagacggcattcagatactgaaggatttgcccatgaatcctagaccccaggaatcgcggacagtgttctcaggaagcgtgtccatcccaagtatcaccaaatctagacccgaacccggaagatctatgtccgcttcttctggtctctccgccagcaagtgtagaggctaccgcaaagtccccctaaggcaaggggatcctcagctcccccctcttctgagtagaggctag

SEQ ID NO: 217687 - DNA, 2187 bp, synthetic construct
  misc_feature 1..2187: note = Description of Artificial Sequence: Synthetic coding sequence
  source 1..2187: mol_type = other DNA
taagttagcgatgaaaaagatgcaaggggttatttacaagcattagcctctaagatgacagaggaacttgaagccctccggaatagcagcctgggaacccgggctacagacatgccatggaagatgaggcggtttgcgaagctggacatgtcagcaaggctggagctccagtcagcgctggatgccgaaatccgagccaaacaggcaatccaggaagaactgaataaggtgaaagccagcaacatcatcacagaatgcaaactgaaagacagcgagaaaaagaacctcgagctgctgagtgagatagagcaactgatcaaagacactgaagagcttcgttcggagaaaggcatagagcatcaggacagccagcattcatttcttgcatttctaaacacaccaactgacgccctagatcaatttgaagatagtttttcgagcagcagttcgtccctgatagattttctggacgataccgacccggtggagaacacctatgtgtggaaccccagcgtcaagtttcacattcagtcccgatccacatctccatcaacatcgagcgaggccgagcccgttaaaacagtagactctacccctctcagcgttcatacccctacgctccggaagaaggggtgccccggtagcactgggttcccacctaaacgcaagacgcaccaattcttcgtgaaaagttttacaacacccacaaagtgccatcagtgtactagtctgatggtgggtcttatccggcagggctgttcttgcgaagtttgtggattcagctgtcatatcacctgcgtcaacaaagcccctacgacatgccctgtgccgcctgagcagactaaaggcccactaggtatagatcctcagaaggggattggtactgcgtacgaaggacatgtacgcatcccaaagcccgcaggagtgaagaaggggtggcaacgcgctcttgccatcgtgtgcgactttaagcttttcctctacgatattgctgagggcaaggcttcacagccgtcggttgtcatatctcaagtcatcgatatgagagacgaggagttctcggtatcatctgtgctcgcttccgatgtaatacacgcctctcggaaagacatcccatgtatattccgggtcactgctagtcagctgagcgccagcaataacaagtgctccatcctcatgctggcagacacagagaacgagaaaaataagtgggtgggagtgctctcagagttgcacaaaatcttgaagaagaacaaattccgcgaccggtccgtgtacgtgccaaaggaggcctacgacagcacgttgcctctgataaagaccacgcaagcagccgcaattatcgatcatgagcgcattgccctgggaaatgaagaaggcctgttcgtggttcatgtgaccaaagatgagattattagggtcggtgataacaaaaaaattcaccagatagaacttattccaaatgatcaactcgttgcagttatctctggtaggaatcgtcatgtgagattgttccctatgtccgcattagacgggcgagagacagatttttataagctcagtgaaaccaagggctgtcagaccgtcacttccggtaaggtgaggcacggcgcactgacctgcctgtgcgtggctatgaaacgccaggtgctttgttacgagctttttcagagtaagactcgtcaccgaaagtttaaggagatccaagtaccttacaacgtccagtggatggctatattcagcgaacagttgtgcgtcggttttcagagcgggttcctgagataccctttaaacggagaaggcaacccatactctatgctgcacagcaacgaccacactctgtcttttatcgcacaccagcccatggacgctatctgtgcagtcgagatatctagcaaagaatatctcctgtgctttaattccattggaatttacactgactgtcaagggaggaggtctcgccaacaggagctcatgtggccagcgaatccatcctcctgctgttataatgcgccttatctctcagtgtattccgagaacgctgtcgatattttcgacgttaactctatggagtggatccaaacactgcctttgaaaaaagtgcgacctctgaacaatgaggggtccctgaacctgttgggcctggaaaccatccggctaatttatttcaagaataagatggcatag

SEQ ID NO: 217688 - DNA, 3147 bp, synthetic construct
  misc_feature 1..3147: note = Description of Artificial Sequence: Synthetic coding sequence
  source 1..3147: mol_type = other DNA
taagaaggaattcacgcgaacgagattaagaatctgaagaaggagctgcacgactccgaggggcagcagctcgctcttaataaagagatcatgatattgaaagacaaactggaaaaaacacggcgagagtcccagtctgaacgcgaagagttcgaatccgagttcaaacaacagtatgagcgggagaaggtgctgctgactgaagagaacaagaaactcaccagtgagctggacaagctgaccaccttgtacgaaaacctttcgattcataaccagcagcttgaggaagaggtgaaagatcttgcagacaaaaaggagtctgttgctcactgggaggcccagatcaccgagattattcaatgggtgagcgacgagaaggacgctcgcggatatctgcaggctctcgccagcaagatgaccgaagagctggaagcactacgaaattcaagtctcgggacccgagcaactgacatgccatggaagatgcgacgctttgcaaaacttgacatgagcgcccgtctggagcttcagtctgccctagacgccgagatccgggcaaaacaggcgattcaggaggagctaaacaaagtgaaagcaagcaatattattacagagtgtaaactcaaggattctgaaaaaaagaacctcgagctgctttccgaaatagagcagttgatcaaagacacagaagaacttaggtcagaaaagggtatcgaacaccaggatagtcaacactctttcctcgccttcctgaatacgccaacagatgcgctggaccaatttgaaacggacccagttgagaacacttacgtgtggaatccctctgtgaagtttcacattcagtcccggagcacaagccccagcactagcagtgaagcagagccagttaaaaccgttgacagcacaccgctatccgtccacaccccaaccctcagaaagaagggatgccctggcagcaccggctttccccctaaaaggaaaactcaccaattctttgtcaagtcatttaccactccgacaaaatgccaccaatgtacttccctgatggttggacttattagacaggggtgtagttgcgaggtttgtggcttcagttgccatatcacctgcgtcaacaaggccccaacaacctgtccagtgcctccggaacaaacgaagggccctctcgggatcgatcctcagaaagggatagggacggcctatgagggacacgttagaatacccaaacccgctggtgtcaagaagggttggcaacgcgctctggcaatcgtttgcgactttaagctgtttctctacgatatcgcagagggaaaggcttcacaaccctccgtggtcatctctcaggtgatcgatatgagagacgaagaattctcggtctcttctgtgcttgcgtccgacgtgatccatgccagcaggaaggatatcccttgtatcttcagggtgacggcctcccagttatccgcctctaacaataaatgctcaatcctgatgttggccgataccgaaaacgagaaaaataagtgggtaggcgtgctgtcagagcttcacaaaatccttaaaaaaaacaagtttagagatagatcagtgtacgtaccaaaggaagcatatgactccactcttcccctcatcaaaaccacccaggcggctgcgattatcgatcacgaacgaatagccctgggtaacgaagaagggctcttcgtcgttcatgttacgaaggatgagatcattcgcgtgggcgacaacaaaaagattcaccagatagagctgattccaaatgaccagctggtcgctgtgattagtggcaggaataggcacgtgcgcctattccctatgtcagctcttgacggacgtgagacagatttctacaaactttcagaaactaagggatgtcagacggttacttccggcaaggtgaggcacggagcactcacatgcctgtgcgtcgccatgaagaggcaggttctgtgctacgaactgttccaatctaagactagacatcgcaaattcaaggagattcaagtgccttacaacgtgcaatggatggccatattcagtgagcaattgtgtgtgggcttccagtccggatttctgagataccccctgaatggtgaaggtaatccatacagtatgttgcacagtaatgaccacaccctttcctttattgctcatcagcctatggacgccatctgcgcagtggaaataagcagcaaggagtatctgttgtgctttaactcaataggcatttataccgactgccagggacgtagatcgaggcaacaggaactcatgtggcccgcaaatccgtctagttgctgttacaatgccccatacctctctgtgtactctgagaacgctgtggacatctttgatgttaactccatggagtggatccagacactgccattgaaaaaagtgagacctcttaataatgagggcagcttgaacctgttaggtcttgagacgatcagactgatttatttcaagaacaaaatggcagagggggatgagctggttgtacctgaaacgtccgataattcccggaagcaaatggtgcggaacataaacaacaagcgtcggtacagcttccgcgttccagaggaagagcgaatgcagcaacgaagagagatgcttcgcgaccctgagatgaggaataagcttatatctaatcccacaaacttcaatcacattgcccacatggggccaggtgacggcatccaaatcctgaaggacctccccatgaacccacggccacaggaatcacgcaccgttttctcgggatccgtcagtattcccagcataaccaagtcccggccagagccaggcaggagtatgagcgcttcttccgggttgagcgcgaggtcgtcagctcaaaatggatccgctctcaagcgcgagttttcgggtgggtcctattccgccaaacgccaacccatgcctagccccagcgagggtagtctgagtagtggcggaatggaccagggtagcgacgcacccgctagggatttcgacggcgaggacagcgactccccgaggcattctaccgccagcaattccagcaacttgtcatctccaccatcacccgcttcccccagaaagacaaagtctttgagtctggaatccacagatcggggaagttgggacccatag

SEQ ID NO: 217689 - DNA, 2955 bp, synthetic construct
  misc_feature 1..2955: note = Description of Artificial Sequence: Synthetic coding sequence
  source 1..2955: mol_type = other DNA
tgacagctcgaggaggaagtgaaggatctcgccgacaaaaaggaatctgttgcccactgggaagcccagattaccgagattattcagtgggttagcgacgagaaagacgcccgtggatatctgcaggccctggcctctaaaatgactgaggagctcgaggccctgcgaaactcgtccctggggacgagggctacagatatgccgtggaagatgagaaggtttgccaaactggatatgtcagctcgtctggaactgcagagtgcgctggacgccgagatacgtgctaagcaagccatccaggaggagttgaacaaagtgaaggcatcaaacataataacagaatgtaagctgaaagactcagaaaagaagaatctggaactcctgagcgagatcgagcagctaataaaggatacagaagaacttcggtccgagaaaggaattgaacatcaggacagtcaacattccttcctggcctttttgaatacaccaacagatgccttagatcagtttgagactgtcgactcaacccctctgagcgtccacacaccaacattgcgaaagaagggatgccctggatctaccggcttccctccaaagagaaagacccatcagtttttcgttaaatcctttactactccaacaaagtgccaccagtgcaccagtcttatggtgggactgattagacaaggctgtagttgtgaggtctgcggcttctcttgtcacattacttgcgtgaacaaggccccaactacttgtccggtgcctcctgagcagaccaaaggaccgctgggtattgacccacagaagggtattgggaccgcatacgagggacatgtgagaatacctaaacccgctggagttaagaaggggtggcagcgtgccctcgctattgtttgtgattttaagctgtttctatacgacatcgccgaaggaaaagcgtctcagcctagcgtggtcatcagccaggtcattgacatgagggacgaggagttttccgtaagcagcgttttagcatcagacgtgatccacgcctcacggaaggatattccatgtatatttcgagtcacagcatcccaactgtcagcttctaacaacaagtgcagcatcctgatgctggccgacacagagaacgagaagaataagtgggtcggggtgttaagtgagctgcataaaattctgaagaagaataagttcagggacaggtcagtgtacgtgcccaaagaggcttacgattccacgctgcctctgataaagacgacgcaggctgcagccataatcgaccacgagagaattgctctggggaatgaagaaggtctgttcgtggttcacgtgaccaaagacgagatcatccgagtgggagacaacaaaaagattcaccagattgagttaatcccaaatgaccagttagtggcggttattagcggacggaaccgccatgtccggctctttccaatgagtgcattggacggacgggaaacagatttttacaaactgtctgagaccaagggatgccagaccgtgacgtccggtaaggttagacatggggctctcacctgcctctgcgttgccatgaagaggcaggtcttgtgttatgaattattccagagtaagaccaggcaccgtaaattcaaggaaatccaggttccttataatgtacaatggatggccatcttttccgagcagctgtgcgtggggttccaatcaggattcctgagatatccccttaatggtgaagggaatccttactccatgctgcacagcaacgaccacacactctcatttatagcccatcagcctatggacgcaatctgcgcagttgaaatcagtagcaaggagtaccttctgtgtttcaattcaatcgggatttataccgattgccagggcaggagaagtagacagcaggagctgatgtggcctgcaaacccgtcatcttgttgctataatgcaccatacctttcagtgtacagcgaaaacgcagtggacatttttgacgtaaattctatggagtggatacagacactaccgctgaagaaggtccgtcccctgaacaatgaagggtccttgaacctcctgggactggaaacaattcgtcttatatatttcaagaataaaatggcagagggggatgaacttgtcgtaccagaaacctctgacaatagcaggaaacagatggtgcgcaatattaacaataaacgaagatactcatttcgggtgcccgaagaggaaagaatgcaacaacgtcgagagatgcttagagaccccgagatgcgcaacaagctcatcagtaaccccaccaactttaatcacattgcacatatgggtcccggagacggtatccagatcctgaaggaccttccaatgccaggtttcccatacccttcaccccaccaccacagtggtctcatctcaagccctattaactttgaacatatttatcatatgactgttaactctgcagagaagtttctgtcgcctgattccattaatccagagtactcccccagtttgcggtccgtaccgggaacaccttctttcatgaccctgagaaatcctcggcctcaggagagccgcaccgttttctccgggtctgtgtccatcccaagtatcacaaagtcaagacccgaaccagggcgaagcatgtcggctagcagtggccttagtgcaaggtcttcagctcagaatggtagcgcccttaagagggaatttagcgggggatcttattctgcaaagcgacagcccatgcctagcccatccgagggctctctttccagtggaggtatggaccagggttcagacgcccctgctagggactttgatggcgaggactcagatagtcctcggcattcaaccgcatccaattcgtccaacctgtcttcgcctccctcgccagccagtcccaggaagacaaaatcactgtcactggagagtactgaccgtggttcgtgggatccatag

SEQ ID NO: 217690 - DNA, 5100 bp, synthetic construct
  misc_feature 1..5100: note = Description of Artificial Sequence: Synthetic coding sequence
  source 1..5100: mol_type = other DNA
atgtcgggtgaggtaaggctgcggcaactggagcagtttatcttagacggcccagcacagaccaatgggcaatgttttagcgtagagacattattggacatcctgatatgtctgtatgatgagtgtaataactcacctttacgccgagagaaaaacatcctcgaataccttgagtgggcgaaacctttcaccagcaaagtgaaacagatgcgcctccatcgtgaggactttgagatcctaaaggtgattgggagaggtgccttcggcgaggtcgccgttgtaaagctgaagaatgccgataaggtctttgccatgaagattttgaataagtgggaaatgctcaagcgagccgaaaccgcttgcttcagagaagaacgagacgtgttggtgaacggtgacaataagtggattacaacacttcactacgcatttcaggacgacaataatctctacctagtaatggattattatgttggaggggaccttctcacactcttaagcaagttcgaagacagattgccggaggacatggcaagattctacctggccgagatggtcatagccattgactctgtgcaccagctgcactatgtccacagagacatcaaacctgataacattctgatggacatgaatggccatattcgcctggccgacttcgggagctgtttaaagctgatggaggacgggactgtgcagtcgtctgtggctgtggggacacctgactacatttccccagagatcctgcaggcaatggaggacggaaaagggcgatacgggcctgaatgtgactggtggtctctaggtgtgtgtatgtatgagatgctttacggggaaacccccttttatgctgagtccctggtcgagacttatggaaagattatgaaccacaaagagcggttccagtttcccgcacaggtgaccgacgtgagcgaaaacgcaaaagatctgatccgtcgtctgatatgttcccgggaacatcgattgggacaaaatggcatagaagactttaaaaaacatccctttttctcaggcattgactgggataacataaggaattgcgaggccccttatatccccgaggtttcctccccaaccgacacatcaaactttgacgtggacgacgattgcctgaagaattccgaaacgatgcccccaccaacccacacggcgttttctggtcatcatcttcccttcgtcggcttcacatacactagctcctgtgtcctatctgaccgaagttgcctgcgggtgacagccggacccacgagcctggacttggacgtcaacgtgcagcgaacactcgataacaaccttgccactgaagcgtatgagcgaagaattaagcgcctggaacaggagaaactagagttgagcagaaagttgcaggagtctacacaaacagttcaggctctgcaatactccactgtcgacggacccctcacagctagtaaagacctggagattaagaatttgaaggaggagattgagaagctccggaagcaggtgaccgagtcttctcaccttgagcagcagctggaggaggccaacgctgtccgccaggagctggacgacgcctttcggcagatcaaggcttacgagaagcagatcaaaaccctgcaacaggaaagggaagatttaaataaagaactggtgcaagccagtgagagacttaagaatcagtcaaaggagttgaaagacgcacactgccaaaggaaattggctatgcaagagtttatggagatcaacgaaaggctgactgagctgcatacccagaagcagaagcttgcccgtcacgttcgcgataaagaggaggaggtagaccttgtgatgcaaaaggtggagtctcttcgacaagagctgcgacgcacagagagagccaaaaaggagctggaggtgcataccgaggccttggcagcagaggcttcgaaggatcgcaagctgcgtgaacaaagcgaacattatagtaaacagctggaaaacgaactggaaggtctcaaacaaaagcagatctcttattccccaggagtgtgtagcatagagcatcagcaggagattacaaagctgaagacggacctggaaaaaaagagcattttctacgaggaggaattgagcaagagagagggtattcacgctaacgagattaagaacttgaagaaagaactccacgatagcgagggtcaacagctggctctcaataaagagattatgatcctgaaggataagctcgagaaaactagacgtgaaagccagtcagagagagaggagttcgagagcgagtttaaacagcagtatgagcgtgaaaaggtgcttctgacggaggagaataaaaagctgaccagcgaattagataaactgacaacactgtatgagaatctcagcattcataaccagcagctcgaagaggaagtgaaagatcttgcagataagaaggaatcagtggctcattgggaagctcagataactgaaataatccagtgggtttctgatgaaaaggatgcacgaggatacctgcaggcactggcatccaaaatgaccgaggagctcgaggccttacgcaactcaagtctgggcacgcgcgcaactgacatgccatggaagatgagaaggttcgcaaagctcgatatgagtgctcggctagagttacaaagtgccctcgatgcagaaattcgggcaaaacaggcaatccaggaggaactgaacaaggttaaggcaagcaacatcattactgaatgtaagcttaaggatagtgagaaaaaaaaccttgagctcttaagcgagatagaacaattgatcaaggatacagaagagttgcggagcgagaaggcaagcaaaggacggagaacagtggattcaacgcctttgtctgtgcatacgcctaccttgaggaaaaagggttgtccgggtagtaccggctttccgccaaagcgcaagacacaccagttctttgtgaaaagttttaccacgcccaccaaatgccatcagtgtaccagtttgatggttgggctgatcaggcagggctgtagctgcgaagtctgcggcttttcctgtcacattacttgcgtgaacaaggcccctaccacatgtccggtgccgcctgagcagacaaagggccctctgggcatcgacccgcaaaaggggataggcaccgcgtacgaggggcatgtgcggatccccaaacctgctggcgtcaagaagggttggcagcgtgccttagccatagtgtgcgacttcaaattgtttctgtacgacatagctgagggcaaggccagccagcctagcgtggtcatctcccaggtgatcgatatgcgtgatgaggaattctcggtgtccagtgtgttggcttctgatgttatccacgcctccaggaaagacataccatgcatttttcgagtgacagcaagccagctaagtgccagcaacaacaagtgcagcattttgatgttggccgacactgagaatgagaagaacaaatgggtgggggtactctcagaactccacaagattctcaagaaaaataaattccgggaccgttccgtctacgtgcctaaggaggcatacgacagcacgcttccgttgataaaaacgacccaagctgcggctataattgaccacgaaagaattgccctgggaaatgaagaaggattatttgtcgtgcatgtaacgaaggacgaaattatccgggtcggagacaataaaaaaattcatcagatagaattgatacctaatgaccagctggtggccgtgatctccgggagaaatcggcatgtacgtctgtttcctatgtcggcactagacggaagggagaccgatttctataagttgtcggagacaaaggggtgccagaccgtgacatccgggaaggttagacacggcgcactgacttgtctctgcgtcgctatgaagcgtcaggtgctgtgctatgagctgtttcagagtaagactcggcataggaagtttaaagagatccaggttccatacaacgtgcagtggatggctatttttagcgagcaactgtgtgtaggcttccagagcggcttcctgcgttaccctttgaacggcgaagggaacccgtactcaatgctccattctaacgaccatactctgagcttcatcgcccatcagccaatggacgctatctgtgccgtggagatttcttccaaagaataccttctttgttttaattctattggcatctatacagactgccaggggagaaggagtcggcagcaggagcttatgtggcccgctaatccttcctcctgctgttacaatgctccctacctgagcgtgtactcagagaatgcggtggatatttttgacgtgaatagcatggagtggatccagacactgccgctcaaaaaggtgcgacccctaaataatgaagggagcctgaatctgctgggtctggaaacaatccgtcttatttactttaaaaacaagatggccgagggggatgagctcgtcgttcctgagaccagcgacaactcgcgaaagcaaatggtacgcaacatcaataataaaagaagatattcatttcgagttcctgaggaggagaggatgcagcagagacgggagatgctgagagaccccgaaatgagaaacaagctgatcagcaatcctaccaatttcaaccatatcgcccacatgggtcctggggacgggattcaaatcctgaaggacttgcctatgaaccccaggccccaggaatcccgaaccgtgttctccggcagcgtaagtatcccctctatcactaagtccagaccagagccaggtcggtccatgagtgcttcctctggtctttctgcgaggtcgtctgctcagaacggttcagccttaaagagagaattctcaggcggatcatactctgccaaacggcagccaatgccgagccccagcgagggcagtttgtccagtgggggaatggatcagggctctgatgccccagcccgtgacttcgacggggaggacagcgactcccctaggcacagcacagcttcaaactcatctaacctgtcatctccgccatctccagcctcaccaagaaaaacaaaaagtctatcgttggagagcaccgacagaggtagttgggatccttag

SEQ ID NO: 217691 - DNA, 5135 bp, synthetic construct
  misc_feature 1..5135: note = Description of Artificial Sequence: Synthetic coding sequence
  source 1..5135: mol_type = other DNA
atgagtgctaaggttaggttgaagaagctagagcagctcctgttagacggtccatggagaaacgagtctgctctgagcgttgagaccctactagatgtgttagtgtgcctttacaccgagtgcagccattctgcgctgcggagagataagtatgtcgccgagtttttggagtgggcaaagccatttacacagctcgtcaaggaaatgcagctccatagagaggactttgagataattaaggtgatcggacgaggtgccttcggggaagttgccgtggtaaagatgaaaaacactgagagaatttacgctatgaaaatactcaacaagtgggaaatgctgaagagggcagagactgcctgcttcagagaagagcgagatgtgctggtgaacggagactgtcagtggataaccgcactccattacgcctttcaggatgaaaaccatctgtatctagtcatggactactatgtgggcggagacttgctgacattgctcagcaagttcgaagataagttgcctgaagatatggctcgcttttatattggtgagatggtcctcgccattgattccattcaccagctgcattatgtccacagggacataaagccagataatgtgttgctcgacgtgaacggacacattagacttgccgactttggctcctgcttaaagatgaacgatgatggaaccgtccagtctagcgttgccgtgggaacgcccgactacatatcacccgagatactgcaggccatggaggatgggatgggtaagtatggcccagaatgcgactggtggagtttgggcgtctgcatgtatgagatgctctacggtgagacacctttctacgcagagagcttggtcgagacatacggcaagatcatgaaccacgaggagaggtttcagttccctagtcacgtgactgacgtgtcggaagaggccaaagacttgattcagcgattgatttgttcccgcgaacgtagactcggccaaaatggaatcgaggatttcaaaaagcatgcctttttcgaaggtctgaactgggagaacattcgcaacctcgaggccccttatatccccgacgttagcagtcctagcgatacctcaaattttgatgtggatgatgatgtactacgtaataccgagattcttccccctggaagccacacagggttctcaggcctgcacctccctttcattggttttacattcacaaccgagtcctgcttctctgaccggggatctctgaaatccattatgcagagtaatactctaacaaaggatgaagatgttcaacgcgacctggagcactcgctgcagatggaagcttacgaaaggcgcattagaaggctcgaacaggaaaaactagagctgtccagaaagctccaagaatccacccaaactgtgcagtcattacatgggagtagcagagcgctttcgaactccaaccgggacaaggaaattaagaaactaaatgaggaaattgagcggctcaaaaataagatagctgacagcaacaggctggagcgtcaactggaggatacagtggctctgcgccaggaaagagaggactcaacacagcggctgaggggtttagagaagcagcatagagttgtgcggcaggaaaaggaggagctgcacaaacaacttgtggaggctagtgaaagactgaagtctcaggccaaagaacttaaagatgcacaccaacaacgtaagctggccctgcaggaattctccgagttaaacgagcggatggctgagctgagagcacagaagcagaaagtctctaggcaactgagggataaggaagaggagatggaggtcgctacgcaaaaggtggacgccatgcgccaggagatgagaagagctgaaaagctcagaaaagagcttgaggcgcaactcgacgacgctgtggccgaggcaagtaaagagcgcaagttgcgcgagcatagtgagaatttctgtaagcaaatggagtcagagctggaagccttgaaggtaaagcaagggggacgaggagctggcgctaccttggaacatcagcaggaaatttccaagatcaaatccgaactggagaagaaggtcttgttctacgaggaagagttagtgagacgcgaggcctcacatgtgttggaggttaagaatgtgaagaaagaagtccacgacagcgagagccatcagctcgctttgcaaaaagagattctgatgctgaaagataaactggagaagtctaagcgcgagagacacaacgaaatggaggaggcggtaggaacaataaaggataagtatgagcgcgagagagctatgctttttgatgagaacaagaagctgaccgcagagaatgaaaagttatgttccttcgtggataagctgactgcacagaatagacagctcgaagacgagctccaggacctggcagctaaaaaagaatcagtggcacactgggaagcacaaatcgcagagatcatccaatgggtgtctgatgagaaggacgctcggggttatctgcaggcactggcttccaagatgactgaggagctggaagcattgagatcgtcctctcttggctcgaggacacttgatcctctctggaaagtgaggagatctcagaagctggatatgtccgccagactggaactgcagagtgctttggaagccgaaattcgcgctaagcagctggtccaggaagagttgagaaaagtgaaggacgccaacttaacactggagagcaaactgaaagactctgaggccaagaacagagagctgcttgaggaaatggaaatcctcaagaagaaaatggaggaaaaattccgggctgacacgggcctaaagttacccgacttccaggactctattttcgaatactttaacaccgcgccattagctcacgacctgacgttcaggaccagcagcgcttctgagcaggagacccaagcccctaaacctgaggctagcccgagcatgtccgtcgcagcatctgagcagcaagaggacatggcacgacccccacagaggccctctgcagtccccctgcccaccactcaagccctggctctggccggacccaaaccaaaggcccaccagtttagcatcaaatcattttcctcaccaacacaatgcagccattgcacatctctgatggttggtttgatccgacagggatatgcgtgtgaggtttgctcctttgcctgccacgttagctgtaaagatggcgcaccgcaagtgtgtcctattccgcctgaacagtcaaaaagacctctaggggtcgacgtgcagcgcggaatcggcacagcttataagggacacgtgaaagtccctaaacccacaggtgttaagaaaggctggcagagagcctacgccgtcgtctgtgactgcaagttgtttctgtacgatttgcctgaggggaagagcacgcagccgggtgtcatcgcttcccaagttcttgacctccgagacgacgaatttagcgtgagtagcgtgctggctagcgacgttattcacgccacccggcgagatatcccctgcatctttagagtgacggcctcactgttaggcgcaccatcaaagacttccagtttgttgattctgacagaaaacgagaatgaaaaaagaaaatgggtggggatcctcgagggcctccagtccatcctgcacaaaaaccggcttagaaaccaggtagtgcatgttccactggaagcttatgatagctcactgccacttataaaggcaattctaacagcggctatcgttgatgcagatcgcatcgccgttgggctggaagagggtctctatgtgattgaagtgaccagagacgttatagtccgcgcagccgattgcaaaaaagtccatcagatcgaactggccccaagagaaaaaatcgtcattctgctctgcgggaggaaccatcacgtgcacctttatccctggtcgtcactggatggcgctgaggggagtttcgatattaaactgccagaaaccaagggctgtcagctaatggctacagcaactctgaagcggaattctggcacatgtctgtttgtggcagtcaaaaggctaatattgtgttacgaaattcagcgcactaaaccgtttcatcgaaagttcaatgaaatcgttgcacctggctccgtgcaatgcctggctgtgctgcgcgacaggctgtgtgtgggctaccccagcgggttttgtttgctctcaatccagggagatggacaacccctgaacttagttaacccaaacgatccgtccctagcttttttgagccaacagagttttgacgcactgtgcgcggtagagcttgagtccgaggaatacctcctgtgcttcagccatatggggttgtatgttgaccctcagggcagaagggcgagggctcaggagttgatgtggcccgctgctccggtggcttgttcatgtagcccaacacacgtgaccgtgtattctgaatatggagtggatgtgtttgatgttaggaccatggagtgggtccagacgattggcctccgcaggatccggcctctcaacagtgagggcaccctcaatctcctcaattgtgaaccacctcgactcatctactttaagtctaagtttagcggagcggtcctcaatgtgcccgatacctcggataacagcaagaagcagatgctgcggacaagaagtaagagaaggtttgtgtttaaagtgcccgaagaagaacgcctgcagcagagacgggaaatgcttcgcgaccctgagcttagaagtaaaatgatctctaatcctaccaattttaaccacgtggctcatatgggccctggtgatggcatgcaagtgttgatggatctgcccttatcggcagttcctccaagccaggaggaaaggccgggacccgcacccacaaacctggcccgtcagccaccttctcgcaataaaccttatattagttggccatctagcggaggctccgaaccatccgtcactgtgcccttgcggagcatgagcgaccctgaccaagacttcgacaaagaaccggactccgattctacgaaacactctaccccttctaactcttcaaaccccagcgggccaccaagtcccaattccccccatagaagtcaactcccccttgagggcctggagcaacctgcctgtgatactta

SEQ ID NO: 217692 - DNA, 1593 bp, synthetic construct
  misc_feature 1..1593: note = Description of Artificial Sequence: Synthetic coding sequence
  source 1..1593: mol_type = other DNA
aaggtgaggaggagccagaagctagacatgtcagcaagattggaactccaatccgctttggaagccgaaattcgcgcaaaacagctcgttcaggaagaacttcggaaggtgaaagatgccaatttaaccctcgagtctaaactgaaagacagcgaagcaaaaaatagggagcttctagaagaaatggagatcctcaaaaaaaagatggaggaaaaatttagagccgacactggcctgaaactgcctgactttcaggacagcatttttgaatattttaacacagctcctctggcacacgatctcactttcaggacatccagcgcctccgagcaggaaactcaggcaccgaaaccagaagccagtccctccatgagcgtggccgcatcagagcagcaagagcctaaagctcatcagttttccattaagtcctttagcagtccaacccagtgttcgcattgcactagcttaatggtgggactgattagacagggctacgcatgtgaggtttgttcgtttgcatgtcatgtttcctgcaaggatggggcacctcaggtgtgccctatcccccctgagcagtctaaaaggcccttgggcgttgatgttcaaagaggaatcggtactgcttacaaaggtcacgtgaaagttcctaagcccaccggagtgaagaagggatggcagagggcatacgccgttgtctgtgactgcaaattattcttatacgacctgcccgaggggaagtctacccagcctggagtgatagcctcccaggtgctggatctaagagacgacgagttttcggtatcctctgtacttgcttctgatgtgatacatgccacccggcgagacatcccctgcattttccgggttaccgcctcactcttgggcgctccatcgaagacaagtagcctcctgattttgacagagaacgaaaacgagaaacgaaagtgggttgggatcttggaggggctacagtcaattttgcacaagaataggttgaggaatcaggtcgtgcacgtgcctctggaggcctacgattcatctctgccactgatcaaggccattctgacagccgctatcgttgacgcggatcgtatcgctgtcggactggaagaaggcctctacgtcatcgaggtcacccgagacgtcatcgttcgtgcagcagattgcaaaaaggtgcaccaaatcgagcttgctcctagagaaaagatcgtaattctgctctgtggccgaaaccaccacgtgcatctttacccttggtcgagtctagacggggcagaaggctcgtttgacattaagctgcctgagaccaaggggtgccagctgatggcaaccgctacactcaagagaaattccggcacttgtctcttcgtcgccgtgaaacgcctgatcttatgttatgagatccagcggacaaagcccttccaccgtaaattcaacgagattgtggctcccggaagcgtgcagtgcttggctgtgctgagggacaggctgtgcgtgggatacccctcaggtttctgcttgttatctatccagggagacggtcagccccttaacttggtgaatcctaacgatccctcactggcatttctgtag

SEQ ID NO: 217693 - DNA, 4656 bp, synthetic construct
  misc_feature 1..4656: note = Description of Artificial Sequence: Synthetic coding sequence
  source 1..4656: mol_type = other DNA
atggagcgccgtctgcgggcactggagcagctcgctcgcggagaggctggagggtgcccgggactagatggcctattggacctgctgttggccctgcaccacgaattgtctagcggacctcttcggagagagagatcggtggcccagttcctcagttgggcctctcctttcgtgagcaaggtcaaagagctgcgcctgcagcgtgacgatttcgagattttgaaggtgattggaagaggggcttttggcgaggttaccgtggttaggcagcgggacaccggacagattttcgccatgaagatgctgcacaaatgggaaatgcttaaaagggccgaaacggcctgcttcagggaggagcgggacgtgctggtaaaaggagatagccgatgggtcactaccctgcattacgcctttcaggatgaggaatatctttaccttgtgatggactattatgccggaggagatttattgactctcttgtcaagatttgaggacagactgcctcctgaactagcgcaattttacttggcggaaatggtgctcgctatacactctctccaccagctgggctacgtccatagagacgttaagcccgacaatgtgctccttgatgtgaatggtcacattagactggctgacttcggttcctgtctgcgactgaatactaacggaatggtcgattcaagtgtggccgtgggtacccccgattatatctctcctgaaatactacaggctatggaggagggaaaaggacattatggaccgcagtgcgattggtggagcctgggcgtgtgtgcttatgaactcctgttcggcgaaaccccattctacgcagaaagcctggtggaaacatatggtaaaattatgaaccatgaggatcacttgcaatttccccctgatgtccctgacgtacctgcttccgcgcaggacttgatcagacagctactgtgtaggcaagaggagcgactggggagaggtggactggacgacttccgcaaccaccccttttttgaaggtgtggactgggagcgccttgcctcatctaccgctccatacattccagagctccgaggacctatggacacttccaactttgatgtcgacgatgacaccttaaatcatcctgggactctaccccctccgtctcacggggcattttcgggtcatcatctgccattcgtggggttcacctacacgtcagggagccattcccccgagtcttcatctgaagcttgggccgcactcgagcgaaagctgcaatgtcttgaacaggaaaaagtcgagttaagcaggaaacaccaggaagccctgcacgcccctaccgatcatagggagcttgagcaattgaggaaagaggtccagacgctccgtgaccggcttccagagatgttacgcgacaaggccagcttatctcagaccgacggtcctcctgccggttctcccggacaggactccgatctgcggcaggaactggacagactgcatagggagcttgcagagggccgtgcaggcctgcaagcacaggaacaggagctgtgtcgggctcagggccagcaagaggaattacttcagcgactgcaagaagcccaggagcgggaggccgcaacagccagccagacccgtgccctttcaagtcagctggaagaggcaagagccgctcagagagaattggaagcccaggttagttcactgtctcggcaggtgacccagctccagggtcaatgggaacagaggctggaggagtccagtcaggcaaaaaccattcacaccgcaagcgagactaatggaatgggtccgccagagggagggccacaggaagcgcagctccgaaaggaagtggccgctctccgggagcaattagagcaagctcattcccatcggccatccggcaaagaagaggccttgtgtcagctccaggaagaaaaccggaggttgtcacgcgagcaagagaggttagaggctgagctagcccaggagcaggagtctaaacagagactcgagggggagcgaagggaaacagagagtaattgggaggcccagctggctgacattttgtcttgggtcaacgacgagaaggtttcacggggttacctgcaagcattggccaccaaaatggccgaggaactggagagcttacggaatgtgggtacccaaacactgcccgcacgcccacttgatcaccagtggaaagctcgaagactgcaaaagatggaggcaagtgccaggctggaactgcaatccgctctcgaggctgagatcagggctaagcagggcctgcaagagaggttgacacaagtgcaagaagcccagctgcaggctgaacgcaggttgcaggaagcggagaagcagtcccaggctctccaacaggaactggctatgctccgcgaagagctgagagccagaggacccgtcgacactaagccttcaaatagccttattccctttttgtcttttagatcctcagagaaggacagtgccaaagaccctgggattagcggcgaagctacgagacacggtggcgagcctgacctgaggcccgaggggagacggagcctccggatgggcgctgtgttccctagggctccgaccgccaatactgccagtacggagggcctgcctgctaagccgggaagccatacacttcgaccacggtctttcccaagccccactaaatgccttagatgtactagtttgatgctcggcctaggacgccagggcctgggctgtgatgcctgcggctacttttgtcacacgacttgcgcgcctcaagcaccaccgtgcccagtcccccctgatctgctcagaacggcattaggtgtacacccagaaacaggcacggggacagcgtacgagggctttttgtccgtcccacgaccatctggagtccgcagaggatggcagcgagtgtttgcagcactgtctgactctcgtctcctgctgttcgacgcccctgatctgcgactgtcaccgccatctggcgcattgctgcaagtgctggatctgcgagaccctcagttttccgccacgcccgtactggcgtccgacgtgatccacgcacaaagcagggacctacccagaatcttccgggtgacaacgagccaactggcagtgcctcctacaacttgcacagttctcctgctggcagaatctgaaggcgagcgcgaaaggtggctgcaggtcctaggcgagctacaacgcttactgctggatgccaggccacggccacgtccagtgtatactctgaaagaagcgtatgacaatggcctccccctacttccccacaccctgtgtgccgctatcctcgaccaggaccgtctggccctagggacagaggaggggctctttgtaatccatctgcgatccaacgacattttccaagtcggagagtgtcggagggtccagcagttgaccttaagcccttctgctggccttctggtggtactttgcggacgaggtccgagcgtgaggctctttgctctcgcagaattggagaacattgaagtcgcaggagcaaaaatccctgagagtcgcggatgtcaggtgctcgccgctggatccatcctgcaagctaggacccccgttctatgtgtcgccgtgaagagacaggtgctgtgttatcaactagggcctggcccagggccatggcaacgccgtatccgcgaacttcaggctcctgctaccgtccagtccctgggactgctgggcgatcgactctgcgtgggcgctgccggtggattcgccctctatccccttctgaatgaagccgctcctcttgcgctcggtgccggtcttgtccccgaagagctgcctccctcccgaggagggttaggggaggctctaggagctgtggaattgtctctcagcgaatttctgctgttgttcacaaccgctggcatctatgtcgacggcgctggtcgcaaatccaggggtcacgagcttctctggcctgccgctcccatgggatggggatacgctgcaccgtacttgaccgtattctcggaaaatagcatcgatgtttttgacgtgagaagggccgaatgggtgcagaccgtgccgcttaagaaggttagacccctcaatccagaaggctccttatttctctacggaactgagaaggtcagactgacctacctgcgaaaccagctggcggagaaggacgaatttgatatccccgatcttactgacaacagccgtagacagctctttcgaacaaagtccaaacggcgattcttctttcgcgtgtccgaggagcagcaaaaacagcagcgcagagaaatgctcaaggacccattcgtgaggtcaaaacttatttcccctcctaccaacttcaaccatctcgtccacgtgggccctgcaaacggccgtcctggcgcaagggataagtcaccggctccagaggagaaggggcgtgtcgcaagggggtcgggtcctcagcgtccacattcctttagcgaagccctccgacgccctgcatccatggggagtgaggggctgggaggggacgctgatccaatgaagcgcaagccatggaccagtctgagcagcgagagcgtgtcttgcccccagggtagtcttagccctgccacatccttaatgcaggtgagtgagaggcctcgctctttacctctctctcctgagctagagtctagcccatag

SEQ ID NO: 217694 - DNA, 1176 bp, synthetic construct
  misc_feature 1..1176: note = Description of Artificial Sequence: Synthetic coding sequence
  source 1..1176: mol_type = other DNA
atgccaggccctcagggtggtcggggagccgctactatgagcctcggaaagttaagtccagtcggctgggtgagcagtagccagggcaagaggagattaacagctgatatgatctcccatcctctcggcgattttcggcataccatgcatgttgggaggggaggcgatgtctttggcgacacttcattcttaagcaatcacgggggtagctccggatccacgcataggagccctagatccttcctggccaagaagctgcagctggtccgaagggtgggagcacctccgcgtagaatggcttctccacccgcacctagtcctgctccacccgctatctctcctattatcaaaaatgctattagcctgccccagttaaaccaggctgcttacgactcactggtggtgggtaagctctccttcgactcatcaccaaccagcagcactgatggccatagcagctacgggttagattcgggattctgcacaatatcgcggttgccacgctcagaaaaaccacatgacagggatcgagatggtagcttcccaagcgagcccggtctgcgacggagtgattctctgttgtcattccggctggaccttgatctgggcccaagcttgctgtctgaactgctgggggtaatgtccctgccagaggcccctgctgctgagactccagcccctgccgcaaatcctcctgccccaactgcaaaccccactggacccgctgccaacccacctgcgacgacagcaaacccccctgcacccgcagctaacccatccgcacctgccgcaacccccactgggccagctgccaatccgcctgcacccgctgcaagttccaccccacatggccattgtccaaatggcgtgacagccggactgggacccgtggctgaggtgaagagctcccctgtgggtggcggaccgagggggccagcgggacctgcattgggcaggcactggggagccggttgggacgggggacatcactaccccgagatggacgctcgacaggagagggtggaagttcttccccaggccagagcttcctgggaatctctggacgaggagtggcgggctccccaggccggatctagaactccggtgccatccacagtccaggccaatacgtttgagtttgccgatgctgaggaggacgatgaagtcaaagtgtag

SEQ ID NO: 217695 - DNA, 183 bp, synthetic construct
  misc_feature 1..183: note = Description of Artificial Sequence: Synthetic coding sequence
  source 1..183: mol_type = other DNA
atgcccggaccacagggtggcaggggcgctgctacgatgagtctgggtaagctgtcccccgtcggctgggtgtctagttcccaaggcaaaaggcgcctaactgcggatatgataagccatcccctaggagactttcgacatactatgcacgtgggtcgaggaggggatgtttttggagattag

SEQ ID NO: 217696 - DNA, 213 bp, synthetic construct
  misc_feature 1..213: note = Description of Artificial Sequence: Synthetic coding sequence
  source 1..213: mol_type = other DNA
atgcccggacctcagggcggacgcggtgcagccacaatgtccctgggaaaactcagtcccgtggggtgggtcagttcctctcaaggaaagcgtagattgacagctgatatgatttcacaccctcttggggactttcggcatactatgcacgtcggacgcggaggagacgtgtttggggacactagtttcctttcaaaccatggcggtagctag

SEQ ID NO: 217697 - DNA, 147 bp, synthetic construct
  misc_feature 1..147: note = Description of Artificial Sequence: Synthetic coding sequence
  source 1..147: mol_type = other DNA
atgcctggtcctcagggaggtagaggagctgctaccatgtccctgggaaagctgagccctgtgggctgggtgtcgtcaagtcagggcaagcgtagactgaccgctgacatgatctcccatcccctgggagacttccggcacacctag

SEQ ID NO: 217698 - DNA, 633 bp, synthetic construct
  misc_feature 1..633: note = Description of Artificial Sequence: Synthetic coding sequence
  source 1..633: mol_type = other DNA
atgtctacaaaagtgcccatctatctgaaaaggggatccaggaaaggcaaaaaggagaagttacgtgacttactgtctagtgatatgattagcccaccccttggcgattttcgccataccattcacattggaagcggtggtgggtctgatatgtttggtgacatatcctttttgcagggcaaattccacctcttgccaggcaccatggtcgagggtcccgaggaagatggaacatttgacctccctttccagttcacacggactgccactgtgtgcgggcgtgagctgccagacggcccatccccactccttaagaatgccattagtctgcctgttatcgggggaccacaggcgttaacactgccgaccgctcaggcacccccaaaacctcctcggctgcatcttgagaccccccagcctagcccgcaagaggggggatctgtggatatctggcgaatccctgagacgggaagcccaaatagcggcctgactcctgagtccggagcagaggagccatttttatctaatgcatcatctctgctcagcctgcacgttgatttaggcccttctattctggatgacgtgctgcagatcatggatcaagacctggatagtatgcagatccccacatag

SEQ ID NO: 217699 - DNA, 633 bp, synthetic construct
  misc_feature 1..633: note = Description of Artificial Sequence: Synthetic coding sequence
  source 1..633: mol_type = other DNA
atgagcaccaaagtacccatctacctcaagaggggctctcggaagggcaagaaagaaaaactgcgggaccttttgtcctctgacatgatctcgcccccattgggagatttcaggcacacgattcatattggtagcggcggtgggtcggatatgttcggagatatatcttttctacaaggcaagtttcacctgctgccaggaacaatggttgaggggcctgaggaggacggcacgtttgatcttccgttccagtttacaagaaccgctaccgtttgtgggagggagttgcccgacgggccttcacccttactgaagaacgcgatctccctgcctgtgatcggaggaccgcaggctctaaccctgccaacagcccaagctcctcccaagcccccaaggctgcaccttgagactcctcaaccatcgccacaggagggaggcagtgtggacatctggcgtatacccgagaccggcagccctaacagcggcctcaccccagagagcggcgctgaggaaccctttctttctaacgcgtcaagcctcctcagcctccatgtcgacctgggcccttccatcctggacgatgtgctgcagatcatggatcaggaccttgatagcatgcagatacctacctag

SEQ ID NO: 217700 - DNA, 633 bp, synthetic construct
  misc_feature 1..633: note = Description of Artificial Sequence: Synthetic coding sequence
  source 1..633: mol_type = other DNA
atgagcactaaagtacctatttacttgaagaggggttcaaggaagggtaagaaggaaaagttgcgagacctcctttctagcgacatgattagtccccctctgggggactttaggcacacaatccacatcggatcaggagggggttcagacatgtttggcgatatctcatttctacagggcaagtttcacttacttccaggcaccatggtagagggaccagaggaggacggaacatttgacttgccctttcaattcactaggacggcaactgtgtgtggcagagagctgcccgacggcccttcaccactgctgaaaaatgctatctctctgcccgtaatcggcggtccacaggctctgactctgcccactgcacaggctcccccaaaaccaccccgactgcacctggagacgccgcagccatctccacaggaaggaggttccgtggatatctggaggatccccgagacgggctctccaaattcaggtctgacccccgagtccggagctgaggagcctttcctgtctaacgcctcatcattgctcagcctccatgtggatctggggccatcgatactggatgatgttctccaaataatggatcaggacttggattctatgcagatccccacctag

SEQ ID NO: 217701 - DNA, 765 bp, synthetic construct
  misc_feature 1..765: note = Description of Artificial Sequence: Synthetic coding sequence
  source 1..765: mol_type = other DNA
atgcctgccaaaactccgatatatctgaaggccgctaacaataagaagggcaagaagttcaagttacgagatatactgagcccggatatgatctctccccctctgggagattttcggcacacgatccacattgggaaagaaggccagcacgatgttttcggggatatctcattcctccaggggaattatgaactgctccctggcaatcaggagaaggctcacctgggacagtttccaggccataatgaattcttccgggctaactctacgagtgactcagtatttacggaaaccccttcaccagtgctgaagaacgcaatttctctgcccacaatcggcggatcccaggcccttatgctgcccttgctttctccagtgacattcaactccaaacaggaatcttttggtccggctaaactgcctcgcctgtcatgcgaacctgtgatggaagagaaggcgcaggagaaatcttccttacttgagaatgggaccgtccaccagggggatacctcctggggctcttcaggctctgcctcacagagtagccagggcagggacagtcattctagttctctcagcgagcaataccccgattggccggcagaagatatgtttgaccatcctactccttgtgaattgatcaaaggcaaaacaaaaagtgaggagtcactcagtgacctgaccggctctctcctgtctctgcagctggacttgggtccctctctgctggacgaggtcctgaacgtgatggataaaaacaaatag

SEQ ID NO: 217702 - DNA, 45 bp, synthetic construct
  misc_feature 1..45: note = Description of Artificial Sequence: Synthetic coding sequence
  source 1..45: mol_type = other DNA
atgcccgctaagacacccatctatttgaaggctgctaataactag

SEQ ID NO: 217703 - DNA, 108 bp, synthetic construct
  misc_feature 1..108: note = Description of Artificial Sequence: Synthetic coding sequence
  source 1..108: mol_type = other DNA
atgcccgcaaaaaccccaatctatctgaaggctgccaacaacaaaaaagggaagaagttcaagctgagagatatcctgtcaccagatatgattagcccaccactgtag

SEQ ID NO: 217704 - DNA, 651 bp, synthetic construct
  misc_feature 1..651: note = Description of Artificial Sequence: Synthetic coding sequence
  source 1..651: mol_type = other DNA
atgccagccaaaaccccaatttaccttaaggcagcaaacaacaaaaagggcaagaaattcaagctgagggatattctgtctccggacatgatatccccgccactgggagattttaggcacacaattcacatagggaaggaaggtcaacacgacgtgtttggagatatcagctttctgcagggaaattacgagctgctcccaggcaaccaagaaaaagctcacctgggacagttccctggccacaatgagttcttcagagccaactccacgagcgattcagtgttcacagagaccccttccccggtgctgaagaatgccataagtctgcccactatcggcggaagtcaggcccttatgctgcccttgctaagccctgtgacctttaattctaaacaggaatcttttggcccagctaagctacctagactgtcctgcgagcccgtgatggaggaaaaagcccaggagaaatcttccctgcttgagaatggcaccgtgcaccagggtgacacttcatggggctcttctggatctgcatcacagtcctcacaggggcgagattcccattcatcctccttatctgagcaataccctgactggcccgcagaggacatgtttgatcacccgacaccctgcgagctgattaaggggtag

SEQ ID NO: 217705 - DNA, 1071 bp, synthetic construct
  misc_feature 1..1071: note = Description of Artificial Sequence: Synthetic coding sequence
  source 1..1071: mol_type = other DNA
atgccaatattgaagcagctggtgagctcatcagttcattcaaagcggaggtctcgagcagacctgaccgctgaaatgatctccgcacccttgggcgacttccggcacaccatgcacgtggggagggctggggatgcatttggagatacatcgttcctgaattcaaaagcgggagagcccgatggtgaatcccttgacgagcagcccagtagctcttcatccaaacgaagcctcttatcccgaaagtttcggggtagtaagcgcagccagtccgttacaagaggagaaagggagcagcgcgacatgctgggatccttacgcgactcagcgctcttcgtcaaaaacgctatgtctctgccgcagctgaacgaaaaggaggcagcagagaagggtacctctaagctgcccaagtctctatcttcctcaccagtgaagaaagccaatgacggtgaggggggagatgaagaggcgggtactgaggaggcagtgcctcgtcggaatggcgcagccggaccacactccccagatccattactggacgaacaggcatttggcgatttaacagacctgcccgtggtacctaaagccacctatggacttaagcacgctgagagcataatgtcgttccacatcgatctcgggccttccatgctgggcgacgtgctgagcataatggacaaagaggagtgggacccagaggaaggagagggcggataccacggcgacgaaggcgcagcgggaactatcacccaggcgccaccgtacgccgtggccgctcctccactggctaggcaggaaggaaaagcaggcccagacctaccaagccttccatcacatgcgctggaggacgagggatgggccgcagccgctccctcccctggcagcgcacgctccatgggctcccacactacccgcgacagcagttcactgtccagctgtactagtggaattcttgaagaacggtcaccggcattcaggggcccagatagagcccgtgccgctgtgagcaggcagccggacaaagagttcagctttatggacgaagaagaggaggatgaaatccgggtgtag

SEQ ID NO: 217706 - DNA, 861 bp, synthetic construct
  misc_feature 1..861: note = Description of Artificial Sequence: Synthetic coding sequence
  source 1..861: mol_type = other DNA
atgcctatcctgaaacaactggtgtcctcttcagtgcacagcaaacggagaagcagggctgatctgactgccgagatgatttctgccccattgggcgactttcggcacacaatgcacgtcgggcgagcgggtgacgccttcggggatacatccttcctgaactctaaagctgctgagaagggtactagcaaacttccaaaaagtctttcttctagccccgtgaagaaagctaacgacggagaagggggtgacgaggaggccggaaccgaggaggcggtccctcgaaggaacggcgcagcagggcctcacagcccagacccgctgttggacgaacaggcgtttggggatctgactgacttgccggtggttccaaaagctacctacggcttgaagcacgccgagagtatcatgtccttccacatagatctgggaccctccatgctgggcgatgtgctaagcatcatggataaagaggagtgggatcccgaagagggcgaggggggatatcacggagacgaaggtgccgctgggacaattacccaggcccctccttatgctgtcgccgctccccctctcgcacgccaggaaggcaaagccggtccagatctaccaagtttaccctctcatgctcttgaggatgaggggtgggcagctgccgcaccaagccccggtagtgccaggagcatggggtcacatacgacacgagattcaagcagtctcagctcatgcacaagtggcatcctggaagagcggtcgcccgctttccgaggacctgatcgtgcgagagccgctgtaagcagacagcccgacaaagagtttagctttatggatgaggaggaagaggacgaaattcgggtatag

SEQ ID NO: 217707 - DNA, 1551 bp, synthetic construct
  misc_feature 1..1551: note = Description of Artificial Sequence: Synthetic coding sequence
  source 1..1551: mol_type = other DNA
atgactctgttgatcaccggcgactcgatcgtttcagctgaggccgtctgggaccacgtaacaatggctaaccgggagttagcatttaaggcgggtgacgtaatcaaggtgctggacgcttctaacaaagattggtggtgggggcaaatcgatgacgaagagggatggttccccgcttcttttgttcggctctgggtgaaccaggaagacgaggtggaggaaggccctagcgacgtgcagaacggccatcttgaccctaacagcgattgcctgtgcctgggtagaccacttcaaaacagggaccagatgcgggctaatgttatcaatgaaataatgagcaccgaaagacactacatcaagcatctgaaggacatctgcgaaggttacctgaaacagtgtcgcaagaggagggatatgttctcagacgaacaactaaaagtgattttcggaaatatcgaagatatttaccgcttccagatgggatttgtaagagacctcgaaaaacagtataataacgatgaccctcacctgtctgaaatcggtccatgcttcctggagcaccaggatgggttttggatttacagcgagtactgcaacaaccaccttgacgcatgtatggaactgtccaagctaatgaaagactccagataccagcattttttcgaggcttgtaggttgttgcagcagatgatcgatatcgccatagacggttttttgttgacaccagtccagaaaatctgcaagtatccccttcaactggccgaactactgaagtacaccgctcaagaccactccgattaccgatatgttgccgctgctctcgcagtgatgcggaacgtgactcagcaaataaatgagcggaaaaggaggctcgaaaatatagacaagatcgcacagtggcaggcaagcgtgctggattgggagggtgaggacattttggaccggtcctcagaactgatttacactggagagatggcttggatttatcagccctatggacggaatcagcagcgcgtgttcttcctttttgaccaccaaatggttctctgcaaaaaggatcttattcgcagagacatactgtactacaaggggcgtatcgatatggacaagtatgaagtggttgacattgaggacgggagagacgacgattttaatgtctctatgaagaacgcctttaaacttcataacaaagagacagaagaaattcacttgttttttgccaaaaaactggaggaaaagattaggtggctaagagccttccgcgaagagcggaagatggtccaggaggatgaaaagatcggtttcgaaatcagtgagaaccagaagcgacaggcggcaatgacggttcggaaagtgccaaagcagaagggcgtgaactcggcccgttccgttcccccaagctacccacccccacaggaccccctgaaccacggccagtacctggtcccagatggaattgcacagagccaagtctttgagtttacagaaccaaaaagatcccagagtcctttttggcagaatttttcacgactcaccccatttaaaaagtag

SEQ ID NO: 217708 - DNA, 1245 bp, synthetic construct
  misc_feature 1..1245: note = Description of Artificial Sequence: Synthetic coding sequence
  source 1..1245: mol_type = other DNA
atgcgagcaaacgtcataaacgagatcatgtctaccgaaaggcactacatcaagcacctgaaagacatctgtgaagggtatctgaaacagtgtcggaagcggagagacatgttctccgatgagcaactcaaggtgatttttggaaatatcgaggacatttaccggtttcagatggggtttgttcgggatttagaaaagcagtataataacgatgatccccatctcagcgagatcgggccttgcttccttgagcatcaggacggtttttggatctatagtgaatactgcaataatcaccttgatgcttgcatggaattgtctaagctgatgaaggattcacgttaccagcatttttttgaggcttgccgcctgctccagcagatgatcgatatcgcgattgatggcttcctcctcacaccagtccaaaagatttgtaaatatcccctgcagctagctgaattgctgaaatacaccgctcaggaccacagcgattacagatatgttgcagctgcactcgcagtgatgcggaatgttacccagcaaatcaacgagagaaagagaagactcgagaatatcgataagattgcacagtggcaggcatctgtactagattgggagggtgaggacatcctggataggtctagtgaactcatctacacaggcgaaatggcatggatttaccagccctacggacggaatcagcagcgagtgttctttctttttgaccatcagatggtgttgtgtaagaaagatttgatccgtagggacatactatactataagggaaggatcgatatggacaagtacgaggtggtggacatcgaagatgggagggatgacgattttaatgtctcgatgaagaatgcttttaagctgcacaataaagagaccgaggaaattcatctgttcttcgccaagaaacttgaagagaaaattaggtggcttagggcttttagggaagagcgcaagatggttcaggaggacgaaaagataggattcgagatatctgaaaatcaaaagcgacaagcagctatgacagtccggaaggtgcccaagcaaaaaggcgttaattcagctcgatcagtccctccctcatatcctccgccacaggatccactgaatcatggccaatatctggtgccagatggcatcgcacagtctcaggtgttcgaatttacagagcctaagcggagccagagtcctttttggcagaacttctcccggctgacaccctttaagaagtag

SEQ ID NO: 217709 - DNA, 1488 bp, synthetic construct
  misc_feature 1..1488: note = Description of Artificial Sequence: Synthetic coding sequence
  source 1..1488: mol_type = other DNA
atggctaacagagaattggcttttaaagctggcgatgtgataaaggtgcttgatgcctcgaataaggattggtggtggggccagattgacgatgaagagggctggtttcccgctagcttcgtcagattatgggtgaaccaggaagatgaagtggaggagggtccatcagacgtgcagaatgggcacttagatcccaactcagactgcctctgccttggcaggccactgcagaacagagaccagatgagagccaatgttatcaatgaaattatgtctacagagaggcactacattaagcatctgaaagatatctgcgaaggctatctgaagcagtgtaggaaaagaagggatatgttcagtgacgaacagttgaaggtcatttttggcaacattgaagatatatacagattccagatgggctttgtgagggatctagaaaagcagtataataacgatgatcctcacctaagtgaaattggaccatgttttctcgaacaccaggacggattttggatctacagtgaatactgcaataaccacctggacgcctgcatggagttgtctaaacttatgaaagattcccggtatcagcattttttcgaggcctgccggttactgcagcaaatgattgacatcgccattgacgggtttcttctgacacccgtgcagaaaatctgcaagtaccccttacaactggccgagctactcaaatacacggctcaagaccattccgattacagatacgtcgccgctgcccttgctgtcatgagaaacgtcacccagcagatcaatgaaaggaaacgacgactcgagaacatcgataaaatagcacagtggcaggcttctgtcttggattgggagggcgaagacatcttggacagatcctcagagctaatctacaccggcgaaatggcatggatctatcaaccgtacggacgtaatcagcaacgtgtattcttcctgttcgaccatcagatggttctctgcaaaaaggacctgatccgtcgggacatcctatactacaaaggcagaattgatatggacaaatatgaggttgtagacattgaagacggccgagacgacgacttcaatgtctccatgaagaacgctttcaagttgcacaataaggagacagaagagattcaccttttcttcgccaaaaagctcgaggaaaaaatccgttggctgagagcttttagggaagagagaaagatggtacaagaagacgaaaagatcgggttcgagattagtgagaaccaaaagagacaggccgcaatgaccgtgcgcaaggttccaaaacagaaaggggtgaacagcgcccgaagcgttcccccttcctacccccctccgcaggacccactgaatcatgggcagtatctggttcccgacggaatcgctcagtctcaggtattcgagttcacagaacctaagcggagccagtcacctttctggcagaacttctccagactgacaccatttaagaaatag

SEQ ID NO: 217710 - DNA, 1437 bp, synthetic construct
  misc_feature 1..1437: note = Description of Artificial Sequence: Synthetic coding sequence
  source 1..1437: mol_type = other DNA
atgttaatcactggcgatagtatagtctcagccgaagctgtctgggatcacgtcacgatggcaaatagagagcttgctttcaaagccggtgatgttatcaaggtgctagatgcaagtaataaagattggtggtgggggcagattgatgacgaggaggggtggtttccggcttccttcgtgcgattatgggttaaccaagaggacgaggttgaggagggtccatcggatgttcagaatgggcacctcgatccaaatagtgactgtctttgtttgggcagacctttgcagaaccgggaccaaatgagagcaaacgttataaacgagatcatgagcactgagagacactatatcaagcaccttaaggatatctgcgaggggtatcttaagcagtgtaggaaacgcagagacatgttctctgacgaacaattgaaagtaatttttgggaatatcgaggatatctatcgctttcagatggggtttgtgcgcgatctcgaaaaacaatataacaacgacgatccgcacctctccgagataggaccctgtttcctggaacaccaggatggattttggatttactcagagtactgtaacaatcacctggacgcatgcatggagcttagtaagctaatgaaggatagtagatatcagcacttcttcgaagcttgccgattgctgcagcaaatgattgacatcgccattgatggctttttgctcactccggtccagaaaatttgcaagtatcctctccagctggcagaattacttaagtataccgctcaagaccacagtgattatagatacgtggccgctgccctagccgtaatgcgaaacgtgacccagcagatcaatgaaaggaagaggcggttggagaacattgacaaaatcgcacaatggcaggcttctgttctggattgggaaggtgaggacattctcgaccgaagttcagaactgatctacaccggcgagatggcatggatttaccagccttatggtcgaaaccagcagcgggtgtttttcctgttcgaccatcagatggtgctgtgtaagaaggatcttattcggagggacatcctctattataagggccgtattgacatggacaagtatgaggtcgtggacatagaggacggacgggacgacgattttaacgtgagcatgaaaaacgcattcaaactgcataataaggaaacggaggagatacatttgttttttgccaagaagctagaagaaaaaattcgttggctcagggctttccgtgaggagaggaagatggtgcaggaagatgagaagatcgggttcgagatcagcgagaaccaaaagaggcaggccgcaatgaccgtccgcaaactgcctttcccccagctctctgaagctcggatctgcagtccaaagggctttgctagtgtgtttaacgggacgtgctgcggggagtcatag

SEQ ID NO: 217711 - DNA, 732 bp, synthetic construct
  misc_feature 1..732: note = Description of Artificial Sequence: Synthetic coding sequence
  source 1..732: mol_type = other DNA
atgattgatatcgctatcgacgggttcctgttgacaccagtgcagaaaatctgcaaatatcctctgcagctggctgaattgttgaagtataccgctcaggatcattcagattaccgatacgtggctgcagctctagccgtgatgcgtaacgtcacgcaacaaatcaacgagcggaaaaggcgtttagagaatatcgataaaattgcacagtggcaggcatccgttctggactgggaggatttaatcaggcgcgacatcctttattacaagggcaggatcgacatggataagtacgaagtcgttgatatcgaagacgggagggatgatgacttcaatgtttctatgaaaaatgcttttaagcttcataataaagagactgaagagatccatctattttttgccaagaaattagaagagaaaatccgatggctcagggcatttagggaagagcggaagatggtccaagaggacgaaaagatcggatttgaaatcagcgagaaccaaaagcgtcaggctgctatgactgtgaggaaggtgccaaaacagaaaggcgtgaactcagccagatccgtacctccttcgtatcctccacctcaggatcccctcaatcacggccagtatctagtccccgacggcatcgctcaatctcaggtgtttgaattcactgaaccaaaaaggagtcagtctcctttttggcaaaacttctctaggctaacacccttcaagaagtag

SEQ ID NO: 217712 - DNA, 1392 bp, synthetic construct
  misc_feature 1..1392: note = Description of Artificial Sequence: Synthetic coding sequence
  source 1..1392: mol_type = other DNA
atgcagtggatccggggaggatccggcatgctttgggttaaccaagaggacgaagtcgaagagggcccatcagatgtacagaacggacatctcgatcccaacagtgactgcctgtgtttgggtagacccctgcagaatagagaccaaatgagggccaatgttattaacgaaatcatgtctacagaacgtcattatattaagcatttaaaggatatatgtgaaggttaccttaaacagtgccgtaagcggcgtgacatgttcagtgacgaacagcttaaagtcatatttggcaatatcgaggatatctaccgcttccagatgggcttcgttagagatctggaaaaacagtataacaatgacgacccacacttatcagagatcggaccctgttttcttgagcatcaggacggtttttggatctatagcgagtactgcaacaatcatctcgatgcctgtatggagctgagtaagctcatgaaggatagtcgatatcaacacttcttcgaggcatgcagacttctgcagcagatgattgacatcgccatcgacggctttctgctaactcccgttcagaagatatgcaagtatcccctgcagttggctgaactcttgaaatacacagcccaggatcattcagactacagatatgtggccgctgcgcttgccgtgatgcgaaatgtcacccagcagattaacgaacgcaagcgaagactggaaaacatagataagattgctcagtggcaggcctccgtccttgactgggagggcgaagacatcctggacagaagcagcgagctgatatacacaggcgagatggcgtggatataccagccttacggaaggaatcagcaacgagtttttttcctgttcgaccatcagatggtgctctgcaagaaggacctaataagacgcgatattctatattacaaagggcgtatcgacatggacaaatatgaggtagtggacatcgaagacgggagagacgatgattttaacgtgtccatgaagaatgcctttaaactccataacaaggagacagaagaaattcacctattcttcgccaagaagctggaggaaaagattaggtggctacgcgcattccgagaggaacggaagatggtgcaagaggacgagaaaatcgggttcgaaatctctgaaaaccagaagagacaggcagcaatgaccgtccgcaaggtgcctaaacagaagggcgtaaactctgcccgatcagtaccacccagctatccccctcctcaagaccctcttaatcatgggcagtatctcgtgccagatggcattgctcagtcgcaggtgtttgagttcacagaaccaaaaaggtcccagtctcctttctggcaaaatttttcacggcttaccccctttaaaaagtag

SEQ ID NO: 217713 - DNA, 2409 bp, synthetic construct
  misc_feature 1..2409: note = Description of Artificial Sequence: Synthetic coding sequence
  source 1..2409: mol_type = other DNA
atgcctaggatcatgattaagggaggtgtgtggcgaaataccgaagacgagattctgaaggccgctgtgatgaagtacggaaaaaatcaatggtccaggatcgcttctctcttacacaggaagagtgcgaaacaatgtaaggccaggtggtacgaatggctggatcctagtatcaagaagactgagtggtcaagggaggaggaggaaaaattactgcatttggcgaagctgatgcctacccagtggcgcactatcgccccaatcatcggtagaaccgcggctcaatgcttggagcactatgaattccttctggacaaggccgctcagcgcgacaacgaagaggagacaacggatgacccgaggaagttgaaaccaggcgaaatcgacccgaacccagagacaaagccagctaggccggaccctatagatatggacgaagacgaactggagatgctctcagaggctcgggctaggctcgccaacacccaaggaaagaaagccaagaggaaagccagagaaaagcagctggaggaggcgagacggctagccgctcttcagaaaagacgggagctgagggccgctgggatcgagattcagaagaagaggaaacggaaacgcggagtggattataatgctgaaatcccatttgagaagaagcccgcacttggattctatgatacatctgaggagaactaccaggctctggatgctgatttcagaaaactgaggcagcaggaccttgatggagagttgcgaagtgaaaaagaaggtcgggatcgtaagaaagataagcagcacttaaaacgaaagaaggaatcagatctgccttccgccatcctgcaaacctcgggagtgagcgaattcacaaaaaaacgtagtaagctggtgctccccgctccacagatctcggacgctgaattacaagaggtggtgaaggtcggtcaggctagcgaaatagctcgacagaccgcagaggaatccggaatcaccaactccgctagctcaactttgctctcagagtacaatgtgaccaataactcagtggctctgcggacaccccgaaccccggcttcccaggaccgcatacttcaggaggctcagaatctaatggcccttaccaatgtggacacaccactaaaaggcggactgaacacccccctccatgaatcagactttagcggcgtgactccacagaggcaggtggtgcagacgccaaatactgttctgagcactccgttcagaacaccatccaacggagcagaggggctgacgccaagaagcggcactacccccaaaccagtgatcaatagcacccctggtaggacaccactgagagacaagttgaatattaatcctgaggacgggatggcagattactcagatcccagttatgtcaagcagatggaacgcgaatctcgagagcatctgcgactgggtctgctcggcctccctgcccctaagaacgacttcgagatcgtcctgccagaaaacgccgagaaggagctcgaagagagggagattgatgacacatacatcgaggatgccgctgacgttgatgctaggaagcaggcaatacgtgatgcagagcgcgtgaaggaaatgaagcgcatgcacaaagccgtccagaaggatcttccccgtccctcagaggtcaatgaaaccattttaagaccattgaacgtagaaccacccttaacagatttacagaagtccgaagagctgatcaagaaagagatgattactatgcttcattatgacctgctgcaccatccctacgaaccatccggcaacaagaaaggtaaaactgtcggattcggaactaacaactctgagcacattacatacttggagcataacccttacgaaaaattcagcaaggaagagctaaaaaaagctcaggatgttcttgttcaggagatggaggtggtgaagcagggaatgagccatggagagctttcgtctgaagcctataaccaggtttgggaagagtgctatagccaggtactctatcttcctggccaatcacgctatacccgcgcaaacctggcctcgaaaaaggatcgaatcgaatcattagagaagagacttgagataaacagaggccacatgaccacagaggccaagagagctgcgaagatggagaaaaaaatgaaaatactgctggggggatatcaaagccgggctatgggcttaatgaaacagttaaatgacctctgggatcagattgagcaggcgcacctggaattacgcaccttcgaagagctgaaaaagcacgaggattcggcaatcccacggagacttgagtgtctgaaggaagatgtgcagaggcagcaggagagggagaaggagctgcagcaccggtatgccgacctgctgctggagaaggagaccctaaagtcaaaattctag

SEQ ID NO: 217714 - DNA, 1455 bp, synthetic construct
  misc_feature 1..1455: note = Description of Artificial Sequence: Synthetic coding sequence
  source 1..1455: mol_type = other DNA
atgagacactctaagagaacttattgcccggattgggacgacaaagattgggattacggtaagtggcgatcaagcagcagccacaagcgtagaaaacggtcacactcttctgctcaggaaaacaaacgttgcaagtacaaccacagtaaaatgtgtgattcccactacctcgaatcacgctcaattaatgaaaaggattaccactcacggagatacatagacgagtacagaaatgactatacacaaggctgcgagcccggtcatcggcagagggaccatgagagtcgctatcagaaccactccagtaagagtagcggtcggagtggcagatcatcctacaagagtaagcaccggattcatcactccacctctcacagaagaagtcacggcaagagtcatcgcagaaagcgaacaaggagcgtcgaggatgacgaagaaggtcatctcatctgccaaagcggcgatgtgctcagcgccaggtacgagatagtggacaccctgggagagggcgcattcgggaaggtggttgagtgcatcgatcacaaagcgggtggtcgccacgtggctgtgaagatcgtgaaaaatgtggatcggtactgcgaagcagcgaggtcagaaatacaggtgctggagcaccttaacaccactgatccaaattcaacttttaggtgcgtgcagatgttggaatggtttgagcaccatgggcacatctgcattgtgtttgagctgcttggcttatcaacctacgattttattaaggaaaacgggttcctcccgttccggctagatcatattcggaaaatggcctatcagatatgcaagtctgtcaacttcctccattctaataaactgactcacacagatctgaagccagaaaatatcctgtttgtacagtcagactacactgaagcgtataatcctaagattaagcgcgatgagaggactctgattaatcccgacatcaaggtggtcgacttcgggtcagccacttatgacgatgagcaccactctactttagtctccacaagacactacagggcccctgaggtaatcctggcgctcgggtggtcacagccatgcgatgtgtggagcatcggctgcattttaatagagtactacttaggcttcactgttttcccaacacacgacagcaaagaacaccttgcaatgatggagcggattttaggacccctgcccaagcacatgattcagaagacccgaaaacgcaagtactttcaccacgatagactggactgggatgaacacagctccgctggtcgctatgtcagcagaaggtgcaaacccctgaaggaattcatgttatctcaagatgtagagcatgagcggctttttgacctaattcagaaaatgctcgaatacgacccagccaagaggatcactttaagggaggccctgaaacacccatttttcgatttactcaagaagtccatctag

SEQ ID NO: 217715 - DNA, 1365 bp, synthetic construct
  misc_feature 1..1365: note = Description of Artificial Sequence: Synthetic coding sequence
  source 1..1365: mol_type = other DNA
atgaggcattccaagcgcacttactgtcccgactgggacgacaaagactgggattacggaaagtggcgatccagctcctctcacaagaggaggaagcgatcccactctagcgctcaggaaaacaaacgatgcaagtataatcatagtaagatgtgtgactcccattacctcgagtctaggtcaattaacgaaaaagactaccactcccggcgatatatcgatgagtatcggaatgactatacgcagggatgcgaaccaggccaccggcagcgagaccatgagtctcgttatcagaaccactcttccaagtcatccggtaggagtggcaggtcatcgtacaagtcaaaacaccgcatacatcactcgaccagccaccgccgttcacacggcgacgagatagtggacaccctgggtgaaggcgcattcggcaaagtggtagagtgcattgatcacaaggcaggaggaagacatgtggctgttaagattgtcaagaatgtggatcgctattgcgaggccgcaagatctgagatccaagtattagaacacctgaatactactgaccccaattctacttttcgctgcgtgcagatgctcgaatggtttgagcaccacggccatatttgcatcgtgtttgagctgctgggcctcagtacatacgatttcatcaaagagaacggtttcctcccgtttcgcctcgaccatataaggaagatggcttatcaaatctgtaagtctgtgaactttcttcattcaaacaagctgacccacacagatctgaaacctgagaacattcttttcgtccagtctgactataccgaagcctacaatcccaaaataaagcgggacgagcgaacgctgattaaccccgatatcaaggtagtggactttgggtcagcgacgtatgatgacgagcatcatagcacactcgtgagcaccaggcattatcgagccccagaggtcatcctcgcactcggctggtctcagccatgtgacgtgtggtctattggttgcatcctaattgagtactatctgggattcaccgtattccccacccatgactccaaggaacacttagctatgatggagaggatcctcgggccactgcccaaacatatgatccagaagaccagaaagaggaagtattttcaccatgacaggctggactgggacgagcatagctcggccggacgctacgtgtccagacggtgtaaacctttgaaagaatttatgctgtcccaggatgttgaacatgagcgcctgtttgatctgattcagaagatgctggagtatgatcctgcaaaaagaatcaccctccgggaggccctgaaacaccctttttttgatcttctaaagaagagcatatag

SEQ ID NO: 217716 - DNA, 1581 bp, synthetic construct
  misc_feature 1..1581: note = Description of Artificial Sequence: Synthetic coding sequence
  source 1..1581: mol_type = other DNA
atggctgccggacgcagaccagcctccgcactgtggcccgagcggcgagggtctcctttaaggggcgacttgctgggttttcagaatgtcagagagccgtcttcttgcggcgaaacactttcaggtatgcgacactccaaaaggacctactgtcctgattgggatgataaggattgggattatggcaagtggcggtcaagctcctcacacaaaaggcgcaagcggtcccactccagcgcccaggagaacaaaagatgcaagtacaaccacagcaagatgtgtgattcacactacctggagtcaaggagtatcaacgagaaggactaccacagccggaggtatattgacgaataccggaacgattacacccaggggtgcgagccagggcaccgccagagagaccacgagagtagatatcagaatcatagctcaaaatcatcgggtcggtcggggaggagttcctacaaatccaaacataggattcatcattcgacctcccacaggcgatcacatggtaaatcccatagaaggaaaagaaccaggtccgttgaggatgatgaggagggccacctgatctgccagtccggcgatgtattgagcgcacgctacgagattgtggatacccttggagaaggcgctttcgggaaggtggtggagtgtatcgaccacaaggcagggggaaggcacgtggccgttaagatcgtgaagaatgttgacaggtattgtgaggctgcacggagtgagatccaagtgctcgaacatttaaacacaaccgacccaaattccacttttagatgcgtccaaatgctggaatggttcgaacaccacggacacatctgcattgtatttgagctcctcggcttaagtacttacgatttcattaaggaaaatggcttcctcccctttagattggaccacattcggaaaatggcttaccagatctgtaaatccgtgaattttcttcactctaataagttaacccacaccgacctcaagccggagaatatcctgtttgtgcagtctgattatacggaggcctataaccccaaaatcaagcgggatgaacggacattaatcaacccagacattaaagtcgtcgactttggtagcgcaacgtacgacgatgagcaccacagtactctggtttccactcgtcactaccgcgcaccagaggttatcttggcgttgggatggtctcagccatgtgacgtgtggtcaattggctgtatcttgatagaatactacctggggtttaccgttttcccaacacacgatagcaaagagcatctggcaatgatggaaaggatcctgggacctttacccaaacacatgattcaaaaaactcggaaacgaaagtatttccatcacgatcgactggattgggatgagcactcttcagccggaaggtacgtgagtcgcagatgcaagccactcaaggagtttatgctatctcaggacgtagagcacgagcggttgtttgacctcatccaaaaaatgttggagtatgaccctgctaaacgtatcaccttgagggaggccctgaaacatccctttttcgatctgcttaaaaagtcaatctag

SEQ ID NO: 217717 - DNA, 1494 bp, synthetic construct
  misc_feature 1..1494: note = Description of Artificial Sequence: Synthetic coding sequence
  source 1..1494: mol_type = other DNA
atgccccaccctaggagataccactcgagtgaacgcggttcacgcggatcttatcgcgaacattatagatctcgtaagcataagaggcgtcgatccaggtcgtggagcagttcatccgaccggaccaggagacgtcgcagggaagattcttatcatgtgcggtctcggtcctatgacgaccgtagcagcgacaggcgtgtgtacgacaggaggtactgcggctcctacaggcgaaacgattactcaagggacaggggggatgcctactacgacacagattaccgccactcctacgaatatcaaagggaaaacagctcctaccggtcacagcgcagctctcgaagaaaacaccgtcgacggcgaaggaggtctcggaccttttcccgctccagttcccatagtagcaggagagcaaaatcagtggaggacgatgccgagggtcacctcatctaccatgtgggagactggctacaggagcgatacgaaattgtttccacgctcggggagggaacattcgggagggtcgtccaatgtgtggatcacagacggggaggagcccgagtggctctcaagatcattaagaacgtagaaaagtacaaagaggccgcacgcctggagatcaatgtgctggagaagatcaatgagaaagaccctgacaataagaacctgtgtgtgcagatgtttgattggtttgactaccacggtcatatgtgtatttccttcgagctgctaggactgtcaacctttgactttctaaaggacaataactacctgccgtaccctatccaccaggtgaggcacatggcctttcaattatgccaggccgtaaagttcctacacgacaacaagcttacgcacaccgacctgaagcctgagaatatattgtttgtgaactccgattacgagcttacatacaacctggagaaaaaacgggatgagagatcagtaaagtctaccgccgtgcgagttgtcgattttggatctgccacattcgaccacgaacatcatagtacaattgtgtccacccggcattaccgagccccagaagtaattctggaactcggctggagccagccctgtgacgtatggtctattggttgtattatattcgagtattatgtgggcttcacattattccaaacacatgataatagagagcatttagccatgatggagcggatcttgggacccatcccaagtaggatgatacgaaagaccagaaagcagaaatacttctatcgtgggagacttgactgggatgaaaatacttccgctgggagatatgtgcgagagaactgcaagcccctccggaggtacctgaccagtgaggctgaggaacaccaccagttgtttgacctgatagagtctatgctggagtatgagcctgcaaaaaggctaactctgggcgaggccctccaacaccccttttttgccaggttgcgagcagagccacctaacaaactgtgggactcatcacgagatatctcgagatag

SEQ ID NO: 217718 - DNA, 1497 bp, synthetic construct
  misc_feature 1..1497: note = Description of Artificial Sequence: Synthetic coding sequence
  source 1..1497: mol_type = other DNA
atgccacacccccgtcggtaccattctagtgagcgaggatctcgagggtcttacagggagcactaccgctctcgaaagcacaagcgcaggaggagccgatcgtggagtagttcttctgaccgaacccggcgtcggagacgggaagactcatatcacgtgcggagtaggtccagctacgacgacaggtccagtgaccggcgtgtgtacgatcgtagatattgtggttcctaccgtagaaacgactacagccgagacaggggtgacgcgtattacgacaccgactaccgacattcttatgaataccaaagggagaatagttcctacaggagtcagcggtccagtcgcaggaagcacaggcgtcgccgtcgaagaagccgcaccttcagtagatcgtcttctcactcctctaggagggcaaaatcagtcgaagatgacgctgagggtcacctcatctaccatgtcggcgactggctccaagagagatatgaaatcgtatctacactgggagaggggacttttggtcgcgtggtgcagtgcgttgaccacaggcgaggtggcgcacgagtggcattgaagatcataaagaatgtggagaaatacaaggaagctgccaggttagagattaacgtcctagaaaaaatcaatgaaaaggatcctgataacaaaaatttgtgtgtacagatgttcgattggtttgactatcatggtcacatgtgtatctcttttgagttgttggggctgagcaccttcgattttttgaaagacaacaactatctaccgtaccctatacatcaggtccgacacatggcttttcaattgtgtcaggctgtgaagtttctgcacgataacaaattgacccacacggatctcaaaccagaaaatattttattcgtcaatagcgattacgaactgacttacaatttggagaagaagagagacgagagatccgtgaagtctactgcggtaagggtggtggacttcggctccgcaacgtttgaccacgagcaccattccaccatcgtgtcaacgcgacactatcgagctccagaagtgattcttgagcttggatggtcgcagccatgcgatgtgtggtccattggatgcataatttttgaatactatgtgggctttactctctttcagacccatgataacagggagcaccttgcaatgatggagcggattctgggtcccattccgagtcggatgattcgtaaaacccggaagcagaaatacttctaccggggacggctcgactgggacgaaaatacatccgccggacggtatgttcgtgagaactgcaaacccctgcgaaggtacttgacctccgaagcagaagagcaccaccagctgttcgatctcattgaaagcatgctagagtatgagccggctaagaggcttaccttgggtgaagctctgcagcaccccttttttgcacgcctgagggcagaacctcctaacaagctatgggactcctcgcgcgacatatctcggtag

SEQ ID NO: 217719 - DNA, 1500 bp, synthetic construct
  misc_feature 1..1500: note = Description of Artificial Sequence: Synthetic coding sequence
  source 1..1500: mol_type = other DNA
atgccacaccctcggcgttaccactctagcgagagaggcagcaggggcagctatagagagcactatcgtagcagaaagcacaagaggcgacgcagccggtcctggagttcttcgagtgaccggactcggcgtaggcgaagggaggactcataccacgtgagatcccggtcttcctacgatgatcgttcttcggatcggagggtttacgacagacgatactgcggttcctatcgccgtaatgactattccagagatagaggtgatgcctactacgacacagattataggcattcttacgagtatcaaagagagaatagctcatatagaagtcagcgctcctcgcggagaaaacatagacgaaggcgacggagatccagaaccttcagtcggtcttcctcccaacattctagccgccgtgccaaaagtgtcgaagatgacgcagagggccatctaatataccacgtgggcgactggctgcaggaaaggtatgaaatagtcagcacccttggggagggaacgttcgggagagtggttcaatgcgttgatcacaggagagggggagctcgtgtggcgctgaagattattaaaaatgtggagaaatacaaggaagccgctcgactggaaatcaacgtgctcgaaaaaatcaacgagaaggatccagataacaagaacctctgcgtgcagatgtttgattggtttgattaccacggtcacatgtgtatctcattcgagctgctggggttgtcaacctttgatttcttgaaggacaacaattatctcccgtacccaattcaccaggttcgacacatggcattccagctctgccaggccgttaagttcctccacgataacaagttaactcataccgatctcaaacctgagaacatactattcgtgaatagtgactacgaattgacgtataacctggagaaaaaaagggatgaacgctctgtgaagagtaccgctgttcgggttgtggattttggctctgcaactttcgaccacgagcaccacagtaccatagtttcaacaaggcactacagagcacccgaggtgattctggaactgggatggagccaaccgtgcgatgtgtggagcattggttgtattatcttcgaatactacgtaggattcacactgtttcagactcatgacaatcgtgaacatctggcaatgatggaacggatactcgggcctataccgagtaggatgattagaaaaacccgaaaacagaaatacttttatcgagggaggctggactgggacgagaataccagtgcaggccgatatgttcgggagaattgcaagcccttaagaaggtatttgacatctgaagcagaagagcatcaccaactgtttgaccttatcgaaagtatgctggaatatgagcctgctaaaaggctgactctgggtgaagcactccagcaccctttctttgctcgcctaagggcggagccccctaacaaattgtgggacagttctagagatatctctcgatag

SEQ ID NO: 217720 - DNA, 816 bp, synthetic construct
  misc_feature 1..816: note = Description of Artificial Sequence: Synthetic coding sequence
  source 1..816: mol_type = other DNA
atgtttgactggttcgactaccatggacatatgtgtatatctttcgaattactcggcttgagtacattcgattttttgaaggataacaactatttaccttaccctatccatcaggttaggcacatggcttttcaactctgccaagccgtaaaattcctccatgataataaactcacacatacggatttgaaaccggaaaacatcttgtttgtcaactcagattatgagcttacttataatcttgagaagaaaagagatgagagaagcgtcaagagcactgcggtgcgggtagtcgattttggatcggcaacctttgaccatgagcatcattctaccatcgtgagcacacgccattatagggccccagaggtaatcctcgaactgggctggtcacaaccctgcgacgtgtggagtattggctgtataatattcgagtattacgttggtttcacactgttccagacacacgacaacagggagcatttggcaatgatggaaaggatcctcgggccaatcccatccaggatgatacgtaagactcggaaacaaaaatacttctatagaggacgtctggattgggacgagaacacttccgccggacgttacgtcagggagaactgtaagcctctccggagatacttgacctcagaggcggaagaacaccatcagctgttcgatctgattgagtctatgctcgaatatgaacctgccaaacggctgaccctcggagaagccttgcagcatccattctttgcccgacttagagcagagccacccaataagctgtgggactccagtcgggatatcagtcggtag

SEQ ID NO: 217721 - DNA, 1500 bp, synthetic construct
  misc_feature 1..1500: note = Description of Artificial Sequence: Synthetic coding sequence
  source 1..1500: mol_type = other DNA
atgccccacccccgaagataccattccagtgaacgcggatcaagaggcagctaccgcgagcattacaggtccagaaagcacaagagacgcagaagcaggtcttggtcttcatcatccgaccgtaccagaaggaggaggagagaagatagttatcatgtgagatcccggtcctcctacgatgacagatcctcggaccggcgagtgtacgaccgtaggtattgtggctcttaccggaggaacgactactcccgcgatagaggtgacgcctattacgacaccgactataggcacagttatgaataccagcgggaaaatagcagctacaggtctcagcggtcctcaagacgtaaacatagaaggagacggcgacgatctagaacatttagccgatctagttcccagcattcttcccgcagagcaaaaagcgtggaggacgacgccgaaggacatctgatctaccacgttggagattggctgcaagaacgctatgaaatcgtttctacgctgggtgagggaactttcggcagggtggtgcagtgcgtggaccaccgcagaggcggagctcgggtggcccttaaaattatcaagaatgttgaaaaatacaaagaagcagccaggctcgagataaacgtattggagaaaatcaacgaaaaggatccggataacaagaacctgtgtgtgcagatgttcgattggtttgactatcacggccacatgtgcatcagcttcgaactgttgggcttaagcacattcgattttctgaaagacaacaactacctgccatatcctatccaccaggttcggcatatggcgtttcaactctgccaagctgtgaaattccttcacgacaacaagttgacccatacagatctgaagcctgagaacatcctctttgtgaattcagactatgagctgacgtataatctagaaaagaagcgagatgagcgatcagtcaagtcaaccgcagtccgggttgtggatttcggcagtgccacgtttgaccatgaacaccattccacaatcgtttccacccgacattacagggcgcctgaagtgattctggagctcggatggtcccagccgtgcgatgtctggtccattggatgcatcatcttcgaatactacgtgggatttacactattccagacacacgataatagggagcacttggccatgatggagcggattttgggccctatcccttcacgaatgatacgcaagacccggaaacaaaaatacttttataggggcagactggactgggacgagaatacttcagcaggtcgctatgtccgagaaaactgtaaacctctgaggcgctacctgacgtcagaggccgaggaacatcaccagctgttcgacttgatcgagtccatgctagagtatgagccagcgaagcggctcacactcggagaagccctccagcaccccttttttgctcgcttacgggctgagcctccgaataagctttgggattctagcagagatatcagtaggtag

SEQ ID NO: 217722 - DNA, 1473 bp, synthetic construct
  misc_feature 1..1473: note = Description of Artificial Sequence: Synthetic coding sequence
  source 1..1473: mol_type = other DNA
atgcaccactgtaaacgatatcggtccccagaacccgatccatatctgagttacagatggaagcggagaaggtcatactcccgggagcacgagggaaggcttaggtacccatcacgcagagaacccccaccccgtagaagccgctctagatcgcacgatcggctgccctaccagcggagatatagagaacggagagactcagacacctatcgctgcgaggagcggtctccctccttcggagaggactattatgggccatctaggtctcgccatcgccgacgctctagggaaaggggcccttatcggacccggaaacacgcccatcactgtcataagcgacgaactagatcatgcagctcagcatctagccgcagtcaacagtcctcaaaacgcagctctcgctccgtcgaggacgacaaagaaggccacctggtttgcaggataggtgattggctccaagagaggtacgagatcgtgggtaatcttggtgaaggtacatttggcaaggtggtcgagtgcctggaccacgctagaggaaaatcgcaggtggccctgaaaatcattagaaacgttggcaagtatcgagaggctgctcggctggaaataaatgtgctcaaaaagattaaggaaaaagacaaggaaaataaatttttgtgcgttttgatgagcgactggttcaattttcacggccatatgtgtattgcatttgagcttcttggaaagaacactttcgagtttctcaaggaaaataacttccagccttacccgctgcctcacgtgcggcacatggcgtatcaactgtgccatgcactcagattcctccacgaaaatcaactgacccatactgatctcaagcccgagaacattctgttcgtaaatagtgagtttgaaaccctctacaacgaacacaaatcatgtgaagaaaagtccgtgaagaatacctctatcagggtggccgacttcggctccgcgacttttgatcacgaacaccataccactatagtggcaacccgccattaccgcccacccgaggtcattctggaattgggttgggctcagccttgtgacgtctggagtatcggctgtatactctttgaatattatcgcggatttaccctgttccaaacacacgagaacagagaacacttagtgatgatggaaaagatccttgggccaatcccctcccatatgattcacagaacacgaaaacagaaatacttctacaagggtggtttggtgtgggacgaaaactcctccgacgggagatacgttaaagaaaactgtaagccactgaagtcatacatgctgcaggactccctcgagcacgttcagctgtttgatctcatgcgacggatgctggagttcgatccagctcagagaataactctggctgaagccctgttgcatcctttcttcgccggtctgactccagaagaaaggtcttttcacacttctcgaaacccctcccggtag

SEQ ID NO: 217723 - DNA, 459 bp, synthetic construct
  misc_feature 1..459: note = Description of Artificial Sequence: Synthetic coding sequence
  source 1..459: mol_type = other DNA
atgcaccactgtaaacgctataggtcccctgagccagacccgtacctgtcttaccggtggaagcgcagacgtagctattcaagagagcacgaaggaaggcttagatacccatctagaagagagcctcctcctaggcggtccagatcaaggtcccatgacaggctaccctatcagagaagataccgcgagcggcgagatagtgacacatataggtgcgaagaacgcagcccttccttcggggaagactactatggtcccagtcgttcgcggcatcggaggcggtctagggagcgtgggccttacagaactcggaagcacgctcaccactgtcacaaacgtagaacgcggtcatgttcgtctgctagtagcatgcggctctggggcacatgggtaaaagctccacttgcacgctggtggagcgcatggaccatgcccgaagggtcccttcggcttccctag

SEQ ID NO: 217724 - DNA, 1404 bp, synthetic construct
  misc_feature 1..1404: note = Description of Artificial Sequence: Synthetic coding sequence
  source 1..1404: mol_type = other DNA
atgcaccactgcaagaggtatagaagccctgaacctgatccctacctttcgtatcgctggaagcgtcgcagaagctacagtcgagagcacgaaggcaggctcagatacccctcgaggcgggaacctccgccaaggcgctcacgatcaaggagccatgatagacttccctaccaaaggcgatacagagagagaagagacagcgatacataccgctgtgaagaacgatccccatctttcggggaagactactatggcccttcacggtctaggcacaggaggagatctagagaacggggaccttatagaactcgcaaacacgcccatcattgtcataaacgcagaacaaggagttgctccagcgcaagctcacgctcacagcagagctcaaaacggtcttcaagatcggttgaagacgacaaggaaggtcacctggtttgtaggattggcgattggctgcaggaaaggtggaaatcccaggtggcactgaagatcatcagaaatgtggggaagtacagagaggccgctcggttagagataaacgtgttgaaaaagataaaggagaaagataaggagaataaattcctctgcgtgcttatgagcgattggttcaactttcacgggcacatgtgcatcgctttcgaactgctgggcaaaaatacgttcgaatttctcaaggagaataactttcagccgtatccattacctcatgtacggcatatggcttatcagctgtgtcatgcacttcgctttctgcacgagaaccagctgacccacacagatctgaaaccggagaacattttatttgtgaattccgagttcgagactctttacaacgaacacaaatcgtgtgaagaaaagagtgtcaagaacaccagtattcgtgtggccgactttggtagcgccacattcgaccatgagcaccacaccacaattgtggccacaagacattatcggcctcccgaggtgatcctcgaacttgggtgggcgcagccatgtgatgtatggagcattggctgcatcctttttgaatactatcggggattcacactgttccagacacacgagaacagggaacacctcgtgatgatggagaaaatcctgggtccgatcccaagccacatgattcacaggactcgcaagcaaaaatacttttacaagggcggactcgtctgggatgaaaactcgagcgacggcagatacgtgaaagagaactgtaagccactgaagagctatatgttgcaggatagtttggaacacgtccagctttttgatttaatgaggaggatgctcgaattcgatcccgctcagagaattacgctcgctgaagccctgctccaccctttctttgctggtctgacacctgaggaacgatcttttcatacttcgagaaaccccagccgctag

SEQ ID NO: 217725 - DNA, 1473 bp, synthetic construct
  misc_feature 1..1473: note = Description of Artificial Sequence: Synthetic coding sequence
  source 1..1473: mol_type = other DNA
atgcatcactgcaaacggtaccgtagtccagagcccgacccatacctctcctatcggtggaagcggaggagaagctactctagggagcacgaggggagactgagatatccttctaggcgcgaacccccacccagacggagtcggtctcgttcgcatgaccggctcccttaccaaaggcgatatcgagaaagaagggactccgacacctataggtgcgaagagagaagcccatcctttggagaggattactacggaccttcgagatcgcggcatcgccgtaggagtcgggaaagaggcccttataggaccagaaagcatgcacatcattgccacaagcggagaactcggtcttgctcctccgcaagttcacgctcgcagcagagtagcaagagatcatctcggagcgtggaggacgacaaagaagggcacttggtttgccggattggggattggttgcaggaaagatacgaaatcgttggtaacctaggtgagggaaccttcggaaaagttgtcgagtgtttggaccacgcaagagggaaatcccaggttgctctcaagattataagaaatgtcgggaaatatagagaggcggcacggctggagatcaacgtcctgaagaagattaaagaaaaagacaaggaaaacaagttcctgtgcgtgctgatgtcggattggtttaacttccatgggcacatgtgtatcgcatttgagttactgggaaaaaacacatttgaatttctgaaggagaacaatttccagccgtaccctctgccacacgttagacatatggcctaccagctttgccacgcgcttagatttctgcacgagaatcaactcactcataccgatttaaaacctgaaaatatcctgttcgtgaattcagagtttgagacactgtataatgaacataagagttgtgaggaaaagtccgttaaaaacacaagcataagagtggccgacttcggaagtgctacatttgaccacgaacaccacacaacaatcgtggccacacggcattatcgcccaccagaagttatactcgagcttggctgggcccaaccatgcgatgtgtggagtattgggtgcattctctttgaatattacaggggtttcaccctcttccagactcacgaaaacagggagcatctggtcatgatggaaaagatactaggtcctatcccctcccatatgatccacaggaccaggaagcagaagtatttctataaggggggattagtgtgggatgaaaattcttccgacgggcgatacgttaaggaaaattgcaagccactcaagagctatatgctgcaggattctcttgagcacgtgcaactgttcgatctgatgcgtagaatgcttgaattcgacccggcacagagaataactctggccgaagccctgttgcaccccttcttcgctggacttaccccagaggagcgatcattccacacttcaagaaacccgagtcgttag

SEQ ID NO: 217726 - DNA, 1917 bp, synthetic construct
  misc_feature 1..1917: note = Description of Artificial Sequence: Synthetic coding sequence
  source 1..1917: mol_type = other DNA
atgccggtgctctcagcacggcgtagggagcttgccgatcacgctggcagcggtcgtcggagcggccctagtccaacggccagatccggcccacacttgtcagcacttcgcgcacagccagcacgggctgcccatctttccggtcgtggcacttatgtgagacgcgatacggcagggggagggccaggccaagctcgtcctcttggcccaccaggtacgagcctactggggagaggcgcacgcaggagcggggagggctggtgcccaggagcatttgagtctggcgcaagggccgctaggccgccatcacgcgtggaacctcgtctcgctactgctgcctctagggagggcgcaggtcttcccagagctgaggtggctgccggatccgggagaggagcacggagtggcgaatggggactggcggcagcgggagcctgggagacaatgcatcattgtaaaagatacagaagccctgaaccagacccttacctttcttataggtggaagcgcaggcgctcctactcaagagagcacgagggacggctgcgatatccttctaggagggaacctcccccaagaaggagcagatccagatctcatgacagactgccttaccagagaaggtatcgagagcgacgcgattcagacacataccggtgtgaagaacggagcccctcctttggcgaggactactacggtccatcacgaagtagacaccgcagacgatccagggagcgcggaccctatcgaacccgaaagcacgcgcatcattgccataaacggaggactcggagctgctccagcgccagttctagatcacagcaatcttcaaaacggtcttcacgcagcgtggaggacgacaaggagggtcacctggtatgcagaattggcgactggttgcaggagcgctacgaaatagtggggaacctcggcgagggtacattcgggaaagttgtagaatgtcttgaccatgccagaggtaaatcccaggtggccctcaaaatcatacgcaatgtggggaagtaccgggaggctgctcggctcgagatcaatgttctcaaaaaaattaaggaaaaggataaggagaacaagttcctgtgcgtgctaatgtccgactggtttaactttcacggacacatgtgtatcgccttcgagttgctaggtaagaatacttttgagtttctaaaggaaaataactttcaaccctatcccctgccgcacgtgcggcacatggcttatcagctctgccatgccttaagattcttgcacgagaatcagctgacccatactgacctaaagccggaaaatatcctttttgtcaattcagaattcgagaccttgtataatgaacataaaagttgtgaagagaaatccgtgaagaataccagcattcgcgtggcagattttggcagtgcgacgttcgaccacgaacaccatacgacaattgtggccacgcggcattatcggccacctgaagtgatcctggaactcgggtgggcacagccctgcgatgtgtggagcattggctgcattctctttgagtactataggggattcactctattccaaacccatgagaacagggaacatctcgtgatgatggaaaaaatcctgggccctatacccagccacatgatccatagaactcggaagcaaaagtatttttataaggggggactggtatgggacgagaacagcagtgacggtcggtatgttaaagagaattgtaaacctctgaagagttacatgttgcaggacagtctggagcatgtccagttgtttgatttgatgaggaggatgcttgaattcgatcctgcccagagaattactttggcagaggctctattacacccattcttcgctggcctcacccccgaggaacggtctttccacacctcaagaaacccctcgaggtag

SEQ ID NO: 217727 - DNA, 327 bp, synthetic construct
  misc_feature 1..327: note = Description of Artificial Sequence: Synthetic coding sequence
  source 1..327: mol_type = other DNA
atgtcactcactagctcttcatctgtgcgggtagagtggattgccgctgtgacgatcgctgccggtacggctgccataggctatctcgcatacaaaaggttctacgttaaggaccaccggaataaggcaatgataaacttacacattcagaaggacaaccccaaaattgtccatgcatttgacatggaggacctgggcgataaagcagtctactgccggtgctggcgttccaagaaatttcctttttgcgacggggctcataccaagcacaatgaagaaactggggataatgtaggccctctgataatcaagaagaaagaaacgtag

SEQ ID NO: 217728 - DNA, 408 bp, synthetic construct
  misc_feature 1..408: note = Description of Artificial Sequence: Synthetic coding sequence
  source 1..408: mol_type = other DNA
atggtcctggaaagtgtcgcccgtatcgtaaaagtgcagctcccggcttatctaaagcgtcttcccgtgccggagtccatcactgggtttgccagactcaccgttagcgaatggctgcgattgctgcccttcctgggagtactggccctgctcggatatcttgctgttagaccctttcttcccaagaaaaaacagcagaaggactcactgatcaacttaaaaattcagaaagagaaccccaaggttgtgaacgaaataaacatagaggatctgtgtctcacgaaggctgcgtattgcaggtgttggagatcaaagacattcccagcctgcgacggaagtcacaataagcacaatgagctgactggggacaatgtagggcctctgattctgaagaaaaaggaggtctag

SEQ ID NO: 217729 - DNA, 384 bp, synthetic construct
  misc_feature 1..384: note = Description of Artificial Sequence: Synthetic coding sequence
  source 1..384: mol_type = other DNA
atgaggggggcaggcgctatcctacggcctgctgcccgtggcgcaagggatctgaatcccaggagggacatcagctcatggctggctcagtggttccctcggacccccgcaaggtcagtggtggctctgaaaactccgattaaggtggagctagtggctgggaagacctatcgctggtgtgtatgtggccgatcaaaaaagcagccgttctgtgatgggtcccatttttttcaacgtacgggcctctctccactgaagtttaaggcccaggagactcgtatggtggccctttgtacgtgtaaggcaacacagcgccctccatactgtgatggcacgcaccggtccgagcgcgtgcagaaagcagaggtcggctccccgctctag

SEQ ID NO: 217730 - DNA, 1740 bp, synthetic construct
  misc_feature 1..1740: note = Description of Artificial Sequence: Synthetic coding sequence
  source 1..1740: mol_type = other DNA
atgccctcagcttcctgcgacacactcctcgatgatattgaggacatcgtttcccaagaagatagtaaaccacaggatcgccacttcgttcggaaggatgtggttccgaaggtccgcaggagaaacacacagaaatatctccaagaggaggagaatagccctccaagtgatagcactataccgggaatacagaagatttggatcagaacatggggatgtagccacaacaatagtgacggggagtatatggccggacagctggctgcctatgggtacaaaataaccgagaatgcgagtgatgccgacctgtggctcctgaatagttgtaccgtgaaaaaccccgctgaagatcactttagaaactctattaaaaaggctcaggaggagaataagaaaatcgtcctggccggttgcgtgccccaagcccagccacgacaggactatctgaaggggctgtctatcatcggcgtacagcagatcgacagagtggttgaggtcgttgaggaaaccattaagggccactcagtccggcttctgggtcagaagaaggataacggcagaagactcggcggtgctagactggacttgcccaaaattaggaagaaccccctcatcgagatcatcagcattaacaccggctgccttaatgcttgcacttactgtaagactaagcatgctcgaggtaatctggcttcctatcccatcgacgagctcgtggatcgcgcaaagcaaagctttcaggagggggtctgcgaaatctggctgacctcagaggatactggcgcttatgggagagacattggaaccaacctacccaccctactgtggaagctcgtggaggtcatcccagagggagctatgctgcgccttggaatgacaaatccaccatacattctcgagcatcttgaggagatggcaaagatactgaatcatcccagggtttacgcgttcttacacataccggtacagtctgcatctgactcagtgctgatggaaatgaaaagagagtattgtgtggccgacttcaaacgagtggtggatttcttaaaagagaaagtccctgggataactatcgccacggacatcatctgcgggtttccaggagagaccgaccaagactttcaggaaacagtcaagctggttgaggaatacaaattcccaagtctgtttattaatcagttttatccgagaccgggtacacccgctgcaaagatggagcaggtgccagcccaggtaaaaaaacagcgtaccaaggatttgagccgagtattccatagttactctccctatgaccacaaaattggagaacgtcagcaggtacttgtcactgaggagagctttgactcaaaattttacgtggcacataaccaattttatgaacaagtgcttgtgcccaaaaatccagccttcatgggaaagatggtggaggttgacatatacgaatctggaaaacattttatgaagggacagccggtctccgatgcgaaggtctacactccttctatatctaagcccctggcaaaaggcgaagtgagcggactcacaaaggattttcgcaatggcctgggcaatcagttgtccagtggctcacacacgtctgccgcaagccagtgcgacagcgcttctagccgcatggtgctccctatgcctcgactacaccaggactgcgcgttgcgaatgagcgtgggactggcattgctggggttgttatttgcatttttcgtcaaggtttacaactag

SEQ ID NO: 217731 - DNA, 1740 bp, synthetic construct
  misc_feature 1..1740: note = Description of Artificial Sequence: Synthetic coding sequence
  source 1..1740: mol_type = other DNA
atgccaagcgccagctgtgatactttgcttgatgatattgaggatatcgtgtcacaggaggactccaagccccaagacaggcacttcgtgcgaaaagacgttgtccctaaggttagacgacgtaacacgcagaagtatctgcaggaagaggagaatagtcctccatctgattccacaattcccggtatacagaaaatctggatcaggacgtggggctgctcacacaacaactccgacggtgagtacatggcgggtcagctcgccgcatatggctacaaaatcaccgagaacgccagcgacgccgatctctggctgctcaatagttgtaccgtcaagaatcctgcagaggatcacttccgcaattccattaagaaggcacaggaggaaaacaaaaagatcgttttggccggttgcgttcctcaggcccaacctcgccaagattacctgaagggactaagcataattggcgtgcagcaaatcgacagggttgtggaggtcgtcgaagagaccataaagggccactccgttcggctgcttggacaaaaaaaagacaacgggaggaggctgggaggtgcgcgtcttgacttacccaagatacggaagaaccccctgattgagattatttctatcaacaccggctgcctgaacgcctgcacatactgtaagactaaacatgctaggggcaacctagcgagctaccctatcgatgagttggttgatcgcgcaaagcagagcttccaagaaggggtatgcgagatttggctcacttccgaggataccggcgcttatggtcgagatatcgggactaacctgcccaccctcctgtggaagctggtggaagtgatccccgaaggggcaatgctacggctcggcatgacaaatccaccttacattctggaacaccttgaagagatggccaaaattctgaaccaccctcgggtgtacgcctttctccatataccggtgcagagtgccagtgactccgtgttgatggagatgaaaagagagtactgcgttgccgactttaagagggtggtggacttcctgaaggagaaggtacccggaatcactatcgcgaccgacattatctgtggtttccccggagaaacagaccaggatttccaggaaacggtgaagctggtggaggaatacaagtttccctccctctttatcaaccagttttaccccagacctgggaccccggctgctaaaatggagcaggtcccagcacaagtgaaaaagcagaggaccaaggacttgagtcgggttttccattcctactcgccttacgatcacaaaatcggcgagaggcagcaggttctagtgaccgaagaatccttcgacagcaaattctatgtggcccataatcagttctacgaacaagtgctggttcctaaaaatcccgcatttatgggaaaaatggtggaggtggacatctacgagtccggcaagcacttcatgaaaggacagcctgtatctgatgcaaaagtctatactccctctatttctaagcctttggctaaaggtgaagtgtctggtctgacgaaagacttcagaaatggcctcggaaatcagttatcttccggcagccacacttccgcagccagccaatgcgacagtgcaagttctagaatggtactgcccatgccaaggcttcatcaggactgcgctttgcgcatgagcgttggccttgccctcctggggctgttgtttgcgtttttcgtgaaggtgtataattag

SEQ ID NO: 217732 - DNA, 1467 bp, synthetic construct
  misc_feature 1..1467: note = Description of Artificial Sequence: Synthetic coding sequence
  source 1..1467: mol_type = other DNA
atgctcagtagaagatatgaaggagagatccctaaaaacatctgcaaacgcaagaagaccgtgcaccaggtgacggagaacgcttctgatgctgacctgtggttgctcaacagctgcactgtgaaaaatccggcagaagaccactttcggaattctatcaagaaggcccaggaagagaacaagaaaattgtcctcgctgggtgcgttcctcaggcccagccccgtcaggactatctgaaaggtctgtcaattatcggcgttcaacagatagatcgggtcgtggaagtggtggaagagactatcaagggacactccgtgcggctcctcggccagaagaaggacaatgggaggaggctggggggagcccgtctggacctacccaagattagaaaaaacccactgatcgagattatctctatcaataccggatgcctgaacgcctgtacatattgcaagaccaaacacgcccgaggtaatttagctagctaccccattgacgagctcgtcgacagggctaaacagtcttttcaggaaggggtctgcgaaatatggttaaccagtgaggacacaggtgcctacggacgcgatatcgggactaacctgccaaccttgctgtggaagctggtggaagtcatcccagaaggcgcaatgttgcgtctgggtatgaccaaccctccgtacattttggaacacctagaagaaatggctaaaatcctaaatcacccaagggtgtatgcattcctccacatcccagtacagagtgcctccgatagtgtcctcatggagatgaagcgagaatactgcgtagcagattttaaacgtgtggtcgactttctgaaagagaaagtccccggaattaccattgcgaccgacatcatctgtggatttcccggtgagacggaccaggactttcaggagaccgttaagctggtcgaagaatataagttccccagtctgtttatcaatcagttttacccacggccaggtacccccgcagccaagatggaacaggtgcctgcccaagtgatcggcgaaagacagcaagtgctcgtgaccgaggagtcgttcgattctaagttttacgtagcacataatcagttctatgaacaggtcctggtgccaaagaaccccgcttttatgggaaaaatggtcgaggtggatatctatgaatcgggcaagcacttcatgaaagggcagccagtgtcggatgctaaagtttacaccccaagtattagcaagcccctggctaaaggggaggtgtccggcctgacgaaggatttcagaaacggcctgggaaaccagttgtcaagtggatcacataccagcgccgctagtcagtgtgattcagcatcttcccggatggtgctccccatgcccagattgcatcaggattgcgctttgcgcatgagcgtcggtctggcgctgctgggtcttctgttcgccttctttgtcaaggtgtataattag

SEQ ID NO: 217733 - DNA, 4824 bp, synthetic construct
  misc_feature 1..4824: note = Description of Artificial Sequence: Synthetic coding sequence
  source 1..4824: mol_type = other DNA
atgatggatctcgtcctggaggaagatgtcaccgtgcctggcaccctaagcggatgctccggtttggtaccttccgtgccagacgacctagacggtatcaatccaaatgctgggcttggtaacgggctcctgccaaacgtgagcgaagagacagtgtcgcccacacgtgcccgaaatatgaaagacttcgaaaaccagattacggagctgaagaaggagaactttaatctcaaactgagaatctactttctggaagagagaatgcagcaagagtttcatggcccaactgagcacatttacaaaaccaatatcgagctcaaggtggaagtagagtcgctcaaaagagagctacaagaacgggagcagctgcttatcaaagcaagcaaggccgtcgaatccctagcggaggccggagggtccgagattcagagagtgaaagaggatgctagaaaaaaggtgcaacaggttgaggatctcctgaccaagcggattctgctcctggagaaggctaaggacgttaccgcagcacaagcagaactggagaaagcgttcgccggaactgagactgagaaggcccttcggctgagactggagagcaagctgtctgagatgaagaagatgcacgaaggagatttagctatggccctggtcctggacgaaaaggatagactaatcgaagaacttaaactctccctcaagtccaaggaggccctgattcaatgtctgaaggaagagaagagccagatggcatgccccgacgagaacgtgagttctggcgagcttaggggcctttgcgccgctcccagagaagagaaagagagggagaccgaagctgcccagatggagcaccagaaggagagaaactccttcgaggagcgcatccaggcattggaagaggacctccgcgagaaagaaagggaaatagccaccgagaagaaaaatagtctgaagagagacaaggctatccaaggccttacaatggcacttaagtccaaagagaagaaagtggaagagctcaatagtgaaatcgagaagctgtctgccgcttttgccaaggccagagaggctctgcaaaaggcccagacacaggaattccaaggcagcgaagactatgagactgctcttagcggcaaggaagcgctcagtgccgctctgcggtctcagaatctaaccaagtccactgagaatcacaggctgcggagatccatcaagaaaatcacgcaggagctatccgatttgcagcaagagcgagaacgtctggaaaaggatcttgaggaggcacatcgcgagaagtctaaaggagattgtaccatcagggacctccgtaatgaggtcgaaaagctacggaatgaagtaaacgagcgggagaaagccatggagaaccggtataagtcgctcctgtcggagtctaataagaagctccacaatcaggagcaagtcataaagcacctgaccgagagcactaatcagaaggacgtgcttctgcagaaatttaatgaaaaagatctggaggtgattcagcagaactgctatttgatggctgctgaggacctggaactgagaagcgaggggctcattaccgaaaagtgctcttcccagcagccccctgggtctaagaccattttttcaaaggagaaaaagcagagtagcgattacgaagagctaattcaggtgctgaaaaaggaacaggacatctatacccatttggtgaaaagccttcaggaaagtgacagcatcaacaatttgcaagccgaattgaataagatcttcgcacttaggaaacaactcgaacaggacgtcctcagctaccagaacctgcgtaaaaccctcgaagaacagattagtgagatccgccgaagggaggagtcgttttccctgtacagtgatcagacaagctacttatcgatctgcctcgaggagaataatagatttcaggtggaacatttcagccaggaggagttgaaaaagaaggtttcagacctaattcagttggtgaaggagctctataccgataaccagcatctgaaaaagaccatttttgatctgtcgtgcatgggcttccaaggaaacggtttccctgacagattagcctctactgaacagacagaggaggctaagaagagtcgcctgccgatcctgatcaaacccagccgatcattggggaatatgtacaggctgccagcaacccaggaggtcgtcacacagctgcagtcgcagattctggagctgcagggggagttaaaggagttcaaaacttgtaataagcagttacaccagaaactcatcctggcagaagctgtaatggaggggcgacctacacctgataagacgctgctgaacgcacagccacccgtgggtgcagcctatcaggattcacctggcgaacagaagggcatcaagactacgtcctccgtgtggcgcgacaaagagatggacagtgaccagcagcggagttacgaaatcgactcagaaatttgcccacctgacgatctcgccagtcttcccagttgcaaggaaaatcctgaggatgtgctcagcccaacttccgtcgccacttacctcagctctaaatcccagccaagcgccaaggtgtctgtgatgggcacagatcagtctgagagcataaatacgagtaacgaaaccgaatacctcaagcaaaaaatccacgacctcgaaactgaactagaagggtaccagaacttcatatttcagctgcaaaaacacagtcaatgttccgaggccatcatcacagttctgtgtgggaccgaaggcgcacaggacggcctaagcaagcctaagaacggctcggatggcgaggagatgacattctcatccttacaccaggtgcgttatgtaaagcacgtgaaaatcctgggtcctctggcgccagagatgattgatagtcgagtgctcgagaacctcaagcagcaactggaagagcaggaatacaagctgcagaaggaacagaacttgaacatgcagttattctcagaaatccacaatctccagaataaatttagggatctgtcgcctcccaggtatgattcgctcgtgcagtcacaggcccgtgagctgtctctccagcggcaacagataaaagatgggcatggtatctgcgtcatcagccggcagcatatgaacacaatgatcaaggcctttgaagagctcctgcaggcatctgacgtcgactactgcgtggcagaagggtttcaggaacagctgaaccagtgtgccgagttgttagaaaagcttgagaagttgttcctgaacgggaagtcagtgggcgttgagatgaacacccagaatgagcttatggaacgtattgaagaagataacctcacgtatcagcacctactgcccgaatccccagagccatctgctagccacgctctttccgattatgagacctctgaaaagagctttttctccagagaccagaagcaagacaacgagactgagaagacaagcgttatggtgaatagctttagtcaggacctccttatggagcacatccaagagattcgtaccctgcggaagagattggaagaatcgatcaaaacgaatgaaaagctgaggaagcagctcgagaggcaaggttctgaattcgtgcagggctctacttctatctttgctagtggctccgagttgcattctagcctcacctcagaaatccattttctccggaaacagaaccaagccctcaacgccatgcttattaagggctctagggataagcagaaagaaaatgataaactgagggaatctctctctagaaagaccgtatcactggaacatttgcagagggagtacgccagtgtgaaggaagaaaacgaaagattgcagaaagagggatcagagaaggaaagacacaatcaacagttgatccaggaagtgaggtgcagcgggcaggagctctcacgtgtacaggaagaggtgaagctgcggcagcaactactatcccaaaatgacaaactcctccaaagtctgagagtcgaactgaaagcctacgagaaattggacgaagagcacaggagattgcgagaagcttccggggagggatggaaaggtcaggatcccttccgtgatctgcatagcctactcatggagatccaggccctgcggctacagctcgaacgctcaatagaaacaagtagtaccctgcagtcaaggctcaaagagcagctcgcgagaggagcagagaaggcccaggaaggcgcactaactctggcagtgcaggccgtgagcatccccgaggtgcccctccagcctgataagcacgatggggataagtacccaatggaatcagacaatagcttcgacctctttgactcgtctcaggccgtcacgcctaaatcagtgtcagagaccccacccctgtcagggaatgatactgattccctgtcttgcgactccggatcctcagctactagtacaccttgtgtgagccgcctagttacaggccaccacctgtgggctagcaagaacggtaggcacgtgttagggctcattgaagactatgaagctctgctgaagcagatcagtcagggccaacgcctgcttgccgagatggatattcaaactcaagaggctccgagtagtacctctcaggagctgggaactaagggaccccaccctgctccattatcaaaattcgtgagttccgtctctacggcaaaactgacactcgaggaggcctatcggcgactaaagctcctgtggagggtgtccctgccagaggatggccagtgccccctgcattgcgaacagattggagaaatgaaggctgaggttactaagctccataaaaaattgaagaagtcctag

SEQ ID NO: 217734 - DNA, 5681 bp, synthetic construct
  misc_feature 1..5681: note = Description of Artificial Sequence: Synthetic coding sequence
  source 1..5681: mol_type = other DNA
atgatggatctggtccttgaggaagacgtgactgtccctgggactctaagtgggtgcagtggcttggtgccctctgttcccgatgatctggatgggatcaaccctaatgccggactaggcaatggcctcctgccaaacgtttctgaagaaactgttagtccgacacgtgcccgtaatatgaaagacttcgaaaatcaaatcacagagctgaaaaaggaaaactttaacctaaagctgaggatttactttctcgaagagaggatgcagcaagagttccacgggccaacagagcacatttacaaaaccaatatcgagcttaaagttgaagtggagagcctcaagcgcgagttacaggaacgggagcaattgcttatcaaagcatctaaagccgtggaaagcctcgctgaggccggaggcagtgaaatccaacgagttaaggaagacgccaggaagaaggtgcaacaagtcgaggacctactgacaaaacgcatcctactcctggagaaggacgtaactgctgcgcaggcagagctggaaaaggccttcgcaggtaccgaaactgaaaaagctctgcgcctccgcttggagagtaagctgtccgagatgaaaaagatgcacgagggtgatctggcgatggcactggtgctggatgagaaggatcgcttaattgaagaactgaagctgtcattgaagtctaaagaggctttaattcagtgcttgaaggaagaaaaatcacagatggcatgtcctgacgaaaacgtttcatccggcgaacttcggggactctgtgctgctcctcgcgaagagaaggagcgagagactgaagccgcacagatggagcaccagaaggagcgtaatagcttcgaggagcgcatccaggcgttggaagaggacctgcgcgaaaaggagcgagagatcgccactgaaaagaagaattcactgaaacgcgataaggcgattcagggtttaacgatggcgttaaagagcaaagaaaagaaggtggaagaactgaacagcgagatagaaaagctcagcgccgcttttgctaaagctagggaagccttacaaaaggcccaaacccaggaattccagggatcagaggactacgaaactgctctaagcggaaaagaggctttgtctgccgctctaaggagccagaatctcacaaagagcaccgagaaccaccggctgagaagatcaatcaagaaaataacacaggagttgagcgacttacagcaggagagggagagattggaaaaggaccttgaagaggctcatagggagaagtccaagggtgattgtactatcagagacctccgcaacgaggtggaaaaattaagaaacgaggtgaatgaaagggaaaaggctatggagaaccggtataagtcactcctctctgagtctaacaaaaaactgcataaccaagagcaggtgattaagcatttgacagaaagcacaaatcaaaaggatgtcctgctgcagaaatttaacgagaaggacctcgaggtgatccagcagaactgttatttgatggctgctgaagatttagagctcaggtccgagggccttataaccgaaaagtgctcgtctcagcagccaccaggttctaaaaccatcttctccaaggagaaaaagcaatcgtcagactatgaagaacttattcaagtgctgaagaaagaacaggacatttacacacatttggtgaagtccctccaggagagcgactctatcaataacctgcaggccgaactgaacaaaatatttgccctgcggaaacagttggagcaggatgtactgtcataccagaacctccgaaagaccctggaggagcaaatttccgaaattagacggagagaggaagagagctttagcttatattccgaccagacctcatatctgtccatttgcctggaggaaaacaacaggttccaggtcgagcatttctcccaggaagagctcaaaaaaaaagtgtctgacctgattcagctagtcaaggagttgtacacagacaatcagcatctgaagaaaactatttttgacctatcctgtatgggattccaagggaatggattccctgatcggcttgcctcgaccgagcagacggagcttctggcaagcaaggaagatgaggatacaataaagatcggggaggacgatgagatcaattttctgtcagatcagcatcttcagcagtctaatgagatcatgaaggacctctccaagggcggatgcaaaaatggttacctaaggcacacggagagtaagatcagcgactgcgacggcgctcacgcaccaggctgcttagaagaaggagcctttatcaatctcttggcaccattgtttaacgagaaagcaacactgttactagagtcccggccagatctcttaaaggttgtgagggagctattgcttgggcagctattcctaactgaacaggaagtttcaggggagcacctggatgggaagaccgagaaaacaccaaaacagaagggggaactggtgcactttgtgcagactaacagttttagtaaacctcacgacgagctgaagctcagttgcgaggctcagctggtgaaagcaggggaagtgccaaaagtagggctgaaagacgccagcgttcagaccgtcgcaacggagggagacctgctgcgctttaagcacgaggccaccagagaggcctgggaggaaaagcccataaatactgcgttgtccgccgagcacagacctgaaaacctacacggtgtgcctggctggcaggcagcactgctgtctctccctggaattaccaatcgggaagccaagaagtctcgactgcctatcctaattaagccaagtaggtctctgggcaacatgtaccgactgcccgctacccaggaagtggtgacgcagctgcagagccagattctcgagttgcagggggagctgaaggaatttaaaacttgcaataagcagcttcatcaaaaattgatcttagccgaggctgtcatggaaggacggccaactcctgataagaccctgttaaatgctcagccaccggtcggggcagcctaccaagactccccgggagagcagaaggggattaagacaacaagctctgtatggagggacaaggagatggactccgaccagcaaaggtcctacgaaattgattccgagatttgcccccctgatgacttggcctcactcccctcatgcaaggaaaaccctgaggatgtgctctctcccaccagcgttgctacgtatctcagcagcaagtctcagccgagtgcaaaagtttcagtaatgggcaccgaccagtcagaatccatcaacacctctaacgaaactgagtatctgaaacagaagattcacgatctggagaccgaactcgaaggctaccagaatttcatcttccagttgcaaaagcactcccaatgctccgaagcaatcattaccgtcttgtgtgggaccgaaggcgctcaggacgggctctccaagccaaaaaacggatcagacggagaggaaatgacgttttcctccctacatcaggtgcgctatgtgaaacacgtaaaaatcctggggccactggcccctgagatgattgactctcgggtcctggagaatctcaaacaacaactggaagagcaggaatataaattgcaaaaggagcagaatcttaacatgcagctgttctctgagatccataacctccagaacaagttccgggatcttagccccccacgatatgacagcttggtccagagccaagcgagggaactcagcctgcagcggcagcaaatcaaggacggacatggcatttgcgtgatctcccgccaacacatgaacactatgataaaggcatttgaagaactgctgcaggcctccgacgtcgactactgcgtggccgaaggattccaggaacagctcaatcaatgtgcagaattactcgagaagcttgagaaactgttcctcaatggaaagagcgtgggcgttgaaatgaacacgcagaatgaactgatggaaaggatcgaagaagataacctgacataccagcacctcttaccggaaagtcctgagccatcagctagtcatgccctgtcagactacgagacctcagaaaaatctttctttagcagggaccagaaacaagacaatgaaacggagaaaactagtgtgatggtcaactcttttagccaggacctcttaatggagcacatccaggagattaggaccctgcgcaaacgcctcgaggagagtatcaaaaccaatgaaaaattacgcaagcagttagaacgtcagggctcggagtttgtgcagggctccacctcaatcttcgcttcagggagtgagctgcactcatccctgacatctgaaattcattttctgcgcaagcaaaaccaagcactaaacgccatgctgattaaagggagtagagacaagcaaaaagagaatgacaaactgagagaatctctgagtaggaaaactgtatctctggagcatcttcaacgcgagtatgcaagtgttaaagaggagaatgaacgcttacagaaggagggaagtgaaaaagaacggcacaatcagcagctcatacaagaagtccgatgttctggtcaagaattgtcccgcgtgcaggaggaagtcaagttacggcaacagttgctgagtcagaacgataagttactgcaaagtctcagggtcgagctgaaggcttacgaaaaactggatgaggagcaccgccgtctccgagaggcatctggcgaggggtggaagggccaagatcccttcagagatctccactcgctgttgatggaaattcaggccctgcggctccagttagaacgcagcatagaaacatccagcactcttcagagccggctcaaagaacagctagcgcgtggcgcagagaaagcccaggagggagcactgaccctggcggtccaagctgtctcaatccccgaggttccactccagccagacaaacacgatggcgacaaataccccatggagagcgataactcatttgatctgttcgattccagccaagcagtgacacctaagtcagtttccgagactccaccgctgtccggcaacgatacggactctctgtcttgtgacagcggtagttctgcaaccagtacaccctgcgttagcaggctggtcactggacaccatctctgggcatctaagaatgggaggcacgttctaggcctgattgaagattatgaggcacttctcaaacagatatcccaaggccagagactcctggcagagatggacattcagacccaggaagctcctagctctacttctcaggagctgggtaccaaaggccctcatcctgccccactatccaaatttgtatcttctgtctcaactgctaagcttacactggaagaggcctatcggcgactcaaactactgtggcgagtcagcctgcctgaggacggccagtgtcccttacattgcgagcagattggagagatgaaagccgaggtcactaagctccacaagaagttgtttgagcaggagaagaaattacagaatacaatgaaactgctgcagctatccaagcgacaggagaaggtgatttttgatcagctggttgtcactcacaagatactgaggaaagcccgtggcaatctggagctaaggccgggtggcgctcaccctggcacctgcagcccatccaggccaggcagtta

SEQ ID NO: 217735 - DNA, 5558 bp, synthetic construct
  misc_feature 1..5558: note = Description of Artificial Sequence: Synthetic coding sequence
  source 1..5558: mol_type = other DNA
atgatggacttagtgctggaagaggacgtgacagtgccaggtactctgagtgggtgcagcggcctagtgccctctgttcctgatgatctggacggcatcaacccaaatgccggattgggtaatgggttgctgcctaacgtatctgaagagaccgtgtcccccacacgggctcggaacatgaaagacttcgagaaccaaatcaccgagctgaagaaagaaaatttcaatctcaaattgcggatctattttctggaagagcgcatgcagcaggagttccatggtcccacagaacatatctacaagactaatatcgagctcaaagtcgaagtggaatcacttaagagagagctgcaggagcgggaacagctgcttataaaagcttcaaaagcagtggaatctttagctgaggccggtgggagcgaaatccagcgggttaaggaggatgccagaaagaaagtgcagcaagtggaggatctgcttacgaagcgcatcttgctcctggaaaaggatgtgactgccgcacaagcagagctcgaaaaggccttcgccggaactgagaccgagaaggcactgcggcttcggttagaatccaagttgtctgagatgaagaaaatgcacgaaggagacttggcaatggccctggtgttggacgaaaaggatcgcctgattgaagaacttaagttgtcccttaagagcaaagaggccttgatccagtgcctcaaagaagaaaagtctcagatggcttgtccagacgagaatgtgtcctcaggcgagctgcggggtctatgcgcagccccacgtgaagaaaaggaaagagagaccgaagcagcccaaatggaacatcaaaaggaacggaattctttcgaggagcggatccaggctctggaggaagatcttagagagaaagaacgggaaatcgctactgagaagaaaaattcattaaagcgagacaaggcaattcaaggacttaccatggcgctgaagagtaaggaaaaaaaagttgaggaattaaactctgaaatcgaaaagctgtctgcggcatttgccaaggcacgggaagctctccagaaagcccaaactcaggagttccaaggatcagaggattacgaaactgctttgtccggcaaagaagcactgagcgctgccctgagaagtcagaacttaacgaagtcgaccgagaatcatcgcctgcggcgatcaatcaagaagattacccaggagttgtccgaccttcaacaggagcgggaacgtctcgaaaaggatttggaggaggctcacagggaaaaatcgaaaggggattgcactataagggatctgcgaaatgaggtcgagaagcttcgcaacgaagtgaatgagcgcgagaaggcaatggaaaatcgctataaatctcttctttccgaatctaacaaaaagctacacaatcaggagcaagtgattaaacatttgaccgaaagcaccaatcagaaagatgttttactgcagaagtttaatgaaaaagatctggaggtcatccagcagaattgttatctgatggctgcagaagatttagaacttcggtcagagggcctcataaccgaaaagtgttcttcgcaacaaccgccaggatctaagaccatttttagcaaggagaagaagcagagcagtgactacgaggaactgatccaggtactgaaaaaagagcaagatatttatacccacctggtaaaaagcctgcaggagtcagacagcattaacaatctgcaggccgagttgaacaagatctttgccctgcgcaagcaactggagcaggatgtcttgagctaccagaacctgcggaaaactctggaagagcagatcagcgagatcaggaggcgcgaggaagagtcttttagtctgtattccgatcagacatcctatctcagtatttgtttggaagagaataacagatttcaggtggaacactttagtcaggaagagctgaagaagaaagtgtcagacctgatccaactcgtgaaagaattatacacagacaatcagcaccttaagaagacaatcttcgatctgtcttgcatgggtttccagggaaatggttttcctgataggctggcgtcgacagagcaaaccgagcttcttgcaagtaaagaggacgaggacacaattaagatcggagaggacgatgagattaatttcctaagcgatcaacacctccagcagagcaatgagatcatgaaggacttatcaaagggaggatgtaagaatggatacctgcgccacactgaaagtaaaatatctgattgtgatggagcccacgcccctggttgtctcgaagaaggagccttcatcaacctgttagctcccctgttcaacgagaaggccactctgctgttggagtctaggccggacttactgaaggtcgtccgcgagctcctgctagggcaacttttcctcaccgagcaagaggttagcggggagcacctagatgggaagaccgagaaaacccccaagcagaagggcgaacttgttcattttgtgcagactaactccttctccaagcctcatgatgaactaaagttgagctgtgaggcccagttggtgaaggccggagaagtaccaaaagtcggactgaaggacgcctcagttcagaccgtggccaccgagggggacctgttgcgatttaaacatgaagccacacgggaggcctgggaggaaaaacccatcaacacggctctgtctgccgagcatagaccggaaaatctgcatggcgtgcctggttggcaggctgcattgctgagcctgccagggattactaatcgggaggctaaaaaaagcaggctcccaatcctcattaaaccaagccgctcactgggaaacatgtatagactgccagcaacacaggaagtggtgacacagctgcagtcacagatcctagagttacagggagaattgaaagaattcaagacctgcaacaagcaacttcaccagaaactgatcctcgccgaggccgtcatggaaggacgccctacaccggacaagacactgttgaacgacagcgagatctgccctcctgacgacttagcgtccctgccgagctgtaaggagaatcccgaagacgtgttaagccccacgagtgtggccacctatttaagttctaagagtcagccctctgctaaggtcagcgtgatgggtaccgatcagtccgagagcattaataccagcaatgaaaccgagtacttgaagcagaagatccatgatcttgaaaccgagttggaagggtaccagaactttatcttccagctccaaaagcattctcagtgctcagaggccattattaccgtgttatgtggaactgaaggcgctcaggacgggctgtccaagcctaaaaacggcagcgacggggaggaaatgactttttcttctctacaccaggtgcgctatgtcaagcacgtgaagatcttaggtcccctcgcccctgaaatgatcgatagcagggtgctcgagaacctcaaacaacaactagaggagcaagagtataagctgcagaaggagcaaaacctgaacatgcaactgttcagtgaaatacacaacttgcaaaacaaatttagagacctgtcccccccaaggtatgattctctggtgcaaagtcaggcccgtgaactgtctcttcagaggcagcagatcaaagacggccatggcatctgcgtgatctccagacagcacatgaatactatgatcaaggcattcgaggagctgctccaagccagtgatgtggactactgtgtcgcagaggggtttcaggaacaactgaaccagtgtgccgagctcctagagaagctggagaaactgttcctgaatggcaaatcagtgggagtcgagatgaacacccagaatgagctgatggagcgcatcgaggaagataacttgacctaccagcacctactgccagaaagccccgagcctagcgcttcgcacgctctgtccgactatgaaacaagcgaaaagagtttcttttccagagaccaaaagcaggataatgaaaccgaaaaaaccagtgtgatggtgaattcttttagccaggacctcctgatggagcacatccaggagatccgcactctcagaaaacggctggaggagtcaattaaaaccaacgagaagctgcgcaagcaactggagcgccaaggctcagagttcgtgcagggaagcaccagtatctttgcatccggtagtgaactgcacagcagcctcacatctgagatccactttctgcggaaacagaatcaggccctgaatgcaatgttgatcaagggcagtcgcgacaaacagaaagaaaacgataagctacgcgagtcgctttcgcgtaaaactgtttctttggaacacctgcaaagagagtatgcatctgtaaaggaggagaacgaaagactgcagaaggaggggtcagagaaggagaggcataaccaacagctcatccaggaggtgcgttgtagtgggcaggagctctctcgtgtgcaggaagaggtgaaactcagacagcagttactctcacagaacgataaattactgcagagcctgcgtgtagaactgaaagcctacgagaagctcgatgaagagcaccgcaggttaagggaggcatcgggagagggatggaagggccaggacccttttagggacctgcattccctcctgatggagattcaggccctgaggcttcagctggagaggtcgatagagacaagctcaactttgcagtcaaggctcaaggaacagctggccaggggtgccgaaaaagctcaagagggagcactgacactggcggtccaggcagtgtccatccccgaggtacctctccagccggacaagcatgatggcgacaagtacccaatggaatcagataacagtttcgacctttttgattcttcgcaggcagtgaccccaaaaagcgtgagcgaaactcctccactcagtggaaacgatactgattctctgagttgtgattctggcagttccgccacttccacaccttgtgtgtcccgactggttaccggacatcacctgtgggccagcaagaacgggagacatgttctgggactgatcgaagattacgaagccctgctgaaacagatctcccagggtcagcgcctcttggccgagatggacatccagactcaggaagcaccttcctccacgtcgcaagaactggggactaagggccctcatcccgcaccgctctcgaagttcgtttccagcgtaagcaccgcaaagctcacactagaggaggcttataggaggttaaaactcctgtggcgcgtgtcacttcccgaggatgggcagtgccccctccactgtgaacagatcggcgagatgaaggcagaagtgacgaagctgcacaagaaactcttcgaacaggagaagaagttgcaaaacactatgaagcttttgcagctgtcaaaaagacaggagaaggttatctttgatcaattggtcgtaacgcacaaaatccttcggaaggccagaggtaacttagagcttcgacccggaggagcccaccccggaacctgttcaccatcccgtcccggatcata

SEQ ID NO: 217736 - DNA, 5444 bp, synthetic construct
  misc_feature 1..5444: note = Description of Artificial Sequence: Synthetic coding sequence
  source 1..5444: mol_type = other DNA
atgatggatctcgttttggaggaggatgtcacagtaccaggcacgctgtccgggtgctcaggtttggtaccaagcgtgcccgatgacctggacggaattaacccaaacgctggcctgggaaacggactcttgccaaacgtcagcgaagagactgtcagccctacgagggctagaaatatgaaggactttgagaaccaaatcacagagttgaaaaaggagaattttaatttaaaactaagaatttacttcctggaggagaggatgcagcaggagtttcatggtcctacggagcatatctacaaaacaaatattgaattaaaggtcgaagtagagtctttgaagcgggagctgcaggaacgggagcaactacttataaaggcaagcaaagccgtcgagtctttggccgaggctggcggatccgagatacagcgtgttaaggaagatgctagaaagaaagttcagcaggtggaggatttgttgacgaaacgtattctgctccttgagaaggatgtcaccgccgcacaggcagagttggagaaagcctttgccggaacagaaacggagaaagctctgcggctgaggctagaatccaaactgagcgagatgaagaagatgcacgaaggggacctagcaatggctctcgttctcgacgagaaagaccggctaatcgaagagctgaagcttagtctgaaaagtaaggaggctctaattcaatgtctgaaggaggaaaaaagccagatggcctgtccagacgagaacgtttcgtccggtgaacttcgcggactgtgtgccgctccgagagaagaaaaggagcgggagaccgaggctgcacagatggaacatcagaaggagcgcaattccttcgaggagcggatccaggccctagaggaggacctccgggagaaagaacgcgaaattgcgacagaaaagaagaatagcctgaagcgcgataaggctatccagggcttgaccatggccttgaagtccaaagaaaagaaggtggaggagctgaattcggaaatcgagaagttgtccgcagccttcgcaaaagctcgcgaggcactgcagaaagcccagacacaggagtttcaagggtccgaagactatgagaccgccctgagcggaaaagaagctctgtccgcagcccttcggagccagaacctgactaagagtacagaaaaccataggctgcggcgtagtatcaaaaaaatcacgcaggaactcagtgacctgcaacaggaaagggagaggctggagaaggacctcgaggaggcccatagagagaaaagcaagggcgactgtactatcagggatctccgcaatgaggtggagaaactgagaaacgaggtcaatgaaagggagaaggccatggaaaatagatataaaagcctattatcagagtccaacaaaaagctgcacaatcaggagcaggtgataaagcatctgacagagtcaaccaatcagaaggacgtcttgttgcagaagttcaatgagaaggacctggaggtcattcagcaaaactgttatctgatggccgcagaagacctagaactgaggtccgagggactaatcacagaaaagtgcagctctcaacagccaccgggtagcaagactattttctccaaggagaaaaagcaaagctcagattacgaagaactcatccaggtattgaagaaggagcaggatatctatactcacctggtcaagagtttgcaagaatctgacagcattaacaacctgcaggctgaattgaataaaatctttgccctgaggaagcagctggagcaggacgtgctttcataccagaatctcaggaagactctcgaggagcagatctccgaaattaggcggagagaagaggagagctttagcttatattcagatcagacctcatacctgtctatctgcttagaagaaaataatcgcttccaagtcgaacatttctctcaagaagaactgaaaaagaaggtgtccgatctcatccagctagtgaaggagctgtacaccgataaccagcaccttaagaagacaatttttgacttgtcttgcatgggattccaaggcaatggctttcccgacagactcgcctctaccgaacagactgagctcctcgcctccaaggaggacgaagacacgattaagattggcgaggacgacgaaattaactttcttagtgaccagcatctgcagcagagcaacgagatcatgaaagatctgagtaaaggaggatgcaaaaacggctatctcaggcacacagagtcaaagatttccgactgtgatggcgctcatgcaccgggttgcctcgaggagggtgcgtttatcaacctgttagcacccttgttcaacgagaaagctacattgttgcttgagtcgcgaccggatttgctcaaagttgtgagggaattgcttctggggcaactgtttctgacggagcaggaggtgagtggcgaacaccttgacggcaagaccgaaaagactcccaagcagaaaggcgaattggtccatttcgttcagactaattcattctcgaaaccccatgatgagttgaaactctcctgcgaggctcagctagtcaaagccggtgaagtgccaaaggtgggcctcaaagacgccagtgttcagacagtcgccactgagggcgacctcctgcgcttcaaacacgaggctaccagagaggcctgggaagaaaaaccaatcaatacagcgttatccgcagaacacaggcctgagaatctgcatggggtacccggatggcaggccgcactgcttagcctgccaggtatcacaaaccgggaagctaaaaaaagccgcctgcctattcttattaagcccagtaggtcactcggcaatatgtacaggctgcctgccactcaggaggtggtgactcagttacagagtcaaattctagaactacagggcgaactcaaggagttcaagacctgcaataagcagctgcaccaaaagctgatactggccgaggccgtcatggagggccgacccaccccagacaaaaccctgctgaatgcgcagccgcctgttggcgctgcttatcaagactcaccaggcgagcaaaaagggattaaaaccacaagttccgtttggagagacaaagagatggacagtgatcagcaaagatcttacgaaattgatagtgaaatctgtccccctgatgacctggcaagtttgccaagctgtaaggagaacccagaagatgtgctgtctccaacttctgtggccacttacctcagttccaagtctcaaccgtcggctaaggtgtcagtcatgggcacagatcagagtgaaagcatcaacacttctaatgaaacagaatatctgaagcaaaaaatccatgacctggaaacggagttggaaggctatcaaaacttcattttccagctccagaagcacagtcagtgttctgaggccatcatcacagtgctctgcggtaccgaaggcgcacaagacggcctgtctaagcccaagaacggaagcgatggagaggagatgacgttcagctcattacaccaggtccgctatgtcaagcatgtgaagatcctcggcccacttgccccagaaatgatcgacagcagagtgctagaaaatcttaaacaacagttggaggaacaggagtacaagcttcaaaaagagcagaacctgaatatgcagttgttttctgagatccataatcttcagaataaattcagggacttgtctcctcccagatacgactcattggtgcagagtcaggcaagagagttgtccttacagagacagcagattaaagacggacacggaatttgtgtgattagcaggcagcacatgaacactatgattaaggccttcgaggagctcctgcaggcttcagatgttgactactgcgttgcagagggatttcaggagcaacttaatcagtgcgccgagctcttagagaagctggaaaagttgttccttaatggcaagtcagtcggcgttgaaatgaacacacaaaatgaattaatggaaaggattgaggaggataatctgacctatcagcacttgctccctgagtcccctgaaccttctgctagtcacgcgcttagcgactacgagacatctgaaaaaagcttctttagccgtgaccagaagcaggacaacgaaactgagaagacaagcgtcatggtcaactctttcagccaggacctgctcatggagcatatacaggaaattcgcaccctccgcaaaagactcgaggaaagcattaaaaccaacgaaaaactgcggaagcagctggaaagacagggttctgaatttgtgcagggttccacctctatcttcgcctccggctctgaacttcattcttcactgaccagcgaaatacacttccttaggaaacaaaaccaggctttgaatgcaatgctcataaagggctcccgcgacaagcagaaggagaacgataagctgcgtgaatcattgagtcggaagacagtatccctggagcatctgcagcgggagtacgccagcgttaaagaagagaatgagcgcttgcaaaaagaaggcagcgagaaggagaggcataaccaacagctgattcaggaggtgcgctgtagtggccaggagcttagtcgggtccaggaagaagtgaaactgcggcagcaattactgtcccagaacgataagttgctgcagagtcttagagtagaattaaaggcttacgagaagcttgacgaagaacatcgaagactcagagatggagataagtatcctatggagtcagataattctttcgacctcttcgactccagccaggccgtgacccccaagtccgtttccgaaactccacctcttagtggaaatgatactgacagcctctcatgtgactctggctctagcgcaacatcaaccccgtgcgttagcagactggtgactggtcaccacctatgggcttcaaagaatgggcgtcatgttctgggcctgatcgaagactatgaggctctgctcaagcagatatctcagggtcagagactattagccgaaatggatattcaaacccaggaggcacctagttcaaccagccaggagctgggcactaaaggtccccatcccgctccgctctccaagtttgtaagctcagtctccactgccaaactgactctggaagaggcttaccgaagactcaaactcctgtggagggtcagcttgccagaggatgggcagtgcccattacactgcgaacagattggagaaatgaaagccgaagtgacaaagttacacaaaaaattgtttgagcaagaaaagaaactgcagaacacaatgaaacttctacagctgtccaaaagacaggaaaaggtgattttcgaccagcttgtggtgacacacaagatcctgcgaaaagctcgcggaaatctggaactgagacccggaggagcccaccctggcacatgctctccgtcacgcccaggcagcta

SEQ ID NO: 217737 - DNA, 5585 bp, synthetic construct
  misc_feature 1..5585: note = Description of Artificial Sequence: Synthetic coding sequence
  source 1..5585: mol_type = other DNA
atgatggacctcgtactggaagaagacgtgaccgttccaggaactctgtcaggctgttccgggcttgtgccctctgttcccgacgatctggacggtataaaccccaacgctggtctggggaatggcctgcttcccaatgtctccgaggagaccgtgtcccctacccgagctagaaacatgaaagattttgagaatcagattacagaactgaagaaggagaacttcaatctgaagctacggatttactttctggaagaaagaatgcaacaagaattccacgggccaacagaacatatatacaaaaccaacatagagctgaaagtcgaggtggaatcactcaagcgcgagctgcaagaaagagagcagttgttgatcaaggcctccaaggctgtcgaatccctggccgaggctgggggatccgagattcagcgcgtcaaggaagacgccaggaagaaggtgcagcaggtggaagacctgctcacaaaacgaattttactgctggaaaaggatgttacagcagcccaagccgaactggagaaggccttcgcgggaaccgagactgaaaaagccctgcgtctcagactcgaatcgaagctctcggagatgaagaagatgcacgaaggcgatctcgccatggccttggttttggacgagaaagacaggctgatagaagaattgaagttatctcttaagtccaaggaggcactcattcaatgcctaaaagaggagaagtcccaaatggcttgccctgacgagaacgtttcttccggcgaattaagaggcctttgcgccgctcctcgggaagagaaagaaagagagactgaggctgcccagatggaacaccagaaggaaaggaactcctttgaggaacgcatccaagccctcgaggaagatctaagggagaaggagcgtgaaatagcaaccgagaagaaaaacagccttaaacgggataaggcaatccagggactgactatggcactcaaatccaaagaaaaaaaggtagaggaattgaattcagagatcgaaaaactgagcgctgcctttgccaaggctcgggaggcactacagaaagcccaaacacaagagttccaggggtctgaggattatgaaaccgccctgagcggaaaggaagctctgagcgcagcgctccgcagtcagaaccttaccaaatcaactgagaaccatagactgcggcgtagtatcaagaagatcacccaggagctgtctgacctccagcaagagagggagaggcttgagaaggacttggaggaagcccaccgagagaagtccaaaggggattgtaccatccgcgacctgcgaaatgaggtggagaagctcagaaatgaagtgaacgagcgcgagaaggccatggagaaccggtataagtctctgctgagtgagagcaataagaagctccacaatcaggagcaagttattaaacacctgacagagtccactaatcaaaaggacgtgcttctgcaaaagtttaacgagaaagacctggaggtgatacagcagaattgctacctcatggctgccgaagacctcgagttgaggtctgaagggctgataacagagaaatgttcctcgcagcaacccccaggatctaaaacaatttttagtaaagaaaagaagcagtcctctgattacgaggaattaatccaggtgctaaaaaaagagcaggatatctacacacatctagtaaagtcactgcaggagtccgacagtatcaacaacttacaggctgaactgaataaaatttttgcactgcggaagcagctggagcaggatgtgttatcatatcagaatttgaggaaaacactcgaggagcaaatttccgagatccggagacgcgaggaagagagttttagcctatactccgatcaaacaagctatcttagcatttgtctggaagagaacaatcgctttcaggtagaacatttcagtcaagaggagctaaaaaaaaaggtgagtgacctgattcaacttgtcaaggaactctataccgataaccagcacctgaaaaagacaatattcgatttgagctgtatgggatttcagggcaacggtttcccagatagactcgccagcacagaacagactgaaatcatgaaggacttgtctaagggaggctgtaagaatgggtacctcagacatactgagagtaagatctctgactgtgacggcgcacatgctcctggctgccttgaggagggcgcatttattaacctgctggcacccctgttcaacgagaaagccacgctgctccttgaatcccgccctgaccttttgaaagtggtgagagagctcttacttggtcagttgtttttgacagagcaggaggtctccggcgagcacctggacggaaaaacagaaaagacaccaaagcagaaaggtgagctagtgcactttgtacagaccaattctttctctaagccgcatgatgaactcaaactctcgtgtgaggcccagttagtgaaggccggtgaggtacctaaggtgggcctcaaagacgcatctgtgcaaaccgtggcgaccgaaggtgaccttctgaggttcaagcatgaagcaacacgggaagcatgggaggagaagccgatcaacacagcactcagcgccgaacaccgtcccgagaatctgcatggagtcccgggatggcaggctgcgttactctcattgccaggtataacaaatagggaggccaagaagagccggcttccgatcttgatcaagcccagtcgcagtcttggtaacatgtaccgactgcctgcaacccaagaggtcgtcacacagttgcagtcgcagatcctcgaactgcagggcgaactaaaagaattcaaaacatgcaataaacagctgcatcaaaagctgatcctggctgaggccgtgatggagggccgaccaactcctgacaagacattacttaatgcccagcccccagtgggagcagcttatcaggattctcccggagagcaaaaaggaataaagacaacctccagtgtgtggagggataaagagatggactctgaccagcagcgctcttatgaaatcgactctgagatctgcccccctgacgacctggcatcactcccctcgtgcaaagagaatcccgaagacgttctgtcccctacatccgtggcaacctatttgtcttccaaaagccagcccagcgcaaaggtatcagtcatgggaacggatcagtctgagtccatcaataccagtaatgaaactgaatacctgaaacagaagatccacgatctggagacagagcttgaggggtaccagaactttatatttcagttgcagaaacactctcagtgcagcgaagccatcatcactgtcctgtgcgggacagagggcgctcaggatggcttaagcaagcccaagaatggaagcgacggcgaagaaatgaccttctcctccctgcaccaggtgaggtatgttaagcacgtgaaaatcctaggaccacttgcacccgaaatgatcgatagcagggtcttggagaatttgaagcagcaacttgaggagcaggagtataaactgcaaaaagagcagaacttgaatatgcaactattcagcgagatccataatctacagaataagttccgggacctgtcgcctcctcgctacgatagcctcgttcagtcacaggccagggagttgagcctgcaacggcagcagataaaagatggtcacggtatttgcgtgatctcacgacaacacatgaataccatgatcaaggcctttgaagagcttctccaggcctccgatgtggattattgcgtcgctgaggggttccaagagcaattgaaccagtgcgcagaactgctggagaagctagagaaattatttctgaatgggaaatcggtcggcgtagaaatgaacacacagaacgaactgatggagagaatcgaggaagacaaccttacataccaacacttactccctgaaagccctgagcccagcgcctcacacgccctttctgattacgaaaccagcgaaaaaagttttttcagtcgggatcagaagcaagataatgaaaccgaaaagacatctgtaatggtgaattcattcagccaagatttgcttatggaacacatccaggaaatcagaacattgaggaaaagattggaggaatcaatcaagactaatgagaagctacggaagcaactggagcgccagggatccgaatttgtccaggggtccacgagcatatttgcaagtggttccgaactccacagttcactgacgtctgagatccatttcttgagaaagcagaaccaggctcttaatgctatgctaattaaggggagcagggataaacagaaagagaatgataaactgagggagtctctgagccgcaaaacagtctctctcgaacatctgcagagggagtacgccagcgtgaaggaggaaaatgagagactgcagaaggagggctccgagaaagagcgacacaatcagcagttgattcaggaggtccgatgttctgggcaggaattgtcccgcgtacaggaagaggtgaagttgcgacagcagttactctctcagaacgacaaattactgcagtcgctgagagtggaattaaaggcctacgagaagttggatgaagaacaccggaggctccgggaagcttccggggagggttggaagggccaagacccctttagggaccttcacagtctgctgatggagatccaagcactgagattacagctggagcggtccattgagacatcttcgactctccagtcccggttaaaggaacagttggcaagaggcgctgagaaagcgcaggaaggcgcactcactctggcagtccaggccgtgtccatcccggaagtgcctctgcagccggataagcacgacggcgacaaatacccaatggaatccgataattcattcgatctgtttgatagtagccaggccgtcacacctaaatcggtgtccgaaaccccccctctgagcggcaacgatactgattctctcagctgtgactccgggtcctcagccacgtccacgccatgtgtttctagacttgttacgggccatcatctctgggccagcaagaatgggcgacatgtgttgggactgatcgaagactatgaggcactactgaaacagatttcccaggggcagcgactgctagcagagatggacattcagacacaagaggcccctagttctactagtcaggaactcggtacaaaagggcctcaccctgcccctctaagtaaatttgtgagcagcgtgtccaccgccaagctgacgttggaggaagcctaccggcgtttaaagttgctttggagagtcagcctcccagaggatgggcagtgtcccctgcattgcgagcagattggcgagatgaaggcagaggtcacaaagctacacaagaaactgttcgagcaggagaaaaagttacaaaatacgatgaagttgctgcagttgtcaaagcgccaggagaaagtgatctttgaccagctcgtcgtcacacacaagatcctgaggaaggctaggggcaatctggaactacgccctggcggagcgcacccgggaacttgcagtcctagtcgcccagggagcta

SEQ ID NO: 217738 - DNA, 1521 bp, synthetic construct
  misc_feature 1..1521: note = Description of Artificial Sequence: Synthetic coding sequence
  source 1..1521: mol_type = other DNA
atggaggatcatcaacacgtgcctattgacatacagacatctaagcttctggactggctcgtcgatcgtaggcactgttcgctgaaatggcagtctctggtactcaccattagagagaaaatcaacgctgccatccaggacatgccggagagtgaagaaattgcccagttactgagtggctcctacatccactactttcactgtcttcgtattctagacttactgaaaggcacggaagccagcaccaaaaacatctttgggaggtactctagccagagaatgaaggactggcaggaaatcatagcactgtatgaaaaagacaatacatacttggtagagctcagtagccttttggttcggaacgttaattatgaaattccaagtctcaaaaaacaaatagcgaaatgccagcagctgcaacaggagtactccaggaaggaagaggagtgccaggctggcgctgccgagatgagggaacagttttaccacagctgtaagcagtacggaattactggcgagaacgtacgcggagaactccttgctttggtgaaggacttgccatcacagctggccgaaatcggagctgctgctcagcagtcactaggggaggcaatagacgtgtaccaggcttccgttggatttgtgtgcgagagcccaaccgagcaggtgctgcccatgctgcgatttgtgcagaaacggggtaattctactgtctatgagtggagaactggcacagagccatccgtggtcgagagacctcacctcgaggaactcccagagcaagttgcggaagacgctatcgattggggcgacttcggtgttgaggccgttagtgagggaacggactccggcatcagcgctgaggcagccggaatcgattggggtattttccctgagtctgacagcaaagatccgggtggggatgggattgactggggcgacgacgcggtggcacttcagatcactgttctcgaggccggaacccaggctccagaaggggtggcacggggacctgacgcacttaccctcctggaatacacagagactcgcaaccagttcctggacgagctaatggagctggaaatctttttggcccaaagagcggtcgagctgagtgaagaggccgacgttcttagcgtgtcccagtttcaattggctccggcaatcctgcagggccaaacaaaagagaaaatggtcaccatggtgtctgtgttggaagacctcattgggaagctaacctctttgcagctacagcacctatttatgattctggcctccccccgttatgtcgatagagtaaccgagttcctgcagcagaaactgaagcagagccagctcctggccctgaagaaggagctcatggttcagaaacagcaggaagcattggaggagcaagccgctctcgaaccaaagttagatctgcttcttgagaagactaaggagctgcagaagctcatagaggcagacattagcaagagatattccggtcggcctgtgaacctcatgggaacttctctctag

SEQ ID NO: 217739 - DNA, 1596 bp, synthetic construct
  misc_feature 1..1596: note = Description of Artificial Sequence: Synthetic coding sequence
  source 1..1596: mol_type = other DNA
atgaggaggcaatcaatgaccagcgcaacgagggacctgcatactgcgttagacggaaaagctacccagggcggaaagaaggatcatcagcacgtaccaatcgacatccagacgtccaagctgctcgactggctcgtagaccgccgacattgtagcctcaagtggcagtcattagttttaaccatccgagaaaagataaatgcggcaatacaggacatgcccgagtccgaggagatcgctcagctgttgtccggttcctatatacactatttccactgcttaaggatcctggatctcctgaagggtaccgaggcttctacaaagaatatttttggtaggtatagcagccaacgcatgaaggattggcaagagatcattgctctgtatgagaaggataacacttatctcgtggagctgtctagcctgctcgtacgcaacgtcaactatgagattcctagcctaaagaagcagatcgctaagtgccaacaacttcagcaggagtattcaaggaaagaagaggagtgtcaggcaggcgcagctgagatgcgcgaacagttctatcactcttgcaaacaatatgggattaccggggaaaacgtgcggggagagctgcttgcgttggtcaaagacctgccgtcacagttggctgaaattggagctgcggctcaacaatccctcggcgaggcgatagacgtataccaggcctcagttggctttgtgtgtgagtctcccacggagcaggtgctgccaatgctcagatttgtccagaagagagggaattccactgtgtatgagtggcgaactggcacagagccctcggtcgtggaacggccacatttagaagaactcccagaacaagtcgccgaagacgcaattgactggggagatttcggagtcgaagccgtctcagagggaacagactcaggcatttcagcagaggcggcaggtatcgattggggcatctttcccgagtctgattctaaggatcccggtggagatggaatagattggggggatgacgctgttgcactgcagataaccgtgctcgaagccggtacgcaggcgcctgaaggtgtggcaagaggtcccgacgccctaactttgcttgaatacacagagacccggaaccagttcttggatgaacttatggaattagagatcttccttgcccagagggccgtcgaacttagtgaagaggcggacgtgctgtccgtgtctcagttccagctagcccctgccatactgcaaggacagaccaaggagaagatggttacaatggtcagcgtcctagaagaccttatcggcaagctgacaagccttcagctgcagcaccttttcatgatactggcctccccccgttacgttgatagggtcaccgaattcttgcagcagaaactcaaacagagccagctactggcattaaagaaagaattaatggttcaaaagcaacaggaggctcttgaagaacaggccgctcttgagcccaaacttgacctgttacttgaaaaaacaaaagaactgcagaaactgatagaggccgacattagcaaaaggtactccggtcggccagtgaacctgatgggcaccagcctctag

SEQ ID NO: 217740 - DNA, 3864 bp, synthetic construct
  misc_feature 1..3864: note = Description of Artificial Sequence: Synthetic coding sequence
  source 1..3864: mol_type = other DNA
atgcaccccgaccttggcccattatgcaccttattatacgtgaccctaacaattctttgttcatcagttagtagtgacctggcgccttacttcactagcgagcctctttcagcagtgcagaaactcggcggacctgttgttctgcactgttccgcgcaacccgtcacaacaaggattagctggttgcataacgggaagacactggatggcaatctggagcacgtaaagatccaccaagggacgcttaccattcttagtctgaacagttcactgcttggctactatcaatgcctggctaacaattccatcggcgctatcgtcagcggtccagcgacggtctctgtagcagtgttgggggacttcggcagctccaccaagcatgtgataaccgcagaggaaaagagcgcaggattcatcggatgccgcgtgcccgagagcaatcctaaggccgaggtccgttataaaatcagagggaagtggctggagcactcaactgagaattatctcatcctgccatctggcaacttgcagatccttaacgtctctctcgaagataaaggcagttacaaatgtgcagcttacaatccagtcacacaccaattgaaggtagagcctataggcaggaagctgttagtgtcccgcccaagctcagacgacgtacatatcctgcaccccactcattcacaggctctggctgtcctgtcaaggagccctgttacccttgaatgtgtagtatccggcgtgccagctccgcaagtgtactggcttaaggatggacaggacattgcacctgggagcaactggcgccgtctgtatagccacctagcaaccgactctgttgatccagcagatagtgggaactactcatgtatggctgggaataagtcaggagatgtcaagtacgtgacatatatggtcaatgtgctggagcacgctagtataagcaaaggactacaggaccagattgtgtccctgggggctacggttcatttcacctgcgatgtccacgggaaccccgctccgaactgtacctggttccacaacgctcagcccatccaccctagcgcccgacacctgaccgcgggaaacgggctgaagatctccggggttaccgtggaagacgtagggatgtaccaatgcgtcgcggacaatgggatcggattcatgcactccacaggcagactggaaattgagaacgacggtggctttaaacccgttattatcacagcccctgtgagtgcaaaggttgcggacggggactttgtgaccctgagttgtaacgcttccggtctgccagtgcccgtcatcaggtggtatgactctcacgggctcatcacctcacacccgtcccaggtcctccggtctaagtctagaaagagccagctatccagaccggaagggctcaacctagaaccagtgtattttgtgctctcgcaggcaggagcatcctcactacacatccaggccgtcacccaggagcatgccggaaaatatatctgcgaagccgcaaacgaacacggaacaacccaggcagaagcatcacttatggtggttccatttgaaaccaatactaaggccgagacagtcacacttccagacgcggcacagaatgacgacagatcaaaacgtgatgggtccgagactggactcctctcttctttcccagtcaaagttcatccaagcgccgtggaaagtgcacctgagaagaatgccagtggtatctccgtgcctgacgcaccgatcattctctcccccccacagacccatacaccagatacctataacctggtatggcgggctggaaaggatggcggactgcctatcaacgcttatttcgtcaaatacaggaagctggacgacggtgtcggcatgctgggctcatggcacactgttcgtgtgccaggatccgagaatgaactgcacctggcagagctcgaaccttcaagcttgtatgaagttctcatggtagcccgttccgcggcaggcgaagggcagccagccatgttgacgttccggacaagtaaggaaaagacagcttcctcaaaaaatacccaggcttcttcacctccagttgggatccccaagtaccctgtggtaagcgaggccgcaaacaataatttcggggtcgtgctgacagattccagcaggcactccggagtccctgaagcacccgatagacccacgatcagcacagcttctgagacatccgtttatgtgacctggattcccagggccaacggaggcagtcccataacagcattcaaagtcgaatacaaaaggatgaggacatctaattggctggtcgctgcagaagatatcccgccaagtaagttgtccgtggaagtgcgatctctcgagcctgggtcaacctacaaatttcgagtcatcgcgatcaaccactatggggaaagcttcaggtcttctgcaagccggccatatcaggttgtggggtttcctaataggttcagcagcagacccatcaccggtccgcacatcgcctacactgaggcagtgagcgacactcagatcatgcttaaatggacgtacatcccatcctcaaacaacaacacccctattcaaggcttttacatctattaccgaccgacggatagtgataacgattctgattacaagcgagatgtcgtcgagggatccaagcaatggcacatgattggtcatttgcagcccgaaacaagctacgatatcaagatgcagtgttttaatgagggtggcgagagcgagttctccaacgtgatgatttgcgagaccaaggtcaaaagagtgcctggagctagcgaatatcccgtgaaagacctcagcactcccccaaatagcctcggaagtgggggaaacgttgggccagccactagccctgctagatcttccgacatgctatacctgatcgttgggtgtgtgctgggggtgatggtccttattctaatggtgttcatcgcaatgtgtctctggaagaatcggcaacagaacaccattcagaaatacgaccctccgggatatttgtaccagggttctgatatgaacggtcagatggtggactatacgaccctctcaggggcttctcagatcaacggaaacgtccatgggggattccttaccaacgggggacttagctcgggatatagccatcttcatcacaaggttcctaatgctgtaaatggaatagtaaatggttccttaaacggcggactgtattcgggacactctaattccttgaccaggactcatgtcgattttgaacacccccaccacctagtgaacggagggggtatgtacaccgctgtaccacagatagatcctctagaatgcgtcaattgtcggaactgtaggaataataataggtgtttcacaaaaactaattcaaccttttcctctagccctcctcctgtggttccagtcgtggccccatacccacaggatggactggagatgaaacccctgtcgcacgtcaaagttccagtatgtctcacctctgcagtgcccgattgcggacagctacctgaggaaagtgtgaaggataatgtggaacctgtacccacccagagaacctgttgccaggatatcgtgaatgacgtgagttccgatggcagcgaggaccctgcggaattctcgaggggacaggagggtatgattaacctgcgaatccccgaccacctgcagctcgctaagagctgcgtttgggaaggggatagttgcgcccacagtgagactgagatcaatatagtgagctggaatgcactaatcttaccccctgtgccagagggctgtgctgaaaagacaatgtggagccctccaggcattcccctagactctccaaccgaggtgctgcagcaacctcgcgagacgtag

SEQ ID NO: 217741 - DNA, 3795 bp, synthetic construct
  misc_feature 1..3795: note = Description of Artificial Sequence: Synthetic coding sequence
  source 1..3795: mol_type = other DNA
atgcaccctgacctgggaccgttatgcacgctcctgtatgtcaccctgactatcttatgtagtagtgtttcaagcgatctggctccatacttcacttctgagccactttctgcagtgcagaagctcggcggacccgtggtgcttcactgttctgcccagcctgtcacaaccagaatttcctggctccacaacggcaaaaccctcgacggaaatctggagcacgtcaagattcaccagggcactctgacgatactgagcctgaatagcagcttgctgggatactaccagtgtcttgctaataacagcataggggcaatagtgtctgggcctgccactgtctcagtggcagtgctgggcgatttcggctcatctactaagcatgttataaccgcagaagagaagagcgccggtttcattggctgtcgcgtgccagagagcaacccgaaggctgaagtgaggtacaaaatcaggggcaaatggctagaacatagtactgaaaattatcttattttgccttcaggaaatttgcagattctgaatgtgagcttagaggataagggaagctacaagtgtgctgcctataatcccgtgactcaccagcttaaagtggaacctatcgggagaaagctactggtgtctcgaccttcttccgacgacgtgcacatcctgcatccaactcacagccaggctctggctgtactttcgcggtcccctgtgactctggaatgtgtggtctcaggcgtccccgctccacaggtgtattggttaaaagacggacaggacattgctcctggctccaactggcggcgtctgtattcccacctcgcaaccgactccgtagatcctgctgactctggcaattattcttgtatggccggaaacaagtccggggacgtaaagtacgtcacgtatatggtgaacgttctggagcacgcgtctatttctaaaggtctgcaggaccagatcgtgtcccttggcgctacggttcacttcacctgcgacgtgcacggaaatccagccccaaattgtacctggtttcacaatgcccagcccatccacccttcagctcggcacctaaccgccggtaatggactgaagatcagcggtgtgactgtagaagatgtcggcatgtatcagtgcgtggcagacaacgggattggtttcatgcacagcaccggcaggcttgagattgagaatgacggaggattcaagcctgtgattattaccgcaccagtcagcgccaaggttgccgacggcgactttgtgactctcagctgtaatgctagcggcctgccggtgcccgttatccggtggtatgatagtcatgggcttatcacaagccacccgtcccaggtgcttcgttctaagtccagaaagagtcagctctctagacccgagggattaaatctggaacccgtctatttcgttctgtctcaggccggagcctcatcgctgcatattcaggccgtcacacaggagcatgccggaaagtatatttgtgaggccgctaacgaacacggcaccacccaggctgaagcctccctgatggtagttccatttgagactaatactaaggcagaaaccgtgacgctacctgacgcagcccagaacgacgaccggtccaagcgggatgggtctgaaacaggcctcctctcctcgttccctgttaaggttcaccccagtgcagtcgaatctgctcctgagaagaatgcttcaggtatcagtgtccctgatgcgccaatcatcctgagcccaccccagacccacacccctgacacctacaacctggtgtggagggccggaaaggacggcggacttccgataaacgcatactttgtgaaatatcggaagttagacgacggggtaggcatgctgggttcttggcatactgtgcgggtcccaggtagcgagaatgaactgcacctggccgagttggaaccctcttctctttatgaggtcctgatggtggcccgatctgcggctggggaagggcaaccggctatgctgacgtttaggacgtccaaagagaaaaccgcatcatccaagaacactcaggctagcagtcctcctgttggtatacccaaataccctgtggtgtcagaagcagcaaataataacttcggcgtcgtgctgacggattcgtcacggcattcaggcgttccagaggctcccgaccgacctacaatctccacggcctccgaaacctccgtgtatgtgacatggataccaagggctaatggaggatcaccaatcacagcgttcaaggtggagtataaaaggatgagaacatccaactggctcgtggcagctgaagatatccccccttccaagctttctgtggaggttaggagtctggagcctggaagtacttacaagttccgagtaattgcaatcaaccattacggagagtcgtttagaagctccgcatcacggccttaccaggtggtaggcttccccaaccgcttttccagtcggcctatcaccggtccgcacattgcgtacactgaggcagtgagcgacacccagattatgctgaagtggacttacataccgagtagcaataacaatactccaatccagggattctatatttactatcgcccaacagattctgataacgactcagactacaagcgggacgttgtggagggatccaagcagtggcatatgatcggtcacctgcagcctgagacctcttacgacattaaaatgcagtgcttcaatgagggcggtgagagcgaattttccaacgtgatgatttgtgagaccaaggtgaaaagagtccctggcgcatccgagtacccagtcaaggacctgtccacccctcccaacagcctgggttccggcggaaatgttggtcccgctacatcacccgcaagatctagtgacatgctctatctgatcgttgggtgtgtccttggcgttatggtcctgatcctgatggtatttattgctatgtgtttgtggaaaaataggcaacagaacacaatacagaagtatgacccacctggctatctttaccagggaagcgatatgaacgggcagatggtcgactacacaaccctctcgggcgctagccagattaatggcaacgtccatggcggatttctgacaaacggtgggttaagcagcggatattcacacctgcaccacaaagtgccaaacgccgtgaatggaatagtcaacggtagcttgaacggcggtttatacagcggccattcaaactctcttacaaggacccacgtggacttcgagcacccgcatcacctggtgaacggaggaggaatgtataccgcagtgcctcagatagacccacttgaatgcgttaactgtaggaattgccgcaacaacaaccgatgttttaccaaaaccaattcaaccttcagcagctcccctcccccagttgtcccagtggtggccccatatccacaggacggattggagatgaaaccactgagtcacgttaaggtacccgtgtgcttgacatccgcagtccccgactgtggtcagctgccggaagaaagcgtgaaggacaacgtggaacccgttccaacccagagaacctgctgccaggatattgtgaacgatgtctccagtgacggatccgaggacccagcagagttttcaagaggggacagctgtgcccacagcgagacggagatcaacatcgtcagctggaacgcgctcatcctcccccctgtgcccgagggctgtgccgagaagaccatgtggtcccctcctggaatcccgctggatagccccactgaagtgcttcaacagcctcgggagacatag

SEQ ID NO: 217742 - DNA, 1386 bp, synthetic construct
  misc_feature 1..1386: note = Description of Artificial Sequence: Synthetic coding sequence
  source 1..1386: mol_type = other DNA
atgctggaactgcggcacaggggcagttgtccagggcctagggaagccgtctcgcctccccacagggaaggggaggcagccggaggtgaccatgagactgagagtacctccgacaaggaaaccgatatcgacgacagatatggtgacctcgattcaaggaccgattctgacatcccagagatccctcccagttctgaccgcacacccgagattctgaaaaaagcactaagtggtctgagctcccggtggaaaaattggtggatacgcggtattctcaccctcacaatgatcagccttttcttcctcatcatttatatgggatccttcatgttgatgcttctcgtcctaggaatacaggtgaaatgttttcatgaaataattacaattggttatcgggtgtatcatagctatgatctcccgtggtttcgcaccctatcatggtatttcctattatgcgtcaactacttcttctacggtgaaacagttgcagattatttcgccacatttgtgcagcgcgaggaacagctgcagtttcttatccggtaccaccgatttataagctttgccctgtacctggccggattttgcatgtttgtcctgtctttagttaagaagcactacagacttcagttctacatgtttgcttggactcacgttacactgctcattaccgttacccaatctcacttggtgatccagaatctgttcgaaggaatgatctggtttttagtccccatttcaagtgtcatatgtaacgacattaccgcctacctgttcggatttttctttgggcgaactcctcttattaaactctccccaaagaaaacatgggaaggatttataggcggatttttctccaccgtagtatttggattcatagccgcttacgtcctgagcaagtaccagtactttgtttgccccgtggaatatcgctcagacgtcaattccttcgttactgagtgtgaacccagtgagctgtttcaattgcaaacttactccttgcccccattcttaaaggccgttttgcgacaggaacgggtgagcctgtacccctttcaaatccactccattgccctaagcacatttgcttctttaatcgggccattcggtggtttctttgcgtcgggctttaaacgtgctttcaagataaaagatttcgccaatactatcccgggtcacggcggaatcatggacaggttcgactgccagtatctgatggcaaccttcgtgcatgtgtatataactagctttataagaggccctaatccctccaaagtgctacagcagcttctggtgttacagccggaacaacagcttaacatttataaaacattgaaaacacacctgatcgagaagggtatcctccagcccaccctgaaggtgtag

SEQ ID NO: 217743 - DNA, 978 bp, synthetic construct
  misc_feature 1..978: note = Description of Artificial Sequence: Synthetic coding sequence
  source 1..978: mol_type = other DNA
atgtcccgcttgcgacatccacgcactcggtacttcctgttatgtgtcaactatttcttttacggcgagaccgtgactgactatttcttcaccctggtccagcgagaggagcctttgagaattttgagcaaataccaccggttcatcagttttactctttacctcataggattttgcatgtttgtgctatccctggtgaaaaagcattaccgactgcagttttatatgttcgggtggacacacgtgaccttactgatagtggtcacacagagccacttagtcattcataacctgttcgaaggaatgatttggttcatcgttcccatcagttgcgtgatctgcaacgacattatggcctatatgtttggattcttcttcgggagaactcccctcattaagctgtctcctaagaaaacctgggaaggatttatcgggggatttttcgcaacagtggtgtttggtcttctgctgagctacgtgatgtcgggatacaggtgttttgtatgccctgtggagtacaacaacgacactaactcatttacagtcgactgtgagccgagtgacctctttcggctgcaagagtacaacattcccggtgtgatccaatcggttattggatggaagacagtgaggatgtaccctttccagatacacagtatcgcactgtctacattcgcaagcctcataggtccgttcggaggcttctttgcctccggattcaagcgggctttcaagattaaggatttcgctaacacaatcccaggccatggtggcatcatggataggtttgattgccaatatctgatggcaacctttgtgaatgtgtacatcgcctccttcattcgcggaccaaacccgtctaagctcatacaacagttcctgactttacgtcccgaccagcaactgcacattttcaatacattgcgtagccaccttatcgacaaaggcatgctgacgtctaccacagaagacgagtag

SEQ ID NO: 217744 - DNA, 753 bp, synthetic construct
  misc_feature 1..753: note = Description of Artificial Sequence: Synthetic coding sequence
  source 1..753: mol_type = other DNA
atgagccggcttcgccatccacggactagatggaaaaactggtgggtgaggggaattctcacactcgctatgatcgccttcttttttattatcatctaccttgggccaatggtcttgatgatcatcgtgatgtgcgtccagatcaaatgtttccatgagattatcaccatcggctacaatgtataccactcctatgatctcccctggtttcgtaccctctcatggtattttctgttgtgcgtgaactactttttttatggagaaacggtgacagactacttcttcacactggtccagagggaggagcccctgcggatactgtccaaataccaccgctttattagttttactctgtatctaatcggtttctgcatgtttgtactatcattagtgaagaaacattatcggcttcagttttatatgtttgggtggacgcacgtcactctgctgatcgtggtgactcagtctcatttagtgattcataacctctttgaggggatgatctggttcatagttcctatctcttgtgtaatatgtaacgacataatggcttatatgttcggtttcttttttgggcgaacccccttgataaagctcagcccgaaaaagacatgggagggcttcattggtgggttcttcgcaacagtcgtattcgggctcttgctctcgtacgtaatgagcgggtaccgctgtttcgtgtgtccagttgaatataataatgataccaattccttcacagtcgattgtgaatag

SEQ ID NO: 217745 - DNA, 1338 bp, synthetic construct
  misc_feature 1..1338: note = Description of Artificial Sequence: Synthetic coding sequence
  source 1..1338: mol_type = other DNA
atgacggaactgagacaacgggtcgcacacgagcctgtagctcccccagaggataaggagagtgagtctgaagctaaggtggatggggagaccgcgtcagatagcgaatctcgggctgaatcggctccactccccgtgtctgcagatgacacacctgaagtgctgaatagggcactcagcaatctttctagccggtggaaaaactggtgggtccgaggaattttgactctggctatgatcgcattctttttcattatcatttatctgggacctatggtgctgatgattatcgttatgtgcgtccaaataaagtgtttccacgagattataaccatagggtacaacgtgtaccacagttacgatctgccctggttccgaacactgagttggtactttctgctctgtgtcaactacttcttctacggagaaaccgttaccgattatttcttcaccctcgtgcaacgtgaagaacctttgcgaatcctgtctaagtaccaccgctttatttctttcacactatacttaatcggcttctgtatgtttgtcctctccctggtgaagaaacattaccgcctgcagttttacatgttcgggtggacccacgtcactctccttatcgtcgtcacccagagccatcttgtaattcacaatctgtttgaggggatgatctggttcatcgtaccaattagctgcgtcatttgcaacgatattatggcttatatgttcggattttttttcgggaggacacccttgattaaactgtctcccaagaagacctgggaaggtttcatcggaggcttctttgctaccgtggtgttcggtctcctgctttcctacgtgatgtccggctaccggtgcttcgtgtgccctgtggagtataacaatgataccaatagcttcaccgtggactgcgagccttcggatctgttccgactccaggagtataacatccccggtgtgattcagtccgtgatagggtggaagacagtgcggatgtacccattccaaattcactctatcgccctctccacattcgcaagcctaattggcccattcgggggattctttgccagcggcttcaaacgagcattcaagatcaaggatttcgctaataccattcctggacacggtggcatcatggataggttcgattgccagtaccttatggccacatttgtcaatgtgtatatcgcatcgtttatccgcggacctaacccctctaaattgattcagcagtttctcacgctgaggcccgaccagcagctgcacattttcaataccctgcgctctcatctcatagataagggcatgctgaccagcacaacagaggatgagtag

SEQ ID NO: 217746 - DNA, 648 bp, synthetic construct
  misc_feature 1..648: note = Description of Artificial Sequence: Synthetic coding sequence
  source 1..648: mol_type = other DNA
atgttcgtgctgtctttggtcaagaagcattataggctgcaattttatatgtttggatggactcatgttacactccttattgtcgtgacccagagtcacctggttatccacaacctctttgagggcatgatctggtttatcgtacccatcagctgtgtcatttgcaacgacattatggcttacatgttcggtttttttttcgggaggacccccttgatcaaactgtcccccaagaagacctgggaggggtttattggaggctttttcgctacagttgtgtttggtctcttaaagacagtgcgcatgtatccctttcaaattcactctatagctctgagtactttcgcctcactgatcgggccttttggaggtttcttcgcaagcggcttcaaaagggccttcaaaatcaaggacttcgccaacactatacccggacacggcggaatcatggacagattcgactgccagtacctgatggccacgttcgtgaacgtgtacatcgcctccttcattagaggcccaaacccgtccaagctgatccagcagttcctcaccctgagacctgaccagcagctgcacatattcaatacattacggtctcacctcatcgataaaggcatgctgacctcaaccaccgaggacgagtag

SEQ ID NO: 217747 - DNA, 3675 bp, synthetic construct
  misc_feature 1..3675: note = Description of Artificial Sequence: Synthetic coding sequence
  source 1..3675: mol_type = other DNA
atggagcctctcctattaggacgaggactgatcgtatatcttatgttcttattactcaagttcagtaaggctatcgagattccatcctcagtacagcaagttcctaccataattaagcaaagtaaagttcaggtggcatttccattcgacgaatattttcagattgagtgcgaggctaagggtaaccccgaaccgacattcagctggacaaaggacgggaaccctttctactttacagatcatcgcattatcccttccaacaattctggcacattccggattcctaacgaaggacacatctcacattttcaggggaagtacagatgtttcgccagtaacaaattagggatcgctatgtctgaggaaattgagtttatcgtgccttccgtccccaaatttccgaaagagaagattgatcccctagaagtggaagagggagatcccattgtgctaccctgtaatcctcccaaagggctaccacccctgcacatatattggatgaacattgagctggagcatatcgagcaggacgagcgggtctacatgtcccagaaaggtgatttgtacttcgcaaatgtcgaggaaaaagactcacgcaatgattactgctgttttgctgccttcccacgcttgcgcacaatcgtgcagaaaatgcctatgaaactcacagtcaattctttgaagcacgccaacgacagcagtagctccacagagataggatccaaagctaactcaatcaagcagcgaaaacctaagttacttttgcccccaaccgagtccggcagcgaaagctcaattaccattctaaaaggcgagatccttctccttgagtgttttgcagaagggttgcctacccctcaagtcgactggaataagatcgggggtgatttgccgaaaggcagggaaaccaaggaaaattatgggaaaacactgaaaatcgaaaacgtctcttaccaggataaaggcaactatagatgcaccgcatccaattttctagggaccgccacgcatgatttccacgtgatcgtcgaggagccacctagatggaccaagaaaccccaaagtgccgtttacagtacgggctctaatggaatcctcttatgcgaggccgagggtgagccccagccaactattaaatggcgtgttaacggatctcccgtggataatcaccccttcgctggagatgtggtcttccctcgtgagatcagctttacgaatctccagccgaatcacacagcggtgtaccagtgcgaggcttcaaacgtccacggtacgattcttgcgaatgccaacatcgatgttgtcgacgtgcgcccactgattcaaactaaggatggggagaattacgcaaccgtggtcggttattcagcctttttacattgtgaattcttcgcatccccagaagctgttgtgtcctggcaaaaggtggaggaagtgaagccgctggagggcagacgttatcacatttacgaaaacggcaccctacagatcaaccgcactacagaagaggatgccggttcctacagctgttgggtggaaaatgccatcgggaaaaccgccgttaccgccaacctcgacatcagaaatgccaccaaacttcgggtgagccctaaaaatccacggattccaaagctgcacatgctggagctgcattgcgaaagtaagtgcgacagtcatctgaaacattcactgaagcttagttggagcaaagacggcgaggcgtttgaaatcaacggaaccgaagacggaagaatcataatcgatggcgctaatctgaccatcagtaacgtcaccttggaggatcagggcatttattgttgttccgcccatactgcattggatagtgcagccgacatcacccaagtcaccgtgctggatgtacctgaccctcccgaaaacctgcaccttagtgaacgacagaacagatctgttcgcttaacctgggaagcaggagccgatcataattcaaacatttccgaatatatcgttgaattcgagggcaacaaggaagaacctggcaggtgggaggagctgacgcgtgtgcaagggaagaaaacgactgtgatccttcctctggctccatttgtacgttatcaatttcgggtgatcgctgtcaacgaggtcgggcgttcccaaccgagccagccttccgaccatcatgagactcctcccgcagccccagaccgaaatccccagaacatccgggtgcaggctagccaaccgaaggaaatgatcatcaaatgggagccgttgaaatccatggaacagaatgggcctggattggaatacagggtaacatggaagcctcagggggctcccgtcgagtgggaggaggagaccgtgacgaaccacactctgagggtcatgacacccgcagtttacgcaccatacgacgtgaaagtacaggctattaatcagctcgggtcaggccctgaccctcagagtgttacgttatattccggtgaggattatccggacacagcccctgttattcatggtgtggacgttattaacagtactctggtcaaagtaacttggtctacagtccctaaggaccgagtgcatggacgtctaaagggctaccagataaattggtggaagaccaagtccctgctggatgggcgaactcaccctaaagaggtgaatattctacggttctcagggcagcgtaactctggcatggtgccttccctcgacgcattttcagaattccatctgaccgtcctggcctacaactctaaaggcgctgggcctgagtccgaaccttatatttttcagactcccgagggggtcccggagcaacctacattcctcaaggtcattaaagttgacaaggatacagccacattaagctggggccttcccaagaagcttaacggaaatctcaccggttatttgctccagtaccaaatcattaacgacacctatgagattggtgaactgaatgatatcaatataacaacaccttcgaagcctagctggcatctctccaatcttaacgctactacgaagtataagttctacctaagggcttgtacttctcagggttgtggaaagcccatcactgaggaaagctctaccctcggcgagggatctaaaggtattggtaagatatcaggcgtgaatctcacacagaagacacatcccattgaggtttttgaaccaggggcagaacatatagtgaggttgatgaccaagaactggggggacaatgactccattttccaggacgtgatcgagacccggggtcgggaatatgctggactgtatgacgacatttccactcagggctggttcattgggctgatgtgcgctattgccctcttgaccctgctgctcctgaccgtctgtttcgtaaaacgcaacaggggaggtaagtactcagttaaggagaaggaggacctgcacccagatcccgagatccaatctgtgaaagatgaaacattcggagagtactcggactccgatgagaaacccctgaagggcagcctgaggtcacttaatcgcgacatgcagcccaccgaatccgccgactccttggtggaatatggagagggggatcatggcctctttagcgaggacggctcctttatcggcgcttacgccggaagcaaggagaagggcagcgtggaatctaacggaagttctactgccactttccccttgcgagcctag

SEQ ID NO: 217748 - DNA, 3627 bp, synthetic construct
  misc_feature 1..3627: note = Description of Artificial Sequence: Synthetic coding sequence
  source 1..3627: mol_type = other DNA
atggagccattactgttgggcagaggattaatagtgtatcttatgttcttactgcttaagtttagtaaagctatcgagatcccatcatccgtgcagcaggtgccgacaatcattaagcagtcaaaggtgcaggtggcctttccgtttgatgaatacttccaaatcgaatgcgaggcaaaggggaacccagagccaaccttcagctggactaaggatggaaatccattctacttcaccgaccaccggattatcccctccaataactccgggactttcagaatccctaacgagggccacatttcacattttcagggcaagtaccgctgctttgctagcaataagctgggcatcgcaatgagcgaagagattgagttcatcgtgccttcggttccaaagttcccgaaagaaaagatcgaccctctagaagtggaggagggagatccaattgttctcccctgtaacccacccaagggactcccaccattgcatatttattggatgaacattgaactggaacacattgaacaagatgagagagtatacatgtctcaaaaaggagacctatattttgctaacgtcgaagagaaggattcgcggaatgactactgttgctttgccgcattcccaaggctacgcactattgtgcaaaagatgcccatgaagctcacagtgaactcctccaattcaataaagcagcgcaagcccaaactcctccttccccctaccgagtcaggatcagagtccagtatcacaatcctcaagggagaaatcttactcctcgagtgttttgctgaagggcttcctacaccccaggttgactggaataagatagggggtgacctgccaaaaggccgtgaaacaaaagagaactacggaaaaacactcaagatcgagaacgtcagctaccaggataaaggaaactatagatgtactgcctctaattttttaggtaccgccactcatgactttcacgtgatcgtcgaagaaccaccacgctggaccaagaaaccacagagcgccgtgtattctactggatcgaatggaattctgctttgtgaggcagagggcgagccccaaccaactataaaatggagggttaacggctcacccgtcgataaccacccttttgccggtgacgtggtgttccccagagaaatctcctttactaatcttcaacccaatcatactgcggtttaccagtgtgaagccagcaacgtccacgggactattctggcaaatgctaatatcgacgtcgtcgatgtgcggcctctgattcagaccaaggacggagaaaactatgccacagtcgtaggatattctgcgttcctccactgtgagttttttgcaagcccagaagcagtcgtctcatggcagaaagtggaggaggtgaaacccctggagggccgtcgttatcatatttacgaaaatggcacattgcagattaatcgaactactgaggaggacgctgggtcatattcatgctgggttgaaaatgcgataggtaagactgctgtcacagcgaacctcgacatacgcaacgctaccaagcttcgggtctcgcctaagaatcctaggatccctaagctgcacatgctggaactgcactgtgaatcgaagtgtgattctcatttgaaacacagccttaaactctcatggtctaaggacggtgaagcatttgaaattaacggaaccgaagatggtaggatcattattgacggagcaaatctcaccatatctaacgttaccctcgaggatcagggtatatattgctgctcggctcacaccgctctcgacagcgcagccgacatcacacaggtcaccgtgctggacgtgccagatcctccagagaacctccacctgagcgagcggcagaacaggagtgtccggcttacttgggaggcaggcgctgatcataactccaatatttccgagtatattgttgaatttgaaggcaacaaggaggagcctggcagatgggaggagctcacacgagtgcagggaaagaagaccaccgtgattctgcccttggccccattcgtgcgatatcagtttcgagtcatcgccgtgaatgaggtggggcgatcccaacccagccagccttccgaccaccacgaaacaccaccggctgctcccgatcgtaatccacagaatatccgcgttcaggcatctcagcctaaagaaatgattattaagtgggagcctctgaagtctatggagcagaacggcccaggactggagtaccgagtcacctggaagcctcaaggagcacccgtcgaatgggaggaggaaacagtgacaaatcacacgctccgagtcatgacgccggcagtctatgccccttacgacgtcaaggtccaggccatcaatcagctggggagcggacccgacccccagtcagttaccctgtattccggagaagactaccctgacaccgcacccgtaatccacggggtggacgttataaattctactctggtgaaggtcacatggagtacagttcccaaagatagagtccacggcagactgaagggataccagatcaattggtggaagaccaagagcctgttagatgggagaacacatccaaaagaggtgaatattttgaggttctctggacagagaaattccggaatggttcccagcttggatgcctttagcgaatttcacttaacagtgctcgcgtacaattctaaaggcgcagggcctgagtcggagccatatatatttcaaaccccagaaggcgtgcccgagcaacccacgttcctgaaggtgatcaaggtagacaaagatacagccacactctcctggggcctgcccaagaaattgaacggcaatttaactgggtatctgctgcagtaccagattattaatgatacgtacgaaatcggggagcttaatgacattaacattactacaccttcaaagccttcttggcacctatcaaatctgaacgcgactacaaagtataagttctacctaagagcctgcacaagtcagggatgtggtaaacccattactgaggaaagcagcactctgggggagggcagcaagggtattggaaaaattagtggtgtaaacttaacgcagaagacgcacccaatcgaggtattcgaacctggcgcagagcatattgtccggttgatgacaaagaactggggagataacgattcaattttccaggacgtgatcgagacccggggacgagaatacgcaggactctacgacgatatcagtacccaggggtggtttattgggctcatgtgtgccattgccctccttactctgcttctcctcactgtgtgtttcgtcaagcgcaacagagggggtaagtattcagtaaaggagaaggaagatctacaccctgaccccgagattcagtccgtgaaggacgaaacctttggagaatactccgactcagatgagaagccattgaagggaagccttaggtccttgaatcgtgacatgcagcctacagaatcagccgattctctcgttgagtacggggagggggaccacgggctcttctctgaggatgggtcatttattggtgcctacgcagggagcaaagaaaagggatctgtggagtctaacggctcgtctactgcgacctttccactgcgtgcttag

SEQ ID NO: 217749 - DNA, 291 bp, synthetic construct
  misc_feature 1..291: note = Description of Artificial Sequence: Synthetic coding sequence
  source 1..291: mol_type = other DNA
atggagcccctcctgctgggtagagggcttattgtatatttgatgttcctgttgctgaagttttcgaaggccatcgagatccccagtagtgtgcagcaagtacccacgataattaaacaatctaaggtacaggttgcctttcctttcgacgagtatttccaaatagagtgcgaagccaagggaaatcctgaacctaccttctcgtggactaaagatggaaatcctttctactttaccgaccatagaattattccttctaataatagtggaacttttcggattcctaactag

SEQ ID NO: 217750 - DNA, 201 bp, synthetic construct
  misc_feature 1..201: note = Description of Artificial Sequence: Synthetic coding sequence
  source 1..201: mol_type = other DNA
atggaaccgctcctcctgggacgaggtctgattgtgtatctgatgttcctgcttctaaaattcagcaaggcgattgagattccatcgtctgttcaacaagtgcctacgatcataaaacagtcaaaagtgcaggttgctttcccgttcgatgagtatttccagattgagtgcgaagcgaagggcaacccagaacctacttag

SEQ ID NO: 217751 - DNA, 546 bp, synthetic construct
  misc_feature 1..546: note = Description of Artificial Sequence: Synthetic coding sequence
  source 1..546: mol_type = other DNA
atggaacccctgttgttgggtcgaggtctcattgtatatcttatgtttctgctgctgaaattctcaaaagctatagagatcccatccagcgtccaacaggtgcctaccattatcaaacagtcaaaagtccaagtggctttcccatttgacgagtacttccagattgagtgcgaggcaaaagggaacccagaaccaaccttttcctggaccaaagacggcaaccccttttatttcacagaccaccgcatcattccctccaacaacagcggaacttttcgcatcccaaacgagggtcatatttcgcatttccaaggcaagtaccgctgctttgcgagcaacaagctgggtattgccatgtccgaggaaattgagttcatcgtgccatcagtgcctaagtttcccaaagaaaagatcgacccactggaggtcgaagaaggcgatcctattgttctgccatgcaacccgcctaagggcttacctcctttgcatatatattggatgaacatcgaactagaacatatcgaacaggacgaacgagtgtactag

SEQ ID NO: 217752 - DNA, 954 bp, synthetic construct
  misc_feature 1..954: note = Description of Artificial Sequence: Synthetic coding sequence
  source 1..954: mol_type = other DNA
taatctgttacgctgtatagtggggaggactatccggataccgcccctgtaattcatggagtcgacgtgataaatagtaccttggttaaggtgacttggtccaccgtcccaaaagatcgcgtccatggacggctgaaaggataccagatcaactggtggaagacaaagagccttcttgacgggcgaacccacccaaaagaagtaaatattttacgcttttccggccaaagaaactctggtatggtaccctcattggatgccttcagtgagttccatctgacagtgctagcctacaacagtaagggtgcgggtcccgaatctgagccctatatcttccaaaccccggagggcgtacctgagcagcccacatttctgaaggttataaaggtagataaggatactgcaacattatcttggggcctcccgaagaagttgaatggtaacctcaccggctacctcttgcagtaccagataatcaatgatacttacgagattggagagttgaacgatattaacatcactaccccgtcaaaaccatcttggcacctaagcaacctaaacgcaactacgaagtataaattttatcttcgggcatgcacttctcaggggtgtggaaagccaattacagaggagagctcaactcttggggaaggtaaatacgcaggcctgtacgatgacatctcgacacagggatggttcatcgggctgatgtgcgctattgcgttgttaaccctgctattattgactgtgtgcttcgtgaagcggaaccgcggtggcaagtatagcgtgaaagagaaagaggatctgcacccagatcccgagatccaaagcgttaaagacgagacatttggagagtactccgacagcgatgagaagcctcttaaagggagccttcggtcattgaatagagatatgcagcccacagagtccgccgatagcttggtggaatattag

SEQ ID NO: 217753 - DNA, 258 bp, synthetic construct
  misc_feature 1..258: note = Description of Artificial Sequence: Synthetic coding sequence
  source 1..258: mol_type = other DNA
atggaaccacttctgctcggacgtggactgatagtgtacctcatgtttcttctgctaaaattttcgaaggccatcgagatccccagctcagtgcagcaggttccgacaatcatcaaacagtcgaaagtccaggtggctttcccttttgatgaatactttcaaattgaatgcgaagccaaaggcaaccccgagccgacgtttagttggaccaaggatggcaacccgttctacttcaccgaccaccgtatcattccctag

SEQ ID NO: 217754 - DNA, 450 bp, synthetic construct
  misc_feature 1..450: note = Description of Artificial Sequence: Synthetic coding sequence
  source 1..450: mol_type = other DNA
atggagtcgcggggtaagtcagctagttctccgaagcctgatacaaaggtcccccaggtgactacggaagcaaaggtgccacctgcagctgacggaaaggcacctcttacaaagccttctaagaaggaagcccctgccgaaaaacaacagcctcctgcagccccaaccacagcacccgcaaaaaagactagcgccaaggccgatcccgctctgttgaataaccactctaatctgaaaccagctcctaccgtgccctcctctccagatgccactcccgaaccaaaagggcctggtgacggcgcagaggaggacgaagcagcttctggaggaccgggaggcagaggaccgtggagctgcgagaactttaatcctcttctggtcgccggaggcgtggccgtcgccgctattgcactgatcctcggggtggctttccttgtgcgtaaaaagtag

SEQ ID NO: 217755 - DNA, 627 bp, synthetic construct
  misc_feature 1..627: note = Description of Artificial Sequence: Synthetic coding sequence
  source 1..627: mol_type = other DNA
atgagcagcgaaccgcctcccccttaccccggtggacctactgctcccctgctggaggagaaatcaggagcacctccaactccaggcagatccagcccagcagtcatgcaacctccccctggcatgcctttacctccggctgatatcgggccaccaccatatgagcccccaggccacccgatgccccaacccggatttattccaccccacatgagtgcagatggcacgtatatgccccctgggttttatcctccccctggccctcatccaccaatgggttactaccctcctgggccttacactccaggtccatacccgggacccggaggacacaccgctactgtcctcgtccctagcggtgctgcaaccacagttacagtacttcagggggagattttcgagggagcaccagttcagacagtatgccctcattgtcaacaggctatcaccactaaaatttcttatgaaattggactgatgaattttgtactggggttcttctgttgtttcatggggtgtgacctggggtgctgcctgatcccctgccttatcaacgactttaaagacgtgacccacacctgtcctagctgcaaagcctacatttatacatacaagaggttgtgctag

SEQ ID NO: 217756 - DNA, 456 bp, synthetic construct
  misc_feature 1..456: note = Description of Artificial Sequence: Synthetic coding sequence
  source 1..456: mol_type = other DNA
atggctgcaagtacctctatggtccctgtggccgtgaccgcagcagtagctcccgtactgtctattaattccgacttttcagatctacgagaaataaaaaagcaactgttgctcatagcaggcctaacgcgcgagcgcggactcctgcatagctccaagtggtccgcagagctggccttttctctgcccgctctgcccctagctgaactccagccacctcctcctatcacagaggaggatgcacaggacatggacgcctacactctggccaaagcctattttgatgttaaagagtacgatcgtgccgctcacttcctgcacggctgcaattctaagaaggcttatttcctgtacatgtactcccgatacctggtgagggcgatcttgaaatgtcattccgcattctcagagacttctatcttcagaaccaatggaaaggtcaagagcttcaagtag

SEQ ID NO: 217757 - DNA, 1794 bp, synthetic construct
  misc_feature 1..1794: note = Description of Artificial Sequence: Synthetic coding sequence
  source 1..1794: mol_type = other DNA
atggccgctagtacaagcatggttcctgtggctgtgactgcggcagtggcccctgttctctctatcaattcggacttcagcgacttaagagaaatcaagaagcagctgctgcttattgctggtttgactcgagagcgagggctgctccactcttccaagtggtcagctgaactcgccttctcattgccagcattacccttggcagaactccagccacctcctcccattactgaggaagacgcacaagatatggacgcttacacacttgccaaagcctatttcgatgtcaaagagtacgaccgcgctgcacacttcctccacgggtgcaatagcaagaaggcttactttttatacatgtattcaaggtacctcagtggggagaagaaaaaagatgacgaaactgtggattctctgggcccactggaaaagggtcaggtcaaaaatgaagccctcagagagcttcgagtcgaactctccaagaaacaccaggcaagagaactggacgggtttggcctgtacctgtatggtgttgtactaaggaaactggatctagtcaaagaagcaattgatgtatttgtcgaggctactcacgtccttccccttcactggggtgcatggttggagttatgtaacctgattacagataaggagatgttgaaatttctgagcctgcccgacacgtggatgaaggaattcttcctcgcgcacatttatacagagctgcagttaattgaagaggcactgcaaaaatatcagaaccttatcgacgttggcttttcaaagtcctcatatatcgtctcgcaaattgctgtggcgtaccataacattcgggacatagacaaggctctgagcatttttaatgaacttcggaaacaagatccctataggatcgaaaacatggacaccttcagcaatctgctctacgtaagatccatgaaatccgagttgtcatatctggcacacaacctctgcgagatcgacaagtacagagtcgagacttgttgcgtcatcggcaactactacagtctgagaagtcagcacgagaaagctgctctgtattttcagcgggctcttaagctgaaccctcggtacttaggagcctggactctgatgggacatgaatatatggaaatgaaaaatacaagcgccgcaatacaggcataccgccatgccatcgaggtgaataagagggattatcgggcttggtacggattaggacaaacatacgaaatccttaagatgcccttttactgtctgtactattataggcgcgctcatcaactgaggcccaatgactcgcgtatgctggtagccctaggcgaatgctatgagaagctgaatcagcttgtggaggcaaaaaagtgctactggcgagcctacgcagtgggagatgtcgagaagatggcgttagtcaagttagctaaattacacgaacagcttaccgagtccgaacaggccgcacagtgctatatcaaatacattcaggacatctacagctgcggcgagattgtggaacatcttgaagagtctactgcattcagatatctcgcccaatactactttaaatgtaagctgtgggatgaggctagcacatgcgcccagaagtgctgcgccttcaacgacacccgtgaggaaggcaaggcccttctgcgccaaattctgcagttgcgcaaccagggtgagacccctactacagaggtccctgccccattcttcctgccagcttctctgtccgccaataatacccccactagaagagtgagccccctgaatctgagttccgtgaccccctag

SEQ ID NO: 217758 - DNA, 1575 bp, synthetic construct
  misc_feature 1..1575: note = Description of Artificial Sequence: Synthetic coding sequence
  source 1..1575: mol_type = other DNA
atggagctcggcccagagcctccccataggaggagacttctctttgcttgttcacctccgccagctagtcagcccgtggttaaagccctttttggggcaagtgctgcaggcggactcagccctgttacaaatttgaccgtaactatggaccagctgcaggggctcggcagtgattacgagcagcctctggaagtgaaaaataactccaatttgcagaggatggggtcatccgagtctaccgattcaggtttttgtttggacagccccggacccctagacagcaaggagaacttggagaacccaatgcgacgcatccatagcctaccccaaaagttgctgggctgcagtccggctctgaagaggtcacactctgactctctggatcatgacatcttccagctcattgaccctgacgaaaataaggagaatgaggcgttcgaatttaaaaagccagtgagacctgtctcaaggggctgcctgcatagccacggtctacaggaaggtaaggacctgttcactcagaggcagaattctgcccctgctaggatgttgtcgagcaatgagagggactcctcagagccagggaacttcatcccactgtttaccccccagtcaccagtaaccgccactctcagtgatgaagatgacggtttcgtggatctgctggacggtgagaacctgaagaacgaagaggaaacccccagctgtatggcatcactctggactgcccctctcgttatgagaacaaccaacttagacaatagatgcaaattgtttgattctcctagtctctgctcctcctcaactcgatccgtccttaagcgcccagagagatcccaggaagagtctccccctggtagtacaaaaagacgcaaatccatgtccggtgcaagtccaaaagagagcaccaaccccgagaaagctcacgagaccctacaccaatcactcagccttgctagttcccccaaagggacaattgaaaatatactggacaatgacccgagagatcttattggcgactttagcaagggctacctgttccacaccgtcgcagggaagcatcaggatctcaaatacatctcgcctgagatcatggccagcgtgctcaatgggaaatttgctaatctgattaaagaatttgtgataatcgactgcagatatccttacgaatacgagggaggtcatataaagggggcagtcaacctgcatatggaggaggaggtggaagactttctattgaaaaagccaattgtccctaccgacgggaaacgggtcatcgtggtgttccattgtgaatttagttccgagcggggaccacgaatgtgcaggtacgtccgtgagagggataggctcgggaacgagtaccctaaactgcactatcccgagctttatgttctaaaaggaggttacaaggagttctttatgaagtgtcagagctactgtgaaccgccttcctacaggcccatgcaccatgaagactttaaagaagatctgaaaaagtttcgtacgaagtcaagaacttgggccggagagaaaagcaagagagagatgtactcgcggctgaagaaactgtag

SEQ ID NO: 217759 - DNA, 1455 bp, synthetic construct
  misc_feature 1..1455: note = Description of Artificial Sequence: Synthetic coding sequence
  source 1..1455: mol_type = other DNA
atggagcttggtcctgaacctcctcaccgcaggagactgcttttcgcctgtagcccacctccagcttctcagcccgtggtgaaggctcttttcggagccagcgccgcaggcggactatcccctgttactaatctgacagtgacaatggatcaattgcaagggctcgggtctgattacgagcagcctctagaagtgaaaaacaacagcaacctccagcgaatggggagcagcgagagcacagattccgggttttgcctggattcacccggacctctcgatagtaaggaaaacctggagaatcctatgcggagaattcacagtcttcctcaaaagctgttgggctgcagccccgctctgaagcgtagtcattcagattcattggaccacgacatttttcagctgattgatccggatgagaacaaagagaacctctcctcgaacgaacgggatagcagcgagccgggaaactttatcccgctgtttaccccgcagagtcctgtaacggcaacactgagtgatgaagacgacggttttgtggacttgcttgacggggaaaacttaaagaacgaagaggaaacgcctagttgcatggccagcctgtggactgctcccctggtgatgcgcacgactaatttagacaacagatgcaagctgttcgactctccctctctgtgctctagctctacccgctcggtgctgaaaaggcccgagcggagccaggaggaaagccccccaggctctacaaaacgtcgcaagagcatgtccggcgctagccctaaggagagcactaatcctgagaaggcgcacgagacactccaccaaagcctcagtctcgcttcttcacccaaagggaccatcgaaaacatcttggacaacgaccccagagacctcatcggagactttagcaaaggatacctgtttcacactgtggcgggaaaacatcaggatctaaagtacattagcccagagatcatggcaagcgtgttgaacggcaaattcgcgaatttgattaaagagttcgtaattatcgattgtcgatacccttatgagtatgagggtggccacatcaagggcgctgtcaatcttcacatggaggaagaagtggaggattttttgctcaaaaaaccaatcgtgccaactgacggaaaacgggtgattgttgtgtttcattgcgagttcagtagtgaaaggggccctaggatgtgtaggtacgtgagggaaagggaccggctgggcaacgaatatccaaagctacactacccggagctgtacgtattgaaagggggatataaggagtttttcatgaaatgtcagagctattgcgagcccccttcttatcgccctatgcaccacgaagattttaaagaggatctgaaaaaattcagaaccaagtccaggacgtgggcaggagaaaagagtaaacgggaaatgtactctcgactcaaaaaactttag

SEQ ID NO: 217760 - DNA, 432 bp, synthetic construct
  misc_feature 1..432: note = Description of Artificial Sequence: Synthetic coding sequence
  source 1..432: mol_type = other DNA
atggaactcgggccagaaccccctcacaggcggcgtctgctgtttgcgtgttctcctccacccgcaagccagcctgtcgtgaaggctctgtttggtgccagcgctgccggagggctatcccctgttacgaacctcacagtcaccatggatcagctgcaggggcttgggtccgactatgaacagcctttagaagtgaagaacaactcaaatttacaaagaatggggagcagcgaatccaccgactccggattctgtttggactcacctggcccactagattcaaaggaaaacctggagaaccccatgagacgaatccattctcttcctcaaaaactgctaggatgttccccggctctgaagagaagccacagtgactcactggatcacgacattttccagctgattgatccagatgagaataaagaaaattag

SEQ ID NO: 217761 - DNA, 1743 bp, synthetic construct
  misc_feature 1..1743: note = Description of Artificial Sequence: Synthetic coding sequence
  source 1..1743: mol_type = other DNA
atggaggtccctcagccagagccagcaccaggaagcgccctttcacccgcaggggtctgcggcggtgcccagagacccggtcacctacccggactgctccttggcagtcacggattactggggagcccggtgagggccgctgcctcttcaccagtgaccactctgacgcagaccatgcacgatctcgcaggccttgggagtgaaaccccaaagagccaagtgggaacgctgctgttccggtctaggtctcggttgacccacctgagtctctctcggagggctagcgaaagttctctgtcctcggagtctagcgagagttccgatgcaggactctgcatggacagcccctcccctatggacccacatatggctgaacagacattcgaacaggccattcaggcggcatcccgcatcattagaaatgagcaatttgccatccgacggttccaatcaatgccagtcaggctgctgggccactcccccgtgctcagaaacatcacgaactcccaggcacccgatggaagaaggaaaagtgaagcgggaagcggggctgcctctagttccggcgaggataaggaaaacgacggtttcgtttttaaaatgccttggaagcctacccacccatcttccacacatgccttggcggaatgggcttcccgcagagaggcattcgctcaacggcctagtagcgcacccgacctgatgtgtctgtcacccgaccggaaaatggaggtggaggaactgtctcctctagccttaggcaggttttccttgacacccgctgaaggggatactgaggaggatgatggtttcgtggatatcctagagagcgatttgaaagacgatgatgcagtgcctccagggatggagtccctcatctcggcaccacttgttaaaactctggagaaagaagaggaaaaggatttagtgatgtattccaagtgtcagcgattgtttaggagtccaagtatgccatgtagtgtaatccgaccaattttgaagcggttagaaagacctcaagaccgggatacccccgtccagaataagaggagacgatccgtgacaccaccagaagaacagcaggaagccgaggaaccgaaggcgagggtgttacgctcaaaatccctgtgccacgatgagatcgagaacctgctcgacagtgatcatcgagagctgattggagattactcaaaggctttcctgttacaaacagtggatggcaaacaccaggacctaaagtatatctcgccggagacaatggtcgccttgctgactggaaaattcagtaatatagtggacaaattcgtaattgtagactgtcgctacccatacgagtacgaggggggacacatcaagacagccgtcaacttgcctctggagcgcgatgccgaaagctttctcctcaaatctcccattgccccatgcagtctcgacaaaagagtgattctgatctttcactgcgagttttcctctgaacgcggacccaggatgtgccggttcattcgggaacgggaccgtgccgttaacgactacccctccctgtactacccagaaatgtacattcttaaggggggttacaaggaattcttcccacagcacccaaacttctgtgaacctcaggattaccggcctatgaaccacgaagcgtttaaggatgagctgaagacgtttagactgaagactaggagttgggccggagagagatcgaggcgtgagttgtgttccaggctccaggaccagtag

SEQ ID NO: 217762 - DNA, 1620 bp, synthetic construct
  misc_feature 1..1620: note = Description of Artificial Sequence: Synthetic coding sequence
  source 1..1620: mol_type = other DNA
atggaggttccccagccagagcctgccccaggtagcgcgctgagtcctgcgggagtatgtggtggagctcagcgacctggccacctgcccggtctgctcctcggaagtcatggcctcctagggagccccgttcgggctgcagcctcctctcccgttacaactttgactcaaacaatgcacgacttagctggcctgggcagcgagacacctaaatctcaggtcgggacccttctctttcgctctcggagtcgattgactcatctgagtctatcaaggcgtgctagcgaaagttctctgtctagcgaatctagtgagagcagcgacgcaggtttgtgcatggacagtccaagcccaatggacccgcatatggcagaacaaactttcgaacaggccattcaagctgcgtctcgcattattcgcaacgaacaatttgctatacggcgatttcagtccatgcccgacgggtttgtctttaaaatgccttggaaacctacacacccctcctcgacccacgccttggcagagtgggcttcaaggagggaggcatttgctcagcgaccgtcctcagcgccagatctcatgtgcctgagccccgatagaaagatggaagtagaagaactgtccccccttgctcttgggaggttttctttaactcccgctgaaggtgacaccgaagaggacgatggtttcgtggacattttagagagcgacctgaaagatgatgacgcagtgcctcctggcatggaaagcctcataagcgcacctttggtaaaaaccttagaaaaagaggaggagaaagacctggtgatgtacagcaagtgtcagagattgttccgttctccgtcaatgccatgtagcgttattaggcctatactgaagcgcctcgaacgcccacaggatcgggacacacccgttcagaacaagcgaagacggagcgtgacacctccggaggagcagcaggaggctgaggagcctaaagcccgagtgctgcggagcaaaagcctctgtcacgatgagatcgaaaacctgctcgacagcgatcacagagagctgattggggactattccaaggcattccttcttcagacagttgacggtaaacaccaagatctcaaatacatcagtccagaaaccatggtggcacttctaaccggcaaattcagtaacattgtcgacaaattcgtgattgtggactgcaggtacccgtatgagtatgaggggggtcacattaagaccgcggtaaatctgcccttagaacgggatgccgagtcttttttgttgaaatcacctatcgccccttgctctcttgataagcgcgtcatactcatctttcactgcgagttttcatctgaacggggacctaggatgtgtcgcttcatccgagaacgagaccgagccgtgaatgactacccatcgctctattatcccgagatgtacattctgaaaggaggctacaaggaattttttccacagcaccctaacttctgcgagccacaggattaccggccaatgaatcatgaagcctttaaggatgaattgaagacctttagactcaagacaaggagctgggccggtgaaaggtcgcggcgagagttatgtagtcgacttcaggatcagtag

SEQ ID NO: 217763 - DNA, 1551 bp, synthetic construct
  misc_feature 1..1551: note = Description of Artificial Sequence: Synthetic coding sequence
  source 1..1551: mol_type = other DNA
atgcacagtgaaacccccaagtcacaggttggcacactgctctttaggtcacggagcagacttacccacttgtctctgtctcggagagcaagcgagtccagcctgagttcagagtcttctgagtcatccgacgcagggctgtgcatggattcaccgagccctatggaccctcatatggctgaacagacttttgagcaggccatccaagctgcttccagaataatcaggaacgagcagtttgctatccgcaggttccagtcaatgccagtgagactgctcgggcactcccctgtgctgcgaaatataacgaatagccaggccccagacgggagacgcaaatctgaggctggtagcggggcagcaagctcttctggagaggacaaagagaacgatggatttgtgttcaaaatgccctggaaacccactcacccaagctccacccacgccttagcggagtgggcgagtaggagagaggctttcgcccagaggccatcgagcgctcccgatttaatgtgtctttcaccagatcggaaaatggaagtggaggaattatcgcccttagccttaggcaggttcagtctgacaccagctgagggcgacactgaggaggacgatgggttcgttgacatattggagtccgaccttaaagacgatgacgcagtgccccctggaatggaatccttaatcagcgcacctctcgtgaaaaccctggagaaagaagaagagaaagatctcgtgatgtactccaagtgccaacggttgttcaggagtccatccatgccctgctctgtgatacgcccaatcctcaaacgcctggagcggccacaggatagagacactcccgtacagaacaagcgacggaggagcgtcacaccacccgaggaacagcaggaagctgaagagcctaaagcaagagtgctgcggtctaagtccctgtgccacgatgagatcgaaaatctgcttgacagtgaccatcgcgaactgatcggtgactattctaaagcatttcttcttcagaccgtagacggcaaacaccaggacttgaagtatatctctcccgaaacaatggttgccttgctaaccgggaaattctcaaacattgtggataagttcgtcatcgtggattgccggtacccctacgaatacgaaggcggacacataaagacagctgttaatcttccactcgagagggacgccgagtctttcttactcaaaagccctattgctccttgcagtcttgacaagcgagtgatcctcatcttccactgcgagttctcgtccgagcgagggcctagaatgtgccgcttcatcagagagagagatcgcgctgttaacgattacccctctctctactaccccgaaatgtacatactaaaagggggttataaggaattcttcccacagcaccccaatttctgcgagccccaggattacaggcccatgaatcatgaggcattcaaagacgaattgaaaacgtttcggctgaagacccggtcctgggctggggaacgatcccggcgagagctgtgtagtagactgcaagaccagtag

SEQ ID NO: 217764 - DNA, 1470 bp, synthetic construct
  misc_feature 1..1470: note = Description of Artificial Sequence: Synthetic coding sequence
  source 1..1470: mol_type = other DNA
atgcatagcgaaacaccaaaaagccaggtcggcacacttcttttcagatccaggtcaagattgacacacctgtccttgagtcggcgtgcatcagagtccagtctgtccagcgaatctagtgaatcttccgacgccggattgtgcatggattccccaagtccaatggatccacatatggccgaacagaccttcgagcaggcaatccaggctgcttccaggattattcggaatgagcaattcgcaatccggaggttccagtccatgcccgttaggctcctcggccactcccccgttctgagaaacataacaaattcccaagctcctgacgggcgtaggaaatctgaggcgggaagcggcgctgcgagtagttctggtgaggacaaagaaaacgacggttttgtcttcaaaatgccatggaaaccaacccacccatcatcaacccacgccctggccgaatgggccagtagacgggaggccttcgcacaacgaccctctagcgccccagatctgatgtgtctatcaccggatcgaaagatggaggtcgaggaattgtcccctctggctttgggacgattctcactgacgcccgcagaaggtgatacagaagaggacgatggtttcgtggacatcttggagagcgaccttaaagatctggtcatgtacagtaagtgccagaggctgtttaggtccccaagcatgccctgttcagtgataaggccaatcctgaaacgcctcgagcgccctcaggacagggatacgccggtgcagaataagcgcaggcgctcggtcactccccctgaggagcaacaggaagccgaagaaccaaaggccagagttttgagaagcaaaagcttatgtcatgatgagatcgagaatcttctcgatagcgatcatcgtgaactgattggagattattcaaaagcttttctgctgcagactgtggacgggaaacaccaagacctcaagtatataagtcccgagaccatggtcgcattacttacaggcaagttttctaacatcgtggacaaatttgttattgtagactgcaggtacccatacgaatatgaaggcggacacatcaaaaccgctgttaacctgcctcttgaaagggacgccgaaagcttcctgctgaagtccccaattgcaccctgctcccttgataagagagtaatcctaattttccattgtgaattctcaagtgaacgcggtccgcgtatgtgccgatttatcagggagcgagatagagcagtcaacgattatccctccctttattacccggagatgtacattttgaagggcggatataaagaattcttccctcagcatccgaatttttgcgaaccgcaggactaccggccaatgaaccacgaggcctttaaggatgagctcaagacttttcggttgaaaacaaggagttgggcaggggaacggtccagacgggagttatgtagcaggttacaggatcagtag

SEQ ID NO: 217765 - DNA, 1701 bp, synthetic construct
  misc_feature 1..1701: note = Description of Artificial Sequence: Synthetic coding sequence
  source 1..1701: mol_type = other DNA
atggaagtcccccagcctgagcctgccccagggtctgccctctcacccgctggcgtttgcgggggagcccaaaggcctggtcacctgcccggactgctgctaggcagccacggattgctgggttcacctgtgcgtgctgccgcttcttcccccgtgaccactcttacacaaactatgcatgatcttgccggattaggttctagatcaaggctgacccatctgagtctctctaggagggcaagtgaaagcagtctctcctccgagagttctgaaagctccgacgccggtctgtgtatggactccccgagccctatggatccccatatggctgaacaaacctttgaacaggccatacaagcagcatctaggataattcgtaacgagcagtttgctatacggagattccagtcgatgccagttcggctgcttggacactccccggtgctgcgtaacattacgaatagccaagctccagacggaagacgtaagtctgaggcaggaagcggcgctgcaagttcttcaggggaagacaaggagaatgacggatttgtgttcaagatgccttggaagcccactcacccctcttccacacatgcactcgcggagtgggccagtcggagagaggcattcgcccagcgtccatcgtccgccccagatctgatgtgccttagccccgaccgaaaaatggaggtcgaggagctgagtcctctggcactgggcagatttagccttacacctgccgaaggagacacagaggaggacgatggttttgttgacatcctggaatctgatctgaaggatgacgacgcagtgccacccggaatggaatccctgatttccgcccctctcgtcaaaaccttagagaaggaggaagagaaagatctggtgatgtactctaagtgtcaaaggctgttccgtagccccagcatgccatgcagcgtgattagacccattctgaaaagactggagcgtcctcaggacagagacacgcctgtgcagaacaagcgccgacgcagtgtaactccaccagaggagcagcaagaagcagaggagccaaaagcccgagttcttcggagcaagtctctttgccacgacgagatcgagaacctgttagattctgatcatcgagagctgattggcgattactccaaggcctttctactgcagaccgtcgacggcaagcatcaggatttaaaatacatcagccctgagacaatggttgctctgctgactgggaaattttccaatattgtggataaattcgtgatagtggactgccggtatccctacgagtacgaaggcggtcacattaagacagcagttaacttgcctcttgagagagacgctgagtccttcctgctgaagtcacccatagccccatgctctcttgacaagagggtcatactaatattccattgtgagttctcttcagaaagaggtcctagaatgtgtagatttatccgtgaacgtgacagggcagtcaacgactatccaagtctatactaccccgagatgtatatcctgaagggaggctacaaggagttttttcctcagcaccccaatttttgcgaacctcaggattaccgcccaatgaaccatgaggcttttaaggacgaactgaagacttttcgtctgaaaacgaggagttgggccggagaaagaagccgtcgcgaactctgcagtcggctgcaggaccaatag

SEQ ID NO: 217766 - DNA, 2475 bp, synthetic construct
  misc_feature 1..2475: note = Description of Artificial Sequence: Synthetic coding sequence
  source 1..2475: mol_type = other DNA
atgacggtcctgcaggagccagtgcaggcagcaatctggcaggctttgaaccactacgcctacagggatgctgtgtttctcgcagagaggttgtatgctgaagtgcactcagaggaagctttatttttactcgcgacatgttactaccgctcggggaaggcttataaggcttaccggctgttgaagggacatagctgcacaactcctcagtgcaaatacctgttagctaagtgttgtgttgatttgagcaagttagctgaaggcgagcagatcctatctggcggtgtgttcaacaagcagaaaagccatgatgatattgttacagagtttggagattccgcctgtttcacccttagtctcttggggcatgtgtattgcaagactgaccgcctggctaagggaagcgagtgctaccagaaatctctgagtctcaatccgtttttgtggtctccatttgaatccctttgcgagataggcgagaaacccgacccggatcagacatttaaattcacgagccttcagaatttttctaattgtctcccgaatagttgcactactcaagttcctaaccacagtctctcacacaggcaacctgagacagtgctgacagagactccacaggataccattgagcttaatcgtcttaacctcgagtcgtccaacagcaaatatagtctgaacaccgattctagcgttagctatattgattcggcagtcatctcaccagacaccgtccccctggggaccgggacatcaattttgtcgaagcaagtccagaacaagccaaagacaggacgaagcctgcttggcggacctgccgcattgagccctttaactccttcctttggtatccttcctttggagactccctcccctggggacggtagctacctgcagaactacacaaatactccgccagtcatcgatgtccctagtaccggtgctccgtccaaaaaatcagttgctagaatcgggcagactgggacaaaaagcgtcttcagccaatctggcaatagtcgggaagtgaccccaatccttgcgcagactcaatcctcaggccctcagacctctacaaccccccaggttctgagcccaaccatcacaagtccccctaacgctctccccagacgatcctcgaggttattcacatccgatagcagtacgaccaaagagaactcgaagaaactgaagatgaaattcccgcctaagatcccaaaccgcaagacaaagtccaaaaccaataaaggaggaattacacagcctaatataaacgacagcctggagatcaccaagctcgattcctcaattatctcggaaggaaaaattagcacgattactccccagattcaagcttttaacctgcagaaggccgctgcggaagggctgatgtccctgctgcgagaaatgggtaaaggatatctggcactctgttcctacaattgcaaggaggccatcaacatattaagtcaccttccgagccaccactataacacagggtgggtattgtgccagataggtcgtgcctacttcgagttgagtgaatatatgcaagctgaacggatcttctccgaggtgcgcaggatcgagaactaccgggtcgagggtatggaaatctactctaccacactctggcacctccaaaaagatgtggcgctcagtgttctaagtaaggatctgacagatatggataaaaacagcccggaggcatggtgcgccgcaggaaactgcttcagcctccagagggaacacgatatcgcaataaagttctttcagcgggctattcaggtggatccaaattacgcgtatgcctatactttgttagggcacgagtttgttctcactgaagaacttgacaaggccctcgcctgttttaggaacgcaattagggtgaatcccagacactataatgcttggtacggtctcggcatgatctactataagcaggaaaaattcagcctggctgagatgcactttcagaaggcacttgacatcaatccgcagagttccgtgctgctctgtcacatcggtgtcgtccagcacgccttgaaaaaatccgagaaggccttagatactttgaataaggctatcgtgatagatccaaaaaaccctctgtgtaaatttcacagagctagcgtgctgtttgccaatgagaagtataagtcagcactccaggaactggaggagctcaaacagatcgtcccaaaagaatccctggtttattttctaattggaaaggtgtataaaaagctaggccagactcacctggcactcatgaacttctcttgggccatggacttggacccaaagggggcaaacaatcaaatcaaggaggccatagataagcgttaccttcctgatgacgaagaacccatcacccaggaagagcagatcatggggacggatgagtcgcaagaatcgtctatgacggatgccgacgatacccagttacacgctgccgagtctgacgagttttag

SEQ ID NO: 217767 - DNA, 2292 bp, synthetic construct
  misc_feature 1..2292: note = Description of Artificial Sequence: Synthetic coding sequence
  source 1..2292: mol_type = other DNA
atggcttccactaaaccgctctgtctgcctagatgcgggtttcccagaaggactcctctgtgccgtcgattggccgaaggggaacaaatcctgtccggcggagtatttaataaacagaaaagccacgatgatatcgtaacagaattcggcgattctgcttgctttactctgtcactgctgggtcacgtctattgtaaaacagaccggttggctaaaggctctgaatgctaccagaagtcattaagcctaaacccattcctatggtctccatttgaaagcttgtgtgaaattggcgaaaagccagaccctgatcagacgttcaaattcaccagcctccagaatttttctaactgcctgcctaacagctgcaccacccaagtccccaaccatagtctgtctcaccggcaaccggagacagtgctcaccgaaaccccccaggataccatcgagctgaaccgccttaatcttgaatcatcaaatagtaaatactctctcaatacggactcatctgtctcctacatagactccgctgttatttctccagacaccgtacctctggggaccgggacgagcatcctgtccaagcaggtgcagaacaaacccaaaaccggcagatcactcttgggcggaccagcagccttgtccccattgacgccatcctttggcatattaccgcttgaaaccccctccccaggcgatggaagttatttacagaattataccaacacccccccagtgatcgatgtgcctagtaccggggcaccgtctaaaaagagtgtcgcccgtattggccagacgggaaccaagtccgtcttttctcagagtggcaatagccgggaagtcacccccattttagcccagacccaatcctcagggcctcagacaagcacaacaccccaagtgttgagccccaccatcacatcacccccaaatgctttgccaagacgctcttcaaggctatttacatctgacagctcaactaccaaggagaactctaaaaaattaaaaatgaaattcccccctaagatccctaataggaaaaccaagtcaaaaaccaataagggtggtataacccaacccaacataaatgattctctggagatcaccaagctagacagttccattatcagcgaaggtaaaatctccaccatcaccccccagatacaggcctttaacctgcagaaggccgctgctgaagggctcatgtccttgttaagggagatgggaaagggatacttggccctgtgctcctataactgtaaggaggcaatcaacatactctcacatctgccttcccaccactataatacggggtgggtgttatgtcagatcgggagggcatactttgaactctcagagtatatgcaggcagagaggatattttcagaggtgaggaggatcgagaattatcgtgttgagggtatggagatttactcaacaactctgtggcacctgcaaaaggacgtggctctgagtgtgctctccaaggacctgacagacatggataagaatagccctgaggcatggtgcgctgccggaaactgctttagtctccagagggagcacgacatcgccatcaagttctttcaacgtgctatccaggttgaccctaactacgcgtacgcctacactctcctcggtcatgagttcgtcttgaccgaagagctggataaggcactggcctgctttcggaacgcaattcgcgtgaatcctagacattataacgcgtggtatggacttgggatgatctactataagcaggagaagttttccttagccgaaatgcatttccagaaagccctggatatcaaccctcaaagttctgtgctgctatgccatattggcgttgtgcagcatgcactgaagaaaagtgagaaggccttagacacgctgaacaaggcgatcgtgattgaccctaagaacccactgtgtaagttccatagagcgagcgtgctgttcgcaaatgaaaagtataagtctgctctgcaggagttagaagaactcaagcagatcgttccaaaagaatccctggtgtactttcttatcgggaaggtgtacaagaaactgggacagacccatctcgccctgatgaacttctcgtgggctatggacctggaccctaagggtgccaataaccagataaaagaggctattgataaaaggtatctgccagatgatgaagaaccaatcactcaggaggagcagataatgggtaccgacgagtcccaagagtctagcatgacggatgctgacgacacccaacttcacgccgctgagagtgatgagttctag

SEQ ID NO: 217768 - DNA, 2472 bp, synthetic construct
  misc_feature 1..2472: note = Description of Artificial Sequence: Synthetic coding sequence
  source 1..2472: mol_type = other DNA
atgacagtactgcaggagccagtacaagcggcaatttggcaagccctgaaccattatgcttatagagatgctgtgttcctagccgagcgactgtacgccgaggtgcattctgaggaggctcttttcctgttagccacttgctactatcgctccggtaaggcttataaagcgtacaggttactgaaaggacactcctgtactacaccccagtgtaaatatctgttggctaaatgctgcgtagacctgtcgaaactggctgagggagagcagattctatcaggtggggtgttcaataaacagaagtcgcacgatgacattgtgactgagttcggagatagcgcctgtttcaccctctccctgctcgggcatgtctactgcaagacagacagattagctaaaggaagtgaatgttaccaaaaatccttgtcactgaatccttttctttggagtccattcgagtcactgtgtgagatcggtgagaaacctgacccagaccaaacattcaaattcacatccttgcagaacttctcaaattgtttgcccaactcttgtactacgcaggtgccaaaccactctctgtcacatcggcagcccgagaccgtcctaacagagaccccccaggacactatcgagttgaacagactcaatctggagtcatcaaattccaagtactctctgaataccgacagcagtgtgagctatattgactcagccgtgatctcccctgacactgtgcctcttggaaccggcacgtccattctgtctaagcaagtccagaacaagcctaaaaccggacgatcactgctcggaggtcctgcggctctgtctccactgactccaagctttggaatcctgccattggaaacaccgtcaccaggggatggctcatatctgcagaactacaccaacacaccgcctgtcattgatgttcctagcaccggcgcaccatctaaaaagtccgtcgctagaataggccaaaccggcactaagagcgtttttagccaaagcgggaactcccgggaggtcaccccaattctggcgcagacccagtcctcaggccctcagactagcacaacaccacaggtgctgagccctaccatcaccagcccaccaaacgcccttccacggaggagctcgcgtctgttcacctctgatagctctacaaccaaagaaaattccaagaagctgaaaatgaagtttccaccgaagatccctaaccgtaaaacgaagagcaagactaacaagggtggcatcacccagcccaatattaatgattcattggaaattacaaagctggactcatcaatcataagcgagggaaagattagtaccataaccccccagatccaggcttttaacctgcagaaggcggctgcaggtctaatgtccctgttacgggagatggggaagggttacctggctctatgcagttataattgcaaggaagctattaacatcctgagtcacctgccttctcaccactataacacgggttgggtcctgtgccaaattggacgggcttactttgagctgtcagagtacatgcaggcagaaagaattttttccgaggtgcgacggatcgaaaactacagagtagagggaatggaaatttatagcactacactgtggcacctccagaaagacgtggcactgagcgtgctgtctaaagacttgactgatatggataaaaactccccagaggcttggtgcgctgctggcaactgtttcagtctgcagcgcgagcatgacattgccatcaagttcttccagcgagccattcaagtggacccaaattacgcttatgcctacacattgttaggtcatgagtttgtactgaccgaggaactcgacaaggccctggcatgcttccgcaacgccatacgggtgaatcctcggcactataatgcttggtatgggctgggcatgatttactacaagcaggaaaaattctctctggctgaaatgcatttccagaaggctcttgatataaacccccaaagttccgtgctgttgtgccacataggcgtggtgcagcacgctctgaaaaagtcagagaaagccctcgacaccctaaacaaagccatagttatagatccaaagaatcccctctgcaaattccaccgggcttcagtcctctttgcaaacgaaaaatacaagtctgcccttcaagagctggaggaactcaagcaaattgttccaaaagagtctcttgtgtattttctcattggcaaggtgtacaaaaagctgggccagactcaccttgctctaatgaacttttcctgggctatggatctggatccgaagggtgctaataatcagattaaagaggccattgacaaaagatacctgccggacgatgaagaacctataacccaggaggagcagattatggggactgacgagtcacaagagagctcaatgacagacgctgatgacacacagctgcacgcagccgaaagcgatgagttttag

SEQ ID NO: 217769 - DNA, 2493 bp, synthetic construct
  misc_feature 1..2493: note = Description of Artificial Sequence: Synthetic coding sequence
  source 1..2493: mol_type = other DNA
atgaccgttctgcaagagcccgtacaggccgcaatttggcaggctctcaaccactacgcatatcgcgacgctgtcttcctggctgagcgcctgtatgcagaagtgcacagcgaggaggctctgttcttactggccacatgttattatagaagcgggaaagcctataaggcttatcgactcctgaaaggccattcttgtacgacccctcagtgcaaatatcttctcgccaagtgctgcgtggatctgagcaagctcgccgagggagaacagatcctttccggaggtgtgttcaataaacagaaaagccatgatgacattgtaactgagttcggagacagcgcctgtttcactctgagcttgctaggccacgtgtactgtaagactgatcgcctcgctaaaggatcagaatgctaccagaaatcgctctctttgaacccctttctgtggagcccatttgaatcactctgcgaaattggcgagaaacctgaccccgatcaaaccttcaaatttacatctttacaaaactttagcaactgtctgcccaatagctgtaccacccaggtgccgaaccatagcctcagccaccggcaaccagagacagtgctgaccgaaacacctcaggataccatagagttgaaccggctgaatcttgagtcatctaacagcaagtattctctgaacacagattcctcagtttcgtacatcgattccgcagtaataagtcctgatactgtgcccctgggcaccggcaccagcattctgtcaaagcaggtgcagaacaaacctaagactggtcgatccttgctcggcggaccagcagctctaagcccgctcacaccgtcgtttggaatcctgccccttgaaaccccatctcccggagacggaagctatttacaaaactacaccaatacccccccagtcatcgacgtgccctcaaccggagcaccatctaaaaaaaccttcagagtcttgcagtcagtggccagaattggacagaccggaactaaatccgttttctctcagtctgggaactcccgtgaggtgacacccatcctggcccagacccagtcttccgggccacagacctccactaccccacaggtgttgtctcctacaatcacgtcacccccaaatgcactgccacgcagatccagtcgactgtttacctctgactcctccaccacaaaagagaactcaaagaagttgaaaatgaaatttcctcctaagatcccgaacagaaaaactaaaagtaaaaccaataaagggggaatcacacagccgaatataaatgactccctggagatcacgaagctcgacagttccatcatcagcgagggcaagatctcgacaatcactcctcagatccaggccttcaatcttcagaaggcagctgccgagggtcttatgagcctattgcgggagatgggtaaggggtatctggcactgtgctcctacaattgtaaagaggccattaatatcctgtcccacctcccgagccaccactacaacaccgggtgggttctttgtcagattggccgagcctatttcgaactgagtgaatacatgcaggccgagagaatatttagtgaagttcgcagaattgagaattaccgagtcgaaggcatggaaatttacagcaccaccctgtggcacctgcaaaaggacgtggcactatccgtgctttccaaagacctgacagatatggacaagaacagtccagaagcctggtgtgccgctggcaactgtttttctttgcaacgagaacacgacattgctataaaattctttcaaagagcgatccaggtggacccgaattatgcatacgcctacaccctgctgggacatgaatttgtgttgactgaggaactggataaggccctcgcctgctttaggaatgccattcgcgtcaatccgaggcactacaacgcatggtacggactagggatgatttactacaagcaggaaaagttcagcctagctgagatgcattttcaaaaagctctggatatcaatccccagtcctccgttcttctctgtcacattggggttgtacagcacgcacttaagaagagcgaaaaagccttggacacactaaacaaggctatcgtcatcgatcccaaaaacccactgtgtaagttccatcgagcatccgtactttttgccaatgaaaaatataaatctgcacttcaagagctggaggaactgaaacaaatcgtcccgaaagaaagcctggtgtacttcctcatcggtaaagtctataagaagcttgggcagacacaccttgccctgatgaacttcagttgggccatggacttggaccctaagggggctaacaatcagatcaaagaggctattgacaaaagatatctgcccgacgatgaagaacccattacgcaggaggaacaaatcatggggacagatgagagccaggagtctagcatgacggatgctgatgatacacagctacatgccgctgagtccgatgagttttag

SEQ ID NO: 217770 - DNA, 1740 bp, synthetic construct
  misc_feature 1..1740: note = Description of Artificial Sequence: Synthetic coding sequence
  source 1..1740: mol_type = other DNA
atgagcgccgctatagctgccctcgctgcttcctacggatcaggatctggatcagagtccgatagcgattctgagtctagccgttgccccctgccagccgctgactccttaatgcatttaaccaagtccccaagcagtaagccatcccttgcagtggctgtggactctgcgccagaggtggctgtcaaggaggacctggaaaccggtgtccatcttgatccagctgtcaaggaagtgcagtataatcctacctatgaaactatgttcgctcccgagtttggtccagaaaacccttttcgcactcaacagatggcagccccaaggaatatgctcagtggttatgcagagcccgctcacattaacgacttcatgttcgagcaacagcgccgaacatttgctacctatggctatgcgctggatccgtccttggataatcatcaggtatccgcaaagtacatcggcagtgtagaagaggccgagaaaaatcagggattgacagtattcgaaaccgggcaaaagaagactgagaagcgcaagaagttcaaggagaatgacgcatctaacatcgacggcttcctcggtccatgggctaaatacgtcgacgagaaagatgtagctaaacctagtgaagaagagcagaaagagctagatgaaatcaccgcaaagcggcaaaagaaaggcaagcaggaagaggaaaagcccggagaggagaagacaattctacatgttaaagagatgtacgactatcagggcaggtcttatctccatatacctcaggatgtgggagtcaatctgcgcagtacgatgcctccggagaaatgctatcttcccaagaaacagattcacgtatggtcgggacacactaagggtgtttcagccgtgaggttatttcccctctccggccacttgttgctgtcctgtagtatggattgcaagattaaactgtgggaggtctatggcgaacgacgttgcctacgaacgtttatcgggcattccaaagccgtcagggatatttgcttcaacacagccggaactcagttcctatccgccgcttatgataggtacttaaagttgtgggacacagaaaccggccagtgcattagcaggttcacgaacagaaaagttccttactgtgttaagtttaaccccgatgaggacaaacagaacctcttcgttgccggaatgtctgacaaaaaaatcgtgcagtgggacataagatcgggcgagatcgtccaagagtacgaccgccatttgggagccgtgaataccatcgtgttcgtggacgaaaaccgtaggttcgtgagcacaagcgacgacaagtcactgcgggtgtgggagtgggatatccctgttgacttcaaatacatcgcggagcctagtatgcactctatgccggcagtcaccttgtcacccaatggcaagtggctggcatgtcaaagcatggacaaccaaattctcatcttcggcgcacaaaatcgttttcgattgaataagaaaaagatttttaaaggtcacatggtggctggttatgcttgccaggtggatttttcccctgatatgtcttacgtgatcagtggagacggtaatggtaaacttaacatttgggattggaagacaaccaaactgtacagtagatttaaagcccatgacaaagtttgcatcggcgctgtgtggcaccctcacgagacgagtaaggtgataacctgtggatgggacggccttattaaactttgggattag

SEQ ID NO: 217771 - DNA, 1620 bp, synthetic construct
  misc_feature 1..1620: note = Description of Artificial Sequence: Synthetic coding sequence
  source 1..1620: mol_type = other DNA
atgtcagccgctatcgcagccctagccgcaagttacggttccggttctggatccgagtcagattccgattcagaatctagcagatgtcccttgccggctgcagacagtctgatgcacctgaccaaaagcccttctagtaagccgtctctcgctgtagcagtggacagcgctccagaagttgcagtgaaggaggatctggaaactggggtccatttagatcccgcagtgaaggaggtgcagtataaccccacttacgagactatgttcgcccctgagtttggcccagaaaacccatttcgcacccagcagatggccgcacctcgcaacatgctaagcggttatgccgagcccgcacatattaatgatttcatgtttgaacagcagcggcgtacgttcgcaacttacggatatgctttggacccatcactcgataaccaccaagtctccgccaagtatatcggaagcgtagaggaggcggaaaagaaccagggcctcaccgtgtttgagacgggccagaaaaagaccgagaaacgcaaaaagtttaaagagaacgacgcgagtaacatcgatggcttccttggtccatgggccaaatatgttgatgaaaaagatgtggctaagccttcagaggaggaacaaaaggagcttgacgaaataacggccaagcgccagaagaagggaaagcaggaggaagagaaacccggagaggaaaaaacaatcctccacgtcaaagagatgtacgattaccaaggtcgcagttatctccacatcccgcaagacgtgggcgtgaacctacggtccaccatgcctccagagaaatgttacttaccaaaaaagcaaatccatgtttggagcggccatacaaaaggggttagtgccgtgagactatttcccctctctgggcatctgctgctgagctgcagcatggactgcaagatcaaactttgggaagtttatggtgaaaggagatgccttcgtactttcatcggccactcaaaagctgtccgcgacatttgttttaacacggcaggaactcagttcttgtccgccgcttatgaccggtatctgaagctgtgggataccgagaccggacaatgcatctctcgcttcaccaacaggaaggtgccttattgtgtcaaattcaaccctgacgaggacaagcaaaacctcttcgtggctggtatgagtgataagaagatagtgcagtgggatatcaggagcggagaaatcgtacaggagtatgaccggcacctgggcgcagtgaacactattgtgttcgttgacgaaaacaggcgcttcgtgtccacttcggatgacaaaagcctgcgagtatgggaatgggacatcccagtcgattttaaatatatcgccgagcctagtatgcattccatgcctgccgtaactctgagccctaacgggaagtggttggcttgtcagagcatggacaaccaaatcctgatttttggcgcacagaatcggttcaggctcaataaaaaaaaaatatttaaaggtcatatggtggccggatacgcttgtcaggttgatttctctccggacatgcgcgtcccacagtcctttcagaaccttaaggaagtcactgctggccctcaagaaggctag

SEQ ID NO: 217772 - DNA, 1740 bp, synthetic construct
  misc_feature 1..1740: note = Description of Artificial Sequence: Synthetic coding sequence
  source 1..1740: mol_type = other DNA
atgtcagctgctatagcagcactcgcagcatcctacggatctggatccgggtcagagagtgattcagattcggagtcgagtcgctgccctcttccagccgcagactctttgatgcatctgactaaatccccatcctctaaaccgtcattggccgtggccgtcgacagcgctcctgaggtcgctgtaaaagaggacctggagaccggggtccacctggatccagccgtgaaagaagttcaatataatcccacatacgagaccatgttcgcccctgagtttggccctgaaaatcctttccgtacccagcagatggcagctcctcgcaatatgctaagtgggtatgctgagcccgcacatattaatgacttcatgtttgagcagcagcgccgtacctttgcaacttacgggtatgctttggacccatccctggataatcaccaggttagtgctaaatatattggctccgtcgaagaagctgaaaaaaaccaggggctcaccgtatttgagacaggacagaagaaaacagagaaacgaaaaaaatttaaggagaacgatgcatccaatatcgatggatttcttggtccgtgggccaaatacgttgacgaaaaggacgttgccaaaccgtccgaagaagagcagaaggagctggatgagataaccgcaaagcgacagaagaaggggaaacaggaagaggagaagcctggggaggagaagaccatcctccacgtcaaggagatgtatgactaccagggccgatcatacctccacatccctcaggatgtcggcgtgaatctgagatctaccatgcccccagaaaagtgttacctgcctaaaaagcagattcatgtttggtccggccataccaaaggcgtcagtgcagtgcggcttttcccgttgagtggtcatctgcttctgtcctgctccatggattgtaaaatcaaactctgggaggtctatggcgagagaagatgccttagaacttttattggacacagtaaggctgtccgggacatctgtttcaatacagccggaacacagttcttaagcgcagcatacgaccgatatctcaagctttgggacactgagacagggcagtgtatatccaggttcacaaaccgcaaggtcccctactgtgtcaagtttaatccagatgaagacaagcagaatttattcgtggccggaatgagcgacaaaaagattgtccagtgggatattaggtccggcgaaattgtgcaagagtacgatcggcacctgggtgccgtcaataccatcgtgtttgtggacgagaaccgcaggttcgtttctacaagtgatgataagagcctgcgcgtgtgggagtgggatattcccgttgacttcaaatacatcgcagaaccatccatgcactcaatgcccgcagtcacactgtcccccaatggcaagtggctggcttgccagtcgatggataatcaaatcttgatcttcggcgcacaaaatagatttcggcttaacaaaaaaaagatttttaaagggcatatggttgctggctacgcttgccaagttgatttctcacctgatatgagttatgtgatcagtggtgacggtaacggtaagctcaatatctgggattggaagacaaccaaactctacagcaggtttaaagcacatgataaggtttgtataggggcagtctggcatcctcacgaaacatccaaagtaatcacctgcggatgggacggccttataaagttgtgggactag

SEQ ID NO: 217773 - DNA, 1620 bp, synthetic construct
  misc_feature 1..1620: note = Description of Artificial Sequence: Synthetic coding sequence
  source 1..1620: mol_type = other DNA
atgagcgccgctattgctgcccttgcagcgagttacggtagtggctctgggtctgagagcgacagcgactccgagtcttcccggtgtcctctaccggctgccgattctctcatgcatctcacaaaatctccatcctccaaaccttccctggcagtggcagttgatagcgcccctgaagttgccgtgaaggaagacctggaaacaggagtccatttggacccggcagtaaaggaagtgcagtataaccctacctacgaaacaatgttcgctccagaattcggtcctgaaaacccatttaggacacagcagatggctgcacctagaaacatgctgagcggctacgccgagcccgcacatatcaatgacttcatgttcgagcaacagagacgcaccttcgctacctatggctacgcacttgatccttctctggataaccaccaggtaagcgctaaatatatcggaagcgtggaggaggcagaaaagaaccagggcctcacagttttcgaaactggacaaaaaaagacagagaagagaaagaagttcaaggagaacgatgcatcgaacattgacggttttctgggaccgtgggctaaatacgttgatgagaaggatgtggccaagccatctgaggaggagcagaaggagctggatgaaattacggccaaacggcagaaaaaaggcaaacaggaggaagaaaaacctggtgaggaaaaaacaatacttcacgtaaaagagatgtacgactaccagggacggagctacctccatatccctcaggacgtgggggtgaatttaagaagtacaatgccgcctgagaaatgttatctcccaaagaaacagatccacgtctggtcaggacatactaaaggtgtcagtgccgtgagactgttcccgctgagtggccatcttctgctttcctgtagcatggactgcaaaatcaaactctgggaggtctatggggagagacggtgtttacggacatttattgggcattctaaagccgtaagagatatttgctttaataccgccggaacacagtttctcagcgcggcttacgatcggtacctgaaactgtgggatactgaaaccggtcagtgcatcagtcgctttacgaatagaaaggttccctactgcgtcaagttcaatcctgacgaggacaagcagaatctgttcgtggccggtatgagtgacaagaaaattgtgcagtgggacataagaagtggggagattgtccaggagtacgaccggcacctcggcgctgtgaacaccatcgtctttgtagatgaaaataggcggttcgtgagcacatccgacgacaaatcccttcgtgtttgggagtgggacatccccgtcgacttcaagtatatcgcagaaccctctatgcattccatgcccgcagttactttgagtcctaatggtaaatggcttgcgtgccagtcaatggacaaccagatcctcatcttcggagcacaaaaccgtttccggctgaataagaaaaagatattcaaaggccacatggtcgcgggatacgcatgtcaggtcgacttctcaccggatatgcgagtgccacagtcttttcagaacttaaaagaagtgacagctggcccacaggaaggctag

SEQ ID NO: 217774 - DNA, 378 bp, synthetic construct
  misc_feature 1..378: note = Description of Artificial Sequence: Synthetic coding sequence
  source 1..378: mol_type = other DNA
tgaaatatgctatccggctatgctgagcctgcccatatcaacgatttcatgttcgagcagcagcggcgaactttcgccacctatgggtacgcccttgaccccagtctggacaatcaccaggtgagcgccaagtatattggctctgttgaagaggctgaaaagaatcagggactcactgtttttgagacagggcagaaaaagacagagaagcgcaagaaattcaaagaaaacgacgccagcaatattgacggctttcttggtccgtgggccaagtacgtggacgagaaagacgtcgccaaacccagcgaggtgtctttcgatgtcttcaattgccaattcaggtatacactatatttatacgaaggataccttcattag

SEQ ID NO: 217775 - DNA, 495 bp, synthetic construct
  misc_feature 1..495: note = Description of Artificial Sequence: Synthetic coding sequence
  source 1..495: mol_type = other DNA
atgtcagccgctatcgcagcactggccgcttcctacgggtccggctcgggctcggaaagcgacagcgactcagagtcttccagatgtccgctccctgccgctgacagtctgatgcacctcacaaagagtccctcctccaaaccatccttagcagttgcagtggactcagctcctgaggtggctgtaaaggaggatctagaaaccggcgtgcacctcgatccagcagtgaaagaggtgcagtacaacccgacatatgagactatgtttgcccctgaatttggcccagaaaatcctttccgcactcagcagatggcggctcctcggaatatgctgtcagggtatgccgaacctgcccatatcaacgattttatgttcgaacagcagagaagaaccttcgccacttatgggtatgcgctggaccccagccttgataaccaccaagtctcggccaagtacatcggctccgtggaggaggccgaaaagattaaggtctag

SEQ ID NO: 217776 - DNA, 213 bp, synthetic construct
  misc_feature 1..213: note = Description of Artificial Sequence: Synthetic coding sequence
  source 1..213: mol_type = other DNA
atggcagccccacgaaatatgcttagtgggtacgccgaacctgctcatattaatgattttatgttcgagcagcagcggaggacattcgctacttacggctacgctttggatccgtccctcgataatcaccaggtctccgccaagtacatcggctccgtcgaggaggccgagaaaaatcagggtcttactgtgtttgaaacagggcagaagtag

SEQ ID NO: 217777 - DNA, 1305 bp, synthetic construct
  misc_feature 1..1305: note = Description of Artificial Sequence: Synthetic coding sequence
  source 1..1305: mol_type = other DNA
atgagtatccttaagattcacgcaagagagatcttcgattcaagaggcaatccgaccgtggaggtagatttgttcaccagcaaaggattgtttagggccgctgtcccatctggggcttccactggcatttatgaagcccttgagcttcgtgacaacgataagacccgttatatgggtaaaggtgttagcaaggctgtcgaacacattaacaagaccattgcaccggcattagtcagcaaaaaactcaatgtgaccgagcaagaaaaaattgataagctcatgattgagatggacggtaccgagaacaagtcaaaattcggtgccaatgcaatcctgggcgtcagccttgcggtatgcaaagccggagctgtcgaaaaaggagtgcccctgtataggcatattgcagaccttgcgggaaatagtgaagtcatcttgccagttccggcattcaatgtgattaacgggggatcacatgcaggaaacaagctagccatgcaggagttcatgatccttccagtcggcgcagccaacttccgcgaggctatgagaataggcgcagaagtctaccataatcttaagaatgtcattaaggaaaaatatggcaaagatgccactaatgtgggagatgaaggagggttcgcaccgaatattttagaaaacaaggaaggactcgagctgctgaagaccgcaattggtaaagccggatatacggataaagtggtgataggcatggacgtggcagcctccgagtttttcaggtctggcaaatacgacctggatttcaaaagccctgacgatccctcccgctatatctccccagatcagctcgcagacctttacaagagctttattaaagattatcccgtagtttcgatcgaggaccccttcgatcaggatgactggggggcttggcagaaatttaccgctagtgcaggaatccaagttgttggggacgatctaaccgtaaccaatcccaaaagaatcgccaaggcagtcaatgagaagtcatgcaactgtctactcctgaaagtgaatcaaattggatcagtgaccgaatccctgcaggcctgcaaattggcccaggccaacggctggggggtcatggtctctcaccggagtggggaaaccgaagatacttttattgctgacctggtggtgggattgtgtactggccagattaagacaggcgctccatgcagatctgagagactggcaaagtacaatcagcttctacggattgaagaagaattagggtctaaggcaaagtttgccggtaggaactttagaaatcctttagcaaaatag

SEQ ID NO: 217778 - DNA, 360 bp, synthetic construct
  misc_feature 1..360: note = Description of Artificial Sequence: Synthetic coding sequence
  source 1..360: mol_type = other DNA
atgcgtaagactgccagcagttgcccggcatcactgacttgcgattgctatgccaccgacaaggtgtgttccatctgcctgtctagacgacagcaggttgccccacgagcaggcacacccggatttagagctcccgaggtgttgactaagtgtcctaaccagacaaccgggaagtccattttgtgcagcaaggaagtgcctgcacaggatctgcggaagctgtgcgagagattacgaggcatggacagctctacacccaagttgaccagcgacatccagggacacgcatcgcaccaacctgctattagtgagaagaccgaccacaaagccagctgcctggtgcagaccccccctggttag

SEQ ID NO: 217779 - DNA, 474 bp, synthetic construct
  misc_feature 1..474: note = Description of Artificial Sequence: Synthetic coding sequence
  source 1..474: mol_type = other DNA
atggaggcatccttgggaatacaaatggacgaacctatggctttcagcccccagcgggacaggttccaggccgaagggagtctgaagaagaacgagcagaatttcaagctagccggagtcaagaaggacatcgaaaaactctatgaagcagttccccagttatctaacgttttcaagatcgaggacaagatcggggagggaacttttagctcagtgtatctggccacagcacagcttcaggtggggcctgaagaaaaaattgctctcaaacacttgataccaacaagccatccgattcggatcgctgccgaattgcaatgcctaacagtagcgggaggacaagacaacgtgatgggggtgaaatactgcttccggaagaacgatcatgtcgtaatcgctatgccctatctggagcatgaatcctttttggatatccttaactcgctgtcttttcaagaggtgagggagtactag

SEQ ID NO: 217780 - DNA, 1725 bp, synthetic construct
  misc_feature 1..1725: note = Description of Artificial Sequence: Synthetic coding sequence
  source 1..1725: mol_type = other DNA
atggaagcgagcttggggatacaaatggacgaaccgatggctttttctccacagagggaccgctttcaggccgaggggagcctcaagaagaatgagcagaattttaagcttgccggagtcaaaaaggatatcgaaaagctctacgaggcagtccctcaactgtctaacgtctttaaaattgaggacaaaatcggggagggaacattttcttctgtctacctggcgacagcacaactgcaagtgggaccagaagagaaaattgccctgaaacatctcataccaacctcacacccaattagaattgccgcagaactgcagtgcctcacggtcgctggaggccaggataacgttatgggggtgaagtattgctttcgtaaaaacgatcatgtagtcattgccatgccctatctcgagcatgagagcttcttagatatcctcaactcccttagctttcaggaggtgcgcgagtatatgctcaatttgtttaaggccctaaagagaatccatcagttcggcattgtccatcgcgatgtcaaaccctccaactttctttacaatagacgacttaaaaaatatgccttggtggacttcggcttggctcagggcacccacgacaccaaaattgaattgcttaagttcgtgcaaagtgaggcacagcaggaaagatgctctcaaaataagagccacatcatcactggaaataagatacctctctccggccctgtacctaaagagttggaccaacagtccaccaccaaagccagcgtgaagaggccatacacaaacgcccagattcaaataaagcagggtaaagatggaaaggaaggctccgtgggattgagcgttcagcgttctgtgttcggtgagcggaactttaacattcacagttctattagccacgaatctcccgcagtgaagttgatgaaacagtccaagactgtggacgtgctgtctcgtaagcttgcgaccaaaaaaaaggccatctcaacaaaggtgatgaactctgccgtgatgcggaagacggcctcatcttgtccggcttccctcacatgcgactgctatgccacagacaaggtatgtagcatttgtctatccagacgtcaacaggtggccccaagagccggaacaccaggctttagagcccctgaggttctaaccaagtgtcccaaccagactaccgctatcgatatgtggtctgctggtgtgatttttctaagtctgcttagcgggagatatcctttctacaaagcctctgacgatctgaccgctctagcacagattatgacaatccgaggctccagagagactattcaggctgccaaaacgtttgggaaatccatcctgtgttccaaagaggttcccgctcaggacctgcgcaagctctgtgaacgcctacggggtatggatagttccactcccaagctcacttcagacatacaaggccatgcttctcatcagcccgcaatttccgaaaagacggaccacaaggcctcctgtctggtgcagacgcctcctgggcagtattcaggcaactcgtttaagaaaggtgattccaattcctgcgagcattgtttcgacgaatataataccaacttagaaggctggaacgaggtccccgatgaagcatacgacttgcttgacaagctgctggacctgaatcccgcaagccgcatcaccgctgaagaagccctgcttcatccgttcttcaaggatatgagcctctag

SEQ ID NO: 217781 - DNA, 1641 bp, synthetic construct
  misc_feature 1..1641: note = Description of Artificial Sequence: Synthetic coding sequence
  source 1..1641: mol_type = other DNA
atggaggcctcgctgggtattcaaatggacgagccaatggcattttctccccaaagagacaggttccaggctgagggttctttaaaaaagaacgagcaaaatttcaaactggctggcaccttcagcagtgtctacttagcaacagcacagttgcaagtgggcccagaagagaagattgcgcttaagcaccttattcctacctctcacccaatccggatagccgcagaattgcagtgcttgactgtcgcaggcggacaggacaatgtgatgggtgtcaagtactgtttccgtaagaatgatcatgtggtcatagctatgccatatctggaacacgagagtttcttggacattctcaactcgctgtctttccaggaagtgcgagagtatatgcttaatctgtttaaagctctgaaaagaattcaccaattcggaatcgttcaccgggacgtgaagccctcaaatttcctgtataatcgcaggctgaaaaaatacgccctggttgactttggcctggctcagggcacacacgacactaagatcgaattactcaagtttgtccagtccgaagcgcaacaggaacgctgtagtcagaataaatcccatatcataacagggaataagattcccctgtctggaccagtgcccaaggagttggatcagcagtccaccaccaaagccagcgtgaaacgaccctacactaatgcacagatccagatcaagcagggtaaggatggaaaagaaggcagcgtgggactgagcgtgcagaggagcgttttcggagaaaggaactttaacattcactcctctatatcacacgagagccccgctgtgaaactcatgaagcaaagcaagactgtcgatgtcctgtctaggaagctggcaaccaaaaaaaaagcgatctccactaaggtcatgaatagcgccgtaatgaggaaaacagcctcgtcctgcccagcttcacttacctgcgactgttatgcgaccgataaggtttgctccatttgcctctcgagacgtcaacaggtggcccctagggctggtaccccgggttttcgggctccagaagttctcaccaaatgtcccaaccagaccaccgcaatagatatgtggtctgcgggtgtcattttcctttccctgctctccggcaggtaccccttctacaaagccagtgatgacctgacggctcttgcccagatcatgactatcagagggagccgcgagaccatacaagctgctaagacctttggcaaatctattctgtgttccaaggaggtacccgcacaggatttgcggaaactgtgcgagcgccttcggggaatggattcttcaactcctaaactgacctcagacattcagggccatgcaagtcatcagcccgctatctctgaaaaaaccgaccacaaagcgagctgcctagttcagacacccccaggccagtactctggcaactcattcaagaagggcgattccaactcctgcgagcactgcttcgatgagtacaatacaaacttagagggttggaatgaggttccggatgaagcatacgaccttctcgataaactcctcgacctcaatcccgcatctcgaattaccgctgaggaggccctgttacacccattttttaaagacatgtccctgtag

SEQ ID NO: 217782 - DNA, 3453 bp, synthetic construct
  misc_feature 1..3453: note = Description of Artificial Sequence: Synthetic coding sequence
  source 1..3453: mol_type = other DNA
atggcacagtttggaggtcagaaaaacccgccatgggcgacccagttcactgccacagctgtcagtcagcccgctgccctgggtgtgcaacagccgagcttgcttggagcctccccaaccatctacactcagcagaccgcactggcagctgccggtttgactacgcagacccccgctaactaccaacttacccagacagcggctctgcagcagcaggccgctgcggcagcagctgccctacagcagcaatacagtcagccccagcaagcactgtattcagtccagcagcaattacagcagccgcagcaaacattgttaactcaaccagcagtggcactcccgacgtctctgagcctttccaccccacagcctactgcacagattacggtcagctatcctacaccacggtcctcccagcaacagacgcagccccagaagcagcgtgtgttcacaggggtggtcactaagctccacgacaccttcggcttcgtggacgaagacgtgttctttcaattgtcggccgtgaaagggaagacacctcaagtcggggatcgggtgctcgtggaagctacgtataatcctaacatgccttttaaatggaacgctcagcggatacagacattgccgaaccagaatcagtctcagacacaaccgctccttaagactcctcctgccgtgctgcagcctatagccccacagaccacgttcggtgttcagacccagccacagcctcagtctctcctgcaggcacagatctcagctgcctccataacaccccttcttcaaacccagcctcagcccctgctgcaacaaccacagcagaaagcaggactgctccagcccccagttcgaattgtctctcagccacagccagcacggaggctagatccaccaagtagattctctggtagaaacgatcgcggagaccaggtgcccaacaggaaggatgataggtccagggaacgcgagcgagagcgccgtagaagtcgggagcgttccccacagcgtaagaggagccgcgaaaggtcccctagaagagagagggaacgcagtccacgcagagttcggagagtggtcccacgctacacagttcagttctccaagttctccctggactgtccttcttgcgacatgatggaactccgacggagataccagaatctgtacattccctccgacttttttgatgctcaatttacctgggtggatgccttcccactctcccggccattccaactgggcaactattgcaatttctacgtgatgcacagggaggtggagagcctggagaagaatatggctatcctggatccccctgatgctgaccatctgtattcagccaaggtcatgcttatggcttctccgagcatggaggacctctatcacaaatcgtgcgcccttgctgaggacccccaggagctgagggatggctttcagcatcccgcaaggctggtgaagtttctggtcgggatgaaggggaaagacgaggctatggccatcgggggacactggtccccatcactggacggcccagatcccgagaaagatccatcggtgctgatcaagacggccataaggtgctgtaaagctctgactggtatcgacttgtctgtctgtacgcagtggtacaggtttgcagagattaggtatcatcgaccagaagagacgcataagggcagaacagtgccggctcacgtggaaaccgtcgtcctcttctttccggatgtgtggcactgtttgccaactagaagtgaatgggaaacactttctcgcggttataaacagcaattggtggagaagctccagggcgaacggaaggaggcagatggcgaacaggatgaggaagagaaagacgacggggaagcaaaagaaatctccacgccaactcactggtccaagttggaccccaaaacgatgaaggtcaacgatctgcgcaaggaactcgagagtagggccctgtcgagcaaggggctgaagagccagctgattgccagactgaccaagcagctcaaggttgaggaacagaaggaagaacagaaggaattggaaaagtcagagaaagaagaagatgaagacgatgataggaagtccgaggatgataaggaggaagaggaaagaaagaggcaggaagaaatcgagcggcaacggagagaacggagatacatactccctgatgagcccgctatcattgtacatccgaactgggccgcaaagagcgggaagtttgattgtagcatcatgagtctatccgtgctactggattatcggctggaagataataaggagcactctttcgaagtgtcactctttgccgagctttttaatgagatgctccagcgagactttggagtcagaatctacaagtccttgcttagcctgcctgaaaaggaagacaagaaagaaaaagacaaaaaatccaaaaaagacgagcgtaaagacaagaaggaagaaagggacgatgagaccgacgaacctaagcccaagcgacggaagagcggcgatgacaaagataagaaggaagacagagatgagagaaagaaagaggacaagcgcaaggacgactccaaagacgacgatgaaaccgaggaggacaataaccaggacgagtacgatcccatggaggcagaggaggccgaggacgaggaggacgatcgtgacgaagaagagatgacaaaacgggatgacaaacgcgatattaaccgctattgcaaggagagacccagtaaggacaaggaaaaggagaagacccagatgattaccattaaccgggacctcctgatggcattcgtgtatttcgaccagagccattgcggttacctgctggagaaagaccttgaggagattctatacactctcggcctccacctgtcacgggctcaggtgaaaaagctcctgaataaggtcgtgctcagagaaagctgcttctatcgcaaactgaccgatacatcaaaggatgaggagaatcacgaggagtccgaaagcttgcaggaagatatgctgggcaataggttgctgctgccgaccccaaccgtcaagcaggagtccaaagacgtagaggaaaatgtggggctaattgtgtataacggtgcaatggttgacgtaggctcactcttgcagaagttggaaaaaagcgagaaagtgcgtgccgaggtggaacaaaaacttcagctgcttgaggagaagaccgatgaggacgaaaagacaatacttaatctcgaaaactccaacaaatccctgagtggcgaactacgcgaggtgaagaaggacctttctcaactgcaagaaaacctcaaaatcagcgagaatatgaacctgcagtttgaaaatcagatgaataaaacaatccgaaatcttagcactgtgatggatgaaatacacactgtgctgaaaaaggacaatgtcaagaacgaggacaaggatcagaaatcaaaggagaatggggcatccgtatag

SEQ ID NO: 217783 - DNA, 3408 bp, synthetic construct
  misc_feature 1..3408: note = Description of Artificial Sequence: Synthetic coding sequence
  source 1..3408: mol_type = other DNA
atggcgcagttcggaggacagaagaaccctccgtgggccacacagtttactgctaccgctgtcagccagcctgccgcattaggggtgcagcagcccagcttattgggagcttccccaacaatatacacacagcagaccgccctggccgctgccggtctcactacccaaacccctgccaactaccaactgacacagaccgcagcactgcaacaacaggccgctgctgccgcagccgcactgcagcaactgcaacagccccagcaaactctgctgacccagcccgcagtcgccctgccgacatcactctccttgtccacacctcagccaactgcccagataaccgtgtcctatccaacaccgagatcttcgcagcagcaaactcagcctcagaagcaacgagtctttacaggcgtggttacaaagctgcatgatacctttggttttgtggatgaagatgtgttttttcaactgtcggcagtcaagggcaaaaccccccaggttggggacagagtattagtcgaggccacatacaaccccaacatgcccttcaagtggaacgcacagcgtatacaaacccttcctaaccagaaccagtcacaaactcagccccttctcaaaacgcctcccgctgtactccaaccgatcgccccacagacaacattcggggtccagactcagccgcagcctcagtcgctgttgcaggctcaaatctctgctgcctcaatcaccccactgcttcaaactcagccgcagcctttgctgcagcagccgcagcaaaaggccggattactccagccccctgtgcgcatcgtgtcccagccccagcccgctcgaagactagatcccccatctcggttttccggcagaaacgatcgaggagaccaggtcccaaataggaaggacgatcggagccgcgagcgcgaaagggagagacggaggtctagggagcgcagcccccagcgcaaacgaagcagagaaagaagtccacggagagagagagagagaagccccaggagagtcagaagagttgtacctcgctatacggttcagttctccaagttctccctcgactgcccatcctgtgatatgatggagctacgcagaaggtatcagaatctctacatcccttccgacttttttgacgcccagttcacttgggtggatgccttcccactgtccaggccttttcagttaggaaattactgtaacttttatgtcatgcacagagaagtagagagcttggaaaaaaatatggctatcctggaccctcccgatgccgaccacctttattctgccaaagtgatgttgatggcaagcccatccatggaggatctgtaccataagtcctgtgcccttgccgaagatccccaggaattgcgggatggttttcagcaccctgcacgtttggtgaagttcctcgtgggtatgaaaggaaaagatgaagcaatggctatcggcggacattggtctcctagcttagacgggccagaccccgaaaaggaccccagcgtgcttatcaagacggccattagatgttgcaaggcgctcaccggcattgacctctccgtttgcacccaatggtatcggttcgcagagataagataccatcggcctgaggaaacccacaaaggtcgaacagtgcctgctcacgtggagactgtggtactcttctttccagacgtctggcattgcctccccacacgctccgaatgggaaacactgagtaggggctacaagcaacagcttgtcgagaaattgcagggcgaaagaaaagaagccgatggcgaacaggatgaggaggaaaaggatgatggggaggccaaggaaatctcaacaccaacgcattggagtaaactggatcctaagacaatgaaggtgaatgaccttcggaaggaactggaaagccgggcactctccagcaagggcctaaaatcccagctgatagccagactgactaaacagcttaaggtggaggagcagaaggaggaacaaaaagagctggaaaaatccgagaaggaggaggatgaagacgacgaccgaaagagcgaagatgataaggaggaagaggaaaggaaaagacaggaggaaatcgaacgccagcgcagggagcgcaggtatatcctacccgatgagcccgctataattgttcacccaaactgggcggctaaatcagggaagttcgattgtagtattatgtccctgagcgtgttgctcgattatagactggaggataataaggagcattcttttgaggtctccctgtttgccgaactctttaacgaaatgcttcagcgggatttcggagtgagaatatataagtctctgctgagtctgcccgagaaggaggataaaaaagagaaagataaaaaaagtaagaaggatgagcggaaggataagaaagaggagcgcgacgacgaaaccgatgagccgaagcccaaaagacgcaagtccggtgacgacaaggacaaaaaggaggacagggatgagagaaagaaggaggataagagaaaagatgatagcaaggacgacgacgagacggaggaggacaataatcaggatgaatatgaccctatggaggccgaggaggccgaagatgaggaagatgacagggacgaggaggagatgaccaaacgtgatgacaagcgcgacatcaaccgctactgtaaagagagaccctccaaggataaggaaaaggagaaaacacagatgattacgataaacagggacctcttgatggctttcgtatactttgaccaatctcactgtggataccttctggagaaagacctcgaggaaattttatatacgttaggcctccatctgtctcgcgcacaggtcaagaaactgctcaacaaagtggtattacgcgagagttgcttctatcggaagctgactgatacttccaaggacgaggagaatcatgaggaaagtgaatccttgcaggaagacatgttgggcaaccggttgctgttgccaactcctaccgtgaaacaagagagcaaggatgttgaggaaaatgtaggtttgatcgtgtataatggggctatggtcgatgttgggtcgttgttgcaaaaactggagaaaagcgagaaagtgcgcgctgaggtcgaacaaaaactgcaactgctcgaggagaagaccgatgaggacgaaaaaactattcttaatctagagaatagcaataagtccctcagcggcgaactccgtgaggtgaaaaaggacctatctcagctgcaggagaacctgaagatcagtgagaacatgaaccttcagtttgagaatcagatgaacaagactattaggaatcttagtaccgtaatggacgagatacacaccgtgctcaaaaaagataacgtgaaaaacgaggataaggaccagaaaagcaaggaaaacggtgcctcggtgtag

SEQ ID NO: 217784 - DNA, 360 bp, synthetic construct
  misc_feature 1..360: note = Description of Artificial Sequence: Synthetic coding sequence
  source 1..360: mol_type = other DNA
atggcacagttcggcggtcagaaaaatccaccgtgggcaactcagttcactgccacagctgtgagtcaacccgctgcactaggcgttcagcagccctccctgctaggggcttctccgaccatttacacgcaacagacggcactggctgctgctggactgacaacccaaactccagccaattaccagcttactcagactgccgctctgcagcagcaggccgctgctgctgcggcagctctgcagcaacagtactctcagccccagcaggcgttatactctgtgcagcaacagctccagcagccccagcagacgctgctgacccagcctgctgtggccttgcccacatcgctgtccctctag

SEQ ID NO: 217785 - DNA, 516 bp, synthetic construct
  misc_feature 1..516: note = Description of Artificial Sequence: Synthetic coding sequence
  source 1..516: mol_type = other DNA
atggctcagtttgggggtcaaaagaatcccccttgggctactcagtttaccgccaccgcagtgtctcagcccgcagctctcggtgtgcagcagccatctctcctcggagccagccctaccatttatacccagcagacagccctggccgcagcagggcttacaacacagacgcccgcaaattaccaactgactcagaccgctgccctacagcagcaagctgctgctgctgcggcagccttgcagcagcagtactcacagcctcagcaggcattatactctgtgcagcagcagcttcagcagccccagcagactctcctgacccagcccgctgtcgcccttccaacaagtctgtcactttctacacctcagccaactgctcagataacagtttcctatcccacgccaagaagctcacagcagcagacacagccgcagaagcagcgggtgtttaccggagtggttacgaaactgcacgacaccttcggctttgtggacgaagacgtgtttttccaatag

SEQ ID NO: 217786 - DNA, 3132 bp, synthetic construct
  misc_feature 1..3132: note = Description of Artificial Sequence: Synthetic coding sequence
  source 1..3132: mol_type = other DNA
atggctcaattcggtggccaaaagaaccctccctgggcaacacagtttaccgccacggccgtcagccagcctgccgctctgggagtccaacagccctcccttctcggggctagtcctactatctacacccaacagactgctcttgcagcagctggcctgacaacccaaacgccagccaactatcagctgacacagacagccgcactgcagcagcaggctgccgcagccgctgccgctctgcagcaactccagcagccccaacagactttgctcacccagcccgcagtcgcgctgccaacaagtttgtcgctgagtacgccccaacctactgctcaaatcaccgtgagttaccctacaccgcgatcaagtcagcagcagactcagccccagaaacagagagtgtttaccggagtggtgactaagttacacgatacatttgggttcgtcgacgaggacgttttttttcagctttccgctgtcaagggcaaaacccctcaggtcggagatcgggtactggtcgaagcaacctacaaccctaatatgccattcaagtggaacgcacaaaggatccagaccctgcccaatcagaatcagtctcagacgcagcctctgctgaaaacccctccagcggtcctacagccgattgctccccagactaccttcggcgtacagacacaaccacagcctcagtccctgctccaggctcagatctctgcagctagtattaccccgctgcttcagacgcaaccccagccactgttgcagcagcctcagcagaaggccggtctgctgcagcctcctgtgagaatcgtctcccaaccgcagcctgctcgtagactcgatccaccgagtagattctcaggaagaaacgatagaggtgatcaggtccctaatcgcaaagacgaccgatcaagagagcgggagcgggaacggaggcgctcccgcgagaggagtccgcaaaggaagcgcagcagggaacggagccctcggagagaaagagagcgctctccccgtagggtccgacgcgttgtacccagatacactgtgcaattcagtaagttctcgttggattgtccatcatgcgatatgatggaattgaggcgcagataccagaatctttacatcccatccgatttcttcgacgcacagtttacctgggtggatgccttccccctgtctagacctttccaacttgggaactactgcaatttctatgtcatgcacagggaagtggagtccctcgaaaaaaatatggcgattctggatccacctgatgccgatcatctttattcagccaaggttatgcttatggcctcaccaagcatggaagacctgtaccacaagtcttgtgctctagccgaagatccgcaggaacttcgagatggcttccagcatcccgctcgacttgttaagttcctcgtggggatgaaaggtaaggatgaggccatggctattggcggacactggtcgccatccttggatgggccagatcctgagaaggatccatccgtgttgatcaagacagcgattagatgttgtaaagctctcactggcatcgatctgtcggtgtgcacgcaatggtatcggtttgccgagattaggtaccatcggcctgaagaaacacacaaggggagaacagtacccgctcatgttgagacagttgtgctgttttttccggatgtttggcactgcttaccaactcgcagcgaatgggagaccctgagtagaggctacaaacagcagctggttgaaaagctgcaaggcgagcgcaaggaggccgacggcgagcaggatgaggaggaaaaggacgacggtgaagcaaaggagatctcaaccccgacccactggtctaagctcgatcctaagacgatgaaagtcaacgatctacggaaagagctcgagtccagggccctatctagcaaaggactaaagtcccagttgatcgcgagactcactaaacagcttaaggtagaagaacaaaaagaagagcaaaaagaattggaaaagtctgagaaagaagaggacgaagatgatgacagaaagagcgaggacgacaaagaagaggaggagcgtaaacgtcaggaggagatagagagacaacggagagaacggcgatacatcctccccgatgagcccgcaattatcgtccaccctaactgggccgctaagtccggtaaattcgattgttccatcatgtctctgagtgtcctcttagattaccgcctcgaggacaacaaagagcacagttttgaggtgtccctatttgcagagctgtttaatgagatgctacagagggacttcggggtgcggatttataagagtcttctatccctccccgagaaggaggataagaaggaaaaagacaagaagagtaagaaagatgagaggaaggataagaaagaggaacgcgacgacgaaacggatgagccaaagcccaagcgacgtaagtctggtgacgataaggacaaaaaagaggacagagatgagcggaaaaaagaagacaaaagaaaggacgatagtaaagacgacgacgagacagaagaggataataaccaagatgagtacgacccaatggaagctgaagaggccgaagatgaagaagacgatcgagatgaggaggagatgacgaagcgagacgataaacgggatataaatcgctattgcaaagagcggccttcaaaagataaagagaaagaaaaaacccagatgatcacgattaaccgtgatctgcttatggctttcgtctacttcgaccagtcccactgcggatatctcttggagaaggatctagaggaaattttatatactctcggacttcacctctccagggctcaggtcaaaaagctgttaaacaaggttgttttacgtgagtcctgtttctacaggaaactgactgacacatctaaggatgaggaaaatcacgaagagagcgaatccctccaagaagacatgttgggtaacagattactgctccccacgcccactgtaaaacaggaatctaaagacgtcgaagagaacgtgggcctcatagtatacaacggcgctatggtcgacgtggggtccctactccaaaaactcgaaaagtctgagaaagtgagagccgaggtggaacagaaactccagttgctgtag

SEQ ID NO: 217787 - DNA, 726 bp, synthetic construct
  misc_feature 1..726: note = Description of Artificial Sequence: Synthetic coding sequence
  source 1..726: mol_type = other DNA
atgtttgcacgtggactaaaacggaagtgcgtggggcatgaagaagatgttgagggcgcactggcgggtctcaagacagtgagctcctattctctgcaaaggcagtctttactggacatgtccctagtcaagttgcagctctgccatatgctggtggaacctaacctttgccgtagcgtgctgattgctaacacggtgaggcaaatccaggaagagatgactcaggacggaacctggagaacagtcgcaccgcaggccgcagaaagagcccctctagatcgactcgtctcaactgagattctatgtagagccgcatgggggcaggaaggggctcatcccgcacctggactgggcgatggccatacacagggccctgtgagcgacctttgccctgtgacctctgctcaggctccacgtcatctccaaagcagcgcctgggagatggacggcccacgtgaaaaccgaggaagctttcacaagagcttggatcagatcttcgaaaccctcgaaacaaagaatccttcatgtatggaagagttgttctctgacgttgattcaccttactacgaccttgacacagtgttgactggaatgatgggcggagccaggccagggccttgcgagggcctcgaggggctcgccccagctacccccggacccagctctagttgcaagagtgacctcggagaactggaccacgttgtggagatacttgttgaaacctag

SEQ ID NO: 217788 - DNA, 726 bp, synthetic construct
  misc_feature 1..726: note = Description of Artificial Sequence: Synthetic coding sequence
  source 1..726: mol_type = other DNA
atgtttgccagagggctcaagcggaaatgcgtggggcacgaggaggacgtcgagggcgctctcgctggactaaaaaccgtcagctcctactccttacagagacagtccctgctggacatgtctcttgtgaagctgcagctgtgccacatgctggtggagccaaatttatgtagatctgtgctcattgccaacacggtaagacagatccaggaagagatgacccaggacgggacctggaggacggtcgccccacaggcggcagagagagcccctttagaccgtctggttagtaccgagattctttgccgagctgcctggggccaagaaggagctcaccctgccccaggactcggagatggtcatactcagggcccagtgagtgacttgtgccccgtgacctctgcccaggcccctcgacatctacagtctagtgcttgggaaatggacggtcctagggaaaatcggggttcctttcacaaatctctcgaccaaatcttcgaaaccctcgagactaagaatccttcttgcatggaagagttgtttagcgacgtcgacagcccttattatgatttggataccgtgttaacaggtatgatggggggagccaggcctgggccatgcgaaggactggagggcttggcccctgctaccccagggccaagctcttcatgtaaaagtgatttgggcgaattagatcacgtggtagagattctcgtggagacctag

SEQ ID NO: 217789 - DNA, 759 bp, synthetic construct
  misc_feature 1..759: note = Description of Artificial Sequence: Synthetic coding sequence
  source 1..759: mol_type = other DNA
atgtcaggaagacgaactcgctcaggcggagccgcacagcggagcgggcctcgcgcaccgtcccctactaagccattaagaagatcccagaggaagtctgggtctgaactgccgtctatactgccagagatttggcctaaaactcctagcgccgctgctgtgaggaaaccgatcgtccttaagagaattgtggctcacgccgtggaggtccccgcagtgcagtcacccagacgctcaccacgcatttcctttttccttgagaaagagaatgaacctcccggaagggaattaaccaaggaagatttattcaagacgcattccgttccagccacaccaacatcgactcccgtgcctaaccctgaagccgaaagttcttctaaagagggagagctcgacgcccgtgatctggaaatgagtaagaaggtcagaaggtcttattcacgactcgagactttaggctcggcttctacctctacacccggaagacgctcctgttttggatttgagggattgctgggcgctgaagatttgtctggcgtgtccccagttgtctgcagtaaactgacagaggtgccaagggtctgcgccaagccctgggcccctgacatgactttgccgggtattagtcctcctccggaaaagcaaaaaaggaagaagaaaaagatgcccgagatactcaagacagaactggacgaatgggccgctgcgatgaacgctgagttcgaggccgcagaacaattcgacttgttggttgagtag

SEQ ID NO: 217790 - DNA, 216 bp, synthetic construct
  misc_feature 1..216: note = Description of Artificial Sequence: Synthetic coding sequence
  source 1..216: mol_type = other DNA
caattcctggatcaggaagactggggtccccagcggacttccaaggaaataagacagctccagaacgactgcatgagactacgagagtctctcaataccacacaagttcacaacctggcactgggggaaaagctgcagaacttacctaccctgttgtacaaatccctgaaggaaggagctcaagccattcaggaggaggctcaggccatccagtag

SEQ ID NO: 217791 - DNA, 1353 bp, synthetic construct
  misc_feature 1..1353: note = Description of Artificial Sequence: Synthetic coding sequence
  source 1..1353: mol_type = other DNA
atggacgcaagaagggtgccccaaaaggacctcagagtcaaaaagaaccttaagaagttccgttacgtgaagttgataagtatggaaacctcgtcgtcctctgatgacagttgtgattcgttcgcttctgataactttgctaatacgaagccaaaatttcgtagtgacatcagcgaggagctggccaacgtcttctacgaagactccgataatgagagtttctgcgggtttagtgagtcggaggtgcaagatgttctcgaccattgtggatttcttcaaaagccaaggcccgacgtgaccaatgagctcgcgggtatctttcacgcggacagcgacgacgagagcttttgcggttttagtgagtcagagatacaggatgggatgagactgcagtccgtgcgtgagggctgcagaacacggtcacagtgtaggcacagcgggccactccgcgttgcaatgaaattccctgccagatcaaccaggggtgccaccaataagaaggccgagagccgccaaccttctgaaaatagcgttactgactcgaacagtgactccgaagatgaatcaggcatgaactttctcgaaaagagggccctcaacatcaaacagaacaaagcaatgctagctaagctgatgtccgagctcgaatcgtttccaggcagcttccggggacggcatcctctccccggtagcgacagccagagccggagaccacgacgcaggacttttcccggtgttgcatctcggaggaatccggaacggagggccagacccctgaccagaagcaggagccggattttagggtcgctggacgctcttcccatggaagaagaagaagaagaggataaatatatgctcgtcagaaagcgtaaaaccgtagatgggtacatgaatgaggatgacctgcctcgctctcgacggtcgaggtccagcgtgactttacctcatattatccgtcccgtggaagagattacagaagaggagcttgagaacgtatgtagcaatagtcgggagaagatctataaccgcagcctgggctccacctgccatcagtgtcgccaaaaaaccatcgatactaagactaactgtaggaatcctgactgttggggggtccgcggacagttttgcgggccatgtctgagaaacaggtatggagaagaggtcagagacgcgctgctggaccctaactggcattgtcccccttgtcgcggaatatgtaattgttcattttgccgacaacgggacggcagatgtgctacaggagttctggtctaccttgcgaagtatcacggtttcgggaatgtccatgcttaccttaagtctctgaaacaggagttcgagatgcaagcttag

SEQ ID NO: 217792 - DNA, 1116 bp, synthetic construct
  misc_feature 1..1116: note = Description of Artificial Sequence: Synthetic coding sequence
  source 1..1116: mol_type = other DNA
atggatgccagaagggtccctcagaaggacctgcgcgttaagaagaacctgaagaagttccggtatgtgaagcttatatccatggagacaagtagctcatcagacgattcctgcgacagttttgcatcagataactttgccaacacccgtctccaaagcgtgcgggaagggtgtcggacgcggagtcagtgcaggcattccggcccactgcgcgttgccatgaaatttcctgccaggtcaaccagaggcgctacaaacaagaaggcagaatcccgccagccatctgaaaactcagtgaccgactccaacagtgacagtgaggatgagtcgggaatgaacttcctcgagaagcgtgcactcaacatcaagcaaaataaggccatgctcgccaaactaatgtccgagctggaatcatttcctggctcatttagagggaggcatcctctgcccggttccgacagccagagtagacgccctcggagacggaccttcccaggcgttgcctcccgtcgcaaccccgagaggcgggctcgtcccctaaccagatcccggtctcgcattttaggaagccttgacgcgttgcctatggaagaggaggaggaggaggataagtacatgttggtacgcaagagaaagacggttgacggctatatgaatgaggacgatctgccccgaagtcgtagatctcggtcttccgtcactctgcctcacatcattcggcctgtggaggaaataacagaagaagaactggaaaacgtgtgtagtaatagtagagagaaaatatataatcgctctttgggctccacatgccatcagtgccggcagaaaactattgacacaaagactaactgtagaaaccctgattgctggggtgtccggggtcagttctgcggtccttgtctaaggaatcggtatggggaggaggtccgtgatgcacttctggacccaaattggcattgtccgccatgccgcggaatttgtaactgctcattctgcagacagcgcgatgggcgttgtgccaccggcgtgctggtgtacctggcaaagtatcacggttttggaaacgtccatgcctacttaaaatctctcaagcaggagttcgagatgcaagcctag

SEQ ID NO: 217793 - DNA, 966 bp, synthetic construct
  misc_feature 1..966: note = Description of Artificial Sequence: Synthetic coding sequence
  source 1..966: mol_type = other DNA
atggatgcgcgtagggtgccacaaaaggatcttagagtgaaaaaaaatttgaaaaagttccggtacgtcaagctgatttcaatggagacatccagctcctccgacgactcctgtgattcttttgccagtgacaatttcgccaatactcgattgcaatcggtgcgcgagggatgtcgcacccgctctcaatgtaggcatagcgggccactgcgtgtcgcaatgaagtttcccgcacgtagtacaagaggagcaacaaataagaaagcagaatcacggcagccctcagagaatagcgtaactgactccaatagtgactctgaagatgagtccggcatgaacttcctggagaaacgggcacttaacatcaaacaaaataaagccatgctagccaagttaatgtctgagctcgagagtttcccgggaagttttcggggtagacatcctctacccggaagcgacagccaaagtagacggccaagaagacgcacctttcccggtgtggcaagtcgacgtaatcccgaaagacgcgctcggcctctgacacgctcccgttcacgcatcctaggcagcctagacgctcttcctatggaagaggaggaggaggaagacaagtatatgctggtgcggaagagaaaaactgtggatggctacatgaacgaagatgatctaccaagaagccgtcgatcccgaagctcagtaaccctgccgcatattatacggccagtcgaagaaatcaccgaggaagagttggaaaacgtgtgcagtaattcaagagagaaaatctataaccggtctctgaattggcactgccccccttgcagagggatctgtaattgtagtttttgccgccagcgcgacggccgatgcgctaccggcgtgctggtctacctagccaagtaccatggctttggcaacgtgcatgcttaccttaagtctctcaaacaagaatttgagatgcaggcatag

SEQ ID NO: 217794 - DNA, 1263 bp, synthetic construct
  misc_feature 1..1263: note = Description of Artificial Sequence: Synthetic coding sequence
  source 1..1263: mol_type = other DNA
atggaaaccttgtctagtgaggaatcgtgcgattcatttgattctttagaatcaggcaaacaacaggatgtgaggtttcacagtaaatactttactgaggagctcagacgcatattcatcgaggataccgactccgagactgaggattttgccggtttcacacaatcggacctaaatgggaaaactaatcctgaggtgatggtagtggaaagcgatctttccgatgatgggaaagcatctcttgtgtcagaagaagaggaggacgaggaggaagataaggcgaccccgcgaagaagtcggagccgcagatcctccatcggcctaagggtggcctttcagtttccaactaaaaagttagccaacaagccagacaaaaatagcagttccgaacagttattttcctcggcaagactgcagaatgagaagaaaacaatcctggagagaaagaaagactgtagacaagtgattcagcgggaagacagcacctctgaatccgaagacgattcaagagatgaaagccaggaaagctctgacgccctgctgaaaagaactatgaatattaaggaaaacaaagctatgttagcccaactgcttgcagaactgaattctatgcccgatttttttccagtaagaacccctacgagtgcttctcgtaaaaagactgtccgccgtgcttttagtgaaggccagatcacccggaggatgaatcctacacgatccgccagacccccagaaaaattcgctctggaaaactttaccgtgtctgccgctaaattcgctgaagaattctatagcttcagaaggcgcaagacaattggaggcaagtgccgcgaatatcggagacggcaccgcatctcaagctttcgccctgtggaagatatcacggaggaagatctcgagaatgtggcaatcaccgtccgcgacaaaatttatgataaggttctgggcaatacttgtcatcagtgcagacagaagaccatcgatacaaaaacagtgtgccgcaaccagggctgttgcggcgttagaggccagttctgcggtccctgtttgcgcaatagatacggagaggatgtcaggtcagctctcttggaccctgattgggtgtgtcccccttgccgtggcatctgtaattgcagttattgtcggaagagggacgggagatgtgcgacgggcatcctcatccacctggccaaattctatgggtacgacaacgtcaaggaatatttagaaagtctacagaaggaattggtcgaagacaattag

SEQ ID NO: 217795 - DNA, 1227 bp, synthetic construct
  misc_feature 1..1227: note = Description of Artificial Sequence: Synthetic coding sequence
  source 1..1227: mol_type = other DNA
atggagttggcaacccgctatcagattcctaaggaagtggctgacatttttaatgccccaagcgacgatgaagagttcgtcggatttagagacgacgtcccaatggaaaccctgtcatcagaagaatcttgtgattccttcgattcccttgaatctggcaagcaagtcgtcgagtccgatctatcagacgacggaaaagcaagtcttgttagcgaggaagaagaggacgaggaggaggacaaagccacccccaggcggagtaggtcccggagaagtagcataggcttgcgggttgctttccagtttcccactaagaagctggcgaacaagcccgataagaatagctctagcgagcaactcttctcgtctgcacgtctgcaaaatgaaaaaaaaaccatcctcgagcgaaaaaaagattgcagacaggttattcagagggaagatagcacctccgaaagcgaagacgacagcagagacgagtctcaggagtcgtcagacgctttgctaaagaggacaatgaatatcaaagaaaacaaggcgatgctggcccaacttctggcggagctgaatagtatgcctgactttttcccggtgcgcacgcccaccagtgcttcaaggaaaaaaaccgttagacgcgcatttagcgagggtcagattacacggcgtatgaatcccacacggagcgccagacccccagagaaattcgccctggagaactttacagtctccgccgctaaattcgccgaagaattctattcttttcgacgacggaagacaataggcggtaagtgtagggaatacaggcggagacatcggattagttcctttcgccctgttgaggacataacagaagaggatctggaaaacgtcgccataacagtgcgggacaagatctatgacaaggttctgggaaacacatgccaccaatgcagacagaagactattgatactaaaacagtatgtaggaaccaaggttgttgcggtgtgcggggacagttttgcggcccatgcttaagaaaccgatacggcgaggatgtgagaagtgcgctactcgatcctgattgggtgtgccccccatgtcgcggaatctgcaactgttcttactgcagaaagcgggatggcaggtgtgccaccggaatactaattcacctggctaagttttacggatacgacaacgtcaaggagtatcttgagagccttcaaaaagaactcgtagaggacaattag

SEQ ID NO: 217796 - DNA, 1365 bp, synthetic construct
  misc_feature 1..1365: note = Description of Artificial Sequence: Synthetic coding sequence
  source 1..1365: mol_type = other DNA
atggagctggccacccgctatcagatccctaaagaggtggctgatatctttaatgcaccttccgacgatgaggaatttgtgggttttcgcgatgacgtgcccatggagaccttgtcctctgaagagtcctgcgacagtttcgacagcctcgaaagtggcaaacagcaagacgtgcgattccactccaagtatttcaccgaagaacttaggcggatttttattgaagacacagactccgagactgaagattttgcgggattcacccagagcgacctgaatggtaagaccaacccagaggtcatggtggtggaaagcgacctgagcgatgatgggaaggcatctttagtttctgaggaagaggaggacgaggaagaagataaagccacccctcgcaggagccgtagcagaagaagctccattggactccgagtggccttccagtttcctacaaagaaattggcaaacaaaccagataagaactcctcgtcagagcagctattctcatccgcaaggctgcagaacgaaaaaaagactattttggaaaggaaaaaggattgcagacaggtgattcagcgcgaagacagcacttcagagtctgaggatgactctagggacgagtcacaagaatccagtgatgcactcctcaaacgcacgatgaatattaaggaaaacaaagccatgttagcccagttgctggcagaactaaattcgatgcccgatttttttccagtgcgtacccctaccagcgcgagtaggaaaaaaactgtgcgtcgcgcattctccgagggacaaattactcgacggatgaatcctacaagaagtgctcggcctccggagaaattcgccctcgaaaactttactgtttccgccgctaagtttgctgaggagttctatagttttcgaagaaggaagactatagggggaaaatgccgcgagtatagaagacgccatcgtatcagcagctttcggccagtcgaagacattacagaggaggatttggagaatgtagccatcactgtccgagataagatttatgacaaggtcttaggaaatacctgccatcagtgtaggcagaagactatcgataccaaaactgtttgcagaaatcaggggtgctgcggggtgaggggccaattctgcgggccttgcctgcgcaacaggtacggggaggacgtaaggtcagcgctgctcgatcctgactgggtgtgccccccatgccgcggtatctgcaactgctcatactgccggaaaagagatggtaggtgtgccaccggaatccttatccacctggcaaaattttacgggtacgataatgtgaaggaatacctcgaatctctgcagaaagagctggtcgaggacaattag

SEQ ID NO: 217797 - DNA, 291 bp, synthetic construct
  misc_feature 1..291: note = Description of Artificial Sequence: Synthetic coding sequence
  source 1..291: mol_type = other DNA
atggaaaccctgagttctgaagagtcctgcgacagcttcgattccctagaaagtgggaagcagcaggacgtgcgctttcattccaagtatttcaccgaggagctccgccgaatttttatagaagacaccgacagcgagacggaagatttcgccggtttcactcagtcagacttaaatggaaaaacaaatcccgaggtgatggttgtcgagtctgatttgtccgacgacggcaaggcatccttggtctccgaggaggaagaggacgaggaggaggacaaagccacaccctag

SEQ ID NO: 217798 - DNA, 843 bp, synthetic construct
  misc_feature 1..843: note = Description of Artificial Sequence: Synthetic coding sequence
  source 1..843: mol_type = other DNA
atggcacctcgtaaaggttctagcagagttgcaaaaaccaattccctgaggcgacggaaattagcatcgttcctgaaagactttgaccgggaagtcgaaatcagaattaagcagatcgagtctgatcggcagaaccttttgaaagaggtcgataacttgtacaacatcgaaatcttgcgcttgcccaaagcgctgagggagatgaactggctggactactttgctctcggaggaaataaacaggccctggaagaagcggcaactgctgatcttgatatcaccgagatcaacaagctcaccgccgaagccatacaaacccctctaaagagtgccaaaacacgcaaagtgatccaggtggatgaaatgatagtcgaagaggaggaggaggaggaaaatgaaaggaagaatctccagacagccagggtcaagcgatgtcctccatcgaaaaagcggacacagtctatccaggggaaaggcaaaggcaaaaggagttctcgtgccaatactgtgaccccggctgtcggcagactcgaggtctccatggtcaagcccactcccggattgacacccagattcgatagccgggttttcaagactcccggtttgcgcacacctgccgctggcgagaggatctataatattagcggaaacggaagccccctcgctgacagtaaggaaatctttctgaccgtccccgtgggcggaggagaaagcttaagactgctcgcctcagatctccaacgtcacagcatagcccaattagaccctgaagccctaggaaacattaagaaactgtcaaatagattggcacaaatttgttcaagcattagaactcacaagtag

SEQ ID NO: 217799 - DNA, 843 bp, synthetic construct
  misc_feature 1..843: note = Description of Artificial Sequence: Synthetic coding sequence
  source 1..843: mol_type = other DNA
atggctcccaggaagggaagtagtcgcgtagcaaaaaccaacagtctgcgacggaggaaactggcctcttttctaaaggactttgaccgagaggttgagatacggatcaaacaaattgaaagcgaccgccaaaacttgttgaaggaggttgacaatctttacaatatcgagattctgcgactccccaaagccttgcgtgaaatgaattggctggattacttcgctctgggagggaacaagcaggcacttgaagaggctgccaccgccgatcttgatataacagaaataaacaagctaaccgcagaggccatccagacccccctgaaatcagccaaaacaaggaaggtgatacaggtggacgagatgattgtggaggaggaggaggaagaagagaacgagcgaaagaacctgcagacggcccgtgtaaaaaggtgccccccatccaagaaacggactcagtcaattcaagggaaggggaaaggcaagcgctcgtcaagagcaaatacagtgacaccggcagtgggtcgcctggaggtttccatggttaaacccacacccggacttaccccgagatttgactccagggtgtttaaaacacctggcttgcggacgccagccgctggggaaagaatatacaatattagtggaaacggttcgccattggctgattctaaagaaatttttctgacggtaccagtgggcggaggtgagagcttgagactgctcgcgtctgacctgcagcgacacagcattgcccagctagatcctgaagcactgggaaatatcaagaaactcagtaacaggttggcccaaatatgttcttccatcagaacgcacaaatag

SEQ ID NO: 217800 - DNA, 414 bp, synthetic construct
  misc_feature 1..414: note = Description of Artificial Sequence: Synthetic coding sequence
  source 1..414: mol_type = other DNA
atgcctaacttcgcgggaacctggaagatgaggtcgtcagagaatttcgacgaactgctgaaagccctgggagttaatgcaatgctgcgaaaggtcgcagtggcagccgcttctaaacctcacgtggaaatccgccaggatggagatcagttttacatcaaaacgtcaacaaccgtaaggactaccgagatcaacttcaaagtcggggaggggttcgaagaagagaccgtggacggcaggaaatgtagatctctggctacctgggaaaacgagaataaaatccattgcacacagaccctgctggagggcgacggccctaagacctactggacccgcgaactggctaatgatgagctgattctgactttcggcgcagatgacgtcgtgtgtaccagaatttatgtgcgtgagtag

SEQ ID NO: 217801 - DNA, 249 bp, synthetic construct
  misc_feature 1..249: note = Description of Artificial Sequence: Synthetic coding sequence
  source 1..249: mol_type = other DNA
atgcctaatttttctggtaattggaagatcatcagaagtgagaatttcgaagaactgctcaaggtgctcggggtgaacgtcatgctacgaaagattgctgtcgcagccgcttctaagccagcagtggagattaagcaggagggtgataccttctacatcaaaactagtactaccgttcggacaaccgagattaactttaaggtgggagaggagttcgaagagcagaccgttgatggcagaccctgttag

SEQ ID NO: 217802 - DNA, 417 bp, synthetic construct
  misc_feature 1..417: note = Description of Artificial Sequence: Synthetic coding sequence
  source 1..417: mol_type = other DNA
atgcccaactttagcggcaactggaagataattagatcggagaatttcgaagagctcctgaaggtactgggagtcaatgtcatgctacggaaaatcgcggtggcagccgcttcgaagccggctgtagagattaagcaggagggcgacaccttctacattaagacttccacaaccgtccggaccacagagatcaactttaaagttggcgaggagtttgaagaacaaacagtcgatggccgtccttgcaagagtctggtaaagtgggagtcggagaacaagatggtgtgcgaacagaagctgctgaagggggagggtcccaagacttcctggactagggaactaaccaatgatggggagctgatccttaccatgaccgccgacgacgtggtctgcacacgcgtatatgtgagggaatag

SEQ ID NO: 217803 - DNA, 417 bp, synthetic construct
  misc_feature 1..417: note = Description of Artificial Sequence: Synthetic coding sequence
  source 1..417: mol_type = other DNA
atgcccaatttctcaggaaactggaagatcatacggtccgaaaacttcgaggaattactcaaggtgctcggagtcaatgtgatgctccgcaagattgctgtagccgcagcctccaagcctgctgtcgagatcaagcaggagggtgacacgttctatattaagacatccacaactgtccgtacgaccgagatcaatttcaaagtgggcgaggagttcgaagaacagacggtagacggaaggccctgtaagagcctcgtgaagtgggagtctgagaataagatggtttgcgagcagaagttactgaaaggggaagggcctaagaccagctggacccgagagctgacgaacgacggggagctgatcctcacaatgactgcagatgacgtggtgtgcacccgagtgtatgttcgggaatag

SEQ ID NO: 217804 - DNA, 744 bp, synthetic construct
  misc_feature 1..744: note = Description of Artificial Sequence: Synthetic coding sequence
  source 1..744: mol_type = other DNA
atgggaacttccagcactgactcacaacaagccggtcacagaaggtgttctaccagcaataccagtgcagaaaatctgacatgcctaagcctccctggtagccctgggaagacagctcctcttcctggtcccgctcaggctggagctggccagcccctgccaaaaggatgtgccgcagttaaagccgaagtgggaattcctgccccacacacttcccaggaagtacgcatccacatccgtaggctgctcagctgggccgctccgggagcctgcggccttcggagcacgccttgtgctctcccacaagctcttcctcaggccagaccttgtccaggtcggtggttctttcctggttgctctctgccgacgggcggtgctcagaccatcttgagtttgtggacatggcgccactttttgaattgggcccttcagcagagggaggagaattccggccgtgcacgtagagtaccccctgtccctaggactgctccagtatctaagggagagggatcccaccccccacaaaatagcaacggcgagaaagtaaaaacaattactcctgatgtcgggttgcatcagtctctgacaagcgaccccacggtggctgtcttacgagccaaacgggcacccgaggcgcatccccctagaagctgctccgggtcgcttaccgctagggtctgccacatgggagtgtgccagggtcagggcgacacagaggatgggagaatgactctcatggggtag

SEQ ID NO: 217805 - DNA, 744 bp, synthetic construct
  misc_feature 1..744: note = Description of Artificial Sequence: Synthetic coding sequence
  source 1..744: mol_type = other DNA
atgggtacttctagcactgacagccagcaggccggtcaccggcgatgtagcacatcaaatacctcagctgagaatttgacctgtctgagcctgccaggcagccccggaaagacagctcctcttccaggccctgcccaggccggagctgggcagcctctgcctaagggttgcgctgccgtgaaggccgaggttgggattcctgctcctcacactagccaggaagtaagaatccacatcaggcggctattaagctgggcagcccctggcgcttgtggcctgcggtctaccccttgcgctttgccccaggccttaccacaagcgagaccatgccccggaagatggttcttcccaggatgcagcttgcctacaggtggcgcacagacaatcctcagtttatggacctggagacacttccttaattgggcattacagcagagggaagagaatagtggcagagccaggagggtgcctccagtccctcgcactgcacccgtgtccaagggagaggggtcccacccaccccaaaactctaatggagaaaaggtgaaaaccatcacaccagatgtgggcttgcaccaatccttaacctccgacccaaccgttgccgtgcttagggctaagcgcgctcccgaagctcacccacctcgttcttgtagtggatcattgaccgcaagagtgtgccacatgggcgtgtgtcagggacagggcgatactgaggacggccgaatgaccctgatgggttag

SEQ ID NO: 217806 - DNA, 4218 bp, synthetic construct
  misc_feature 1..4218: note = Description of Artificial Sequence: Synthetic coding sequence
  source 1..4218: mol_type = other DNA
atggcagccagaagcccacccagcccacacccttcgcctccagcaaggcagcttgggccaaggagtcccagagtgggcaggggagccgaagttcacgctatgcgctccgaggcatccggtttcgccggagcagccagggaggtggtcgctgacgagtccgacaagatttgggtgggagaggaggggagcggcggaagaaggggaccaggtggagccgcacccgctcacgcgcctctgttgtcagccccaatgggtagccgacggctcgagggcatatcagtggaagaggcaatggtgacacggacccagttgctggaggaggagttgtccagcctcaaggaggagcttgcactatgccaggccgacaaagaattcgtctggtccctgtggaagagattacaagttactaatcccgaccttacacaggtagttagtttagtggtggagagggaaaaacagaagagtgaggccaaggatcggaaggtcctggagattcttcaggtgaaggatgctaagattcaggagttcgaacagcgcgaatctgtcctgaaacaggagataaatgacctcgttaagcggaaaattgccgtggacgaggaaaacgccttcctccgcaaagagttctctgacttggaaaagaagtttaaagataagagccaggaaataaaagacacgaaggagtgtgttcaaaacaaggaagaacaaaacagactcgtcataaaaaatctagaggaagaaaacaagaagctcagcacccgctgtaccgacctgcttaatgacctcgaaaagttgagaaagcaggaggctcacctgcgaaaagaaaaatacagtactgacgccaagataaagactttcgaggacaacctgatcgaagccagaaaggaggtggaagtgtctcagtctaaatacaatgccctgagtcttcagctcagcaacaaacaaacagaactgatccagaaagacatggacatcactcttgtcagacaggagttgcaagagttgcaaaacctgtacaagcaaaattccacacataccgcgcagcaggctgagctgatccaacaattacaagtgctcaatatggacacccaaaaagtacttagaaaccaagaagacgtgcacacagcagagtcgatctcctaccagaagttgtataatgagctgcacatctgcttcgaaaccactaagtccaacgaggccatgctcagacagtcggtgactaacctgcaggatcagctgcttcagaaggaacaggaaaatgctaaactgaaagagaaacttcaggaatcgcagggagcgccactgcctttgccccaagaatccgacccggattactcagcccaggtgccacaccggcctagcctctccagccttgaaacattgatggttagtcagaagtctgaaatcgagtacctgcaggagaaactgaagattgccaacgaaaagctgtccgagaatatcagcgccaataaagggttttctcggaagagtatcatgaccagcgcagagggtaagcacaaagagccaccagtcaaaagatcaaggtctctgtctccgaaatctagttttacggactctgaggagctgcaaaagctcagaaaggcagaaaggaaaatcgagaacttagaaaaagccctccaactgaaatcacaggagaacgacgaactgagggatgcccatgaaaagcgcaaggagcgcctgcaaatgctgcagacaaattaccgggcagtgaaggaacagctgaagcagtgggaagaagggtccggcatgacagagatacggaagatcaagcgcgcagatccacagcagctcaggcaagaggacagtgacgcagtgtggaacgagttagcatacttcaagcgcgagaaccaagagctcatgatccagaaaatgaacctggaagaggaactggacgaactcaaggtgcacatctccatcgacaaagccgctattcaagaactgaaccggtgtgtcgctgagagaagagaggagcagctttttcgcagcggagaagacgacgaggtgaaacggagtacaccagagaagaacgggaaggagatgctggaacagaccctgcaaaaagtgaccgagctagagaatcgcctgaagagtttcgagaagcgttcccgcaagctcaaggagggaaataagaagctgatgaaggagaacgactttttaaagagtctgttaaagcaacagcaagaggatactgaaacccgcgagaaggagctggagcagatcattaaggggtccaaggacgttgagaaggagaacacagaacttcaggtgaaaatttctgaactggaaacagaggtgactagtctgcgccgacaggtcgctgaggcgaatgcattacggaatgagaatgaggagctaattaatcctatggaaaaaagtcatcagtctgcagaccgtgccaagtctgaaatggcaaccatgaaggttaggtcgggtcgctacgattgcaagactacaatgacaaaagtcaagttcaaggctgctaagaagaattgtagtgtggggcgacatcatacagtgctgaaccattccatcaaagtgatgtccaacgtgtttgaaaacctgtcaaaggacggctgggaagatgtcagtgagagtagctctgatagcgaggcgcaaacaagccagactctcggtaccatcatcgtggaaacgtctcagaaaatcagccccacagaggacggaaaagaccaaaaggagagcgacccgaccgaagacagccaaactcaaggaaaggaaatcgttcaaacctatttaaacatcgatggcaagactcccaaggactattttcacgataagaatgcaaaaaagcctacctttcaaaaaaagaattgcaagatgcagaagagctctcacacggctgtaccaacgcgagtcaatcgggagaaatataagaatattactgctcagaaaagctcttccaatattatcttgttaagagagaggatcatatctctccaacagcagaactcagtgttgcagaatgccaaaaagacagctgagctctcagtaaaagagtacaaggaggtgaatgaaaaactcctccatcaacagcaagtaagcgaccagaggttccagacttcgaggcagacaatcaaaaaactgaatctagacctggctggcctgcgaaaggagaaagaggacctcttaaagaaactggagtccagttccgagattacctccttggctgaagagaacagtcaggtaacattcccaagaatccaggtgacatcgctgtcaccttctcggtcaatggacctggagatgaagcagctgcagtacaagctcaagaatgccaccaatgaactcacaaaacagtcgagtaatgtgaaaaccctcaagtttgagctgttggccaaggaggaacatatcaaagaaatgcacgaaaagatctctcggatggaaagggacataacaatgaaaagacacctcatcgaggatctgaaattcaggcagaaagtcaatcttgagtctaataaatcttttagcgagatgttgcaaaacttggataagaaggttaaaacactgaccgaagagtgcagcaacaagaaagtatccatcgactctttaaagcaaaggctgaatgtggccgtgaaagagaagtcccagtacgagcagatgtatcagaaaagcaaagaagaactcgaaaaaaaagatctaaaactgacgcttttggtgtctaggatctctgagacggagtctgccatggcagagatcgagaccgccgcaagcaaacaactgcaggagttggccttacagagcgaacaggttctggaaggagcacagaagaccctcctactggctaatgagaaggtagaggaattcacaactttcgttaaagcgcttgcaaaagaactgcaaaacgatgtccatgtggtgaggcgccagatcagggagctgaaaaaaatgaagaagaatcgcgatgcttgtaagacctcaacacataaggctcagacattggccgcttctatcttgaacatctccaggtcagatctcgaagaaattctcgacacagaggatcaagtcgagatcgaaaagacaaaaattgacgcagaaaacgacaaggagtggatgctctatattcagaaactcttggagggtcaatctctcgccctgtctccaagattaaagtgtaatggagccattgtggcacaccagaacctgcggctgccagattcttcctcctcagccagcgcctcttag

SEQ ID NO: 217807 - DNA, 1176 bp, synthetic construct
  misc_feature 1..1176: note = Description of Artificial Sequence: Synthetic coding sequence
  source 1..1176: mol_type = other DNA
atggctgcgagatctcccccttccccccatcctagtcctcccgcaagacagcttgggcctcgctctccgagagtcgggagaggcgctgaagtgcacgctatgaggtccgaggcaagcggtttcgcgggagctgctagagaggtagtagccgatgaatctgataagatctgggtaggcgaggaggggagcggcggtcgcaggggcccaggcggtgcagctcctgctcacgcccctctgctgtctgcccctatggggagtcgcaggctggaaggcattagcgttgaagaggcaatggtgactcgcacgcagctgctggaagaggagctctcttccttaaaagaggaactagcactgtgccaagccgacaaagaattcgtgtggtcactgtggaagagactgcaggtgacaaaccctgatctcacccaggtggtgagtctggtcgtggagagggagaagcaaaaatccgaagcaaaggataggaaggtcctggagattctacaggtgaaagatgctaaaattcaggagttcgagcagagggagagcgtcctgaaacaggagattaacgatctggtcaagagaaagattgccgtagacgaagagaatgcttttctcaggaaagaattcagcgacttagagaaaaaatttaaggataaatcccaggagataaaagatactaaagagtgcgtgcagaataaagaagagcagaaccggctcgtgatcaaaaacttggaagaagagaacaaaaagttgtcaactaggtgtactgatctcctcaacgatctggagaagttgcggaagcaggaggcccatctgcgaaaggagaagtactcgacagacgcaaagattaaaacattcgaggacaaccttattgaggctagaaaagaggtcgaggtgtctcagtctaaatataacgcgctctcattgcagctctctaataagcaaactgagctcatacagaaagatatggatatcactctggtgcgcaaagaattgcaggagctgcagaatttatataagcaaaattctacccataccgctcagcaagccgagcttattcagcaactgcaggtgctgaatatggacacccagaaagtgttgcgcaatcaggaagatgttcacaccgcagaatctatctcctatcagaaagtctgtttttacagcgtgatcaagatgtag

SEQ ID NO: 217808 - DNA, 4221 bp, synthetic construct
  misc_feature 1..4221: note = Description of Artificial Sequence: Synthetic coding sequence
  source 1..4221: mol_type = other DNA
atggcagccaggagccccccatcaccccatcctagtccgcctgcccgacagctaggtcccagatctccacgggtcggaagaggagccgaggtccacgctatgcggtctgaagccagcggattcgcgggagctgcacgggaagtcgtggccgatgaatctgacaagatatgggttggcgaggaggggtctggtggcaggcgcggtccaggaggggcagctccagcccatgcgcctctgctctctgcccctatgggatcccggcgactcgagggaatttctgttgaagaagccatggtgacccggacccagttgttggaagaggagcttagcagccttaaggaggaactcgccctatgccaggccgataaggagtttgtgtggtccctctggaagagacttcaggtcacaaaccccgatttgacgcaagtggtaagcctggttgtggagcgggaaaagcagaagtctgaagctaaagatcgtaaggtgctggaaattctgcaagttaaggacgctaaaatccaggagttcgaacagcgggagagtgtgctgaagcaggagataaatgatctagttaaacgcaagattgctgtggacgaggagaacgcctttctaaggaaggagttcagcgacctggaaaagaaattcaaagataaatcacaggagattaaggatacaaaagaatgtgtccaaaataaagaggagcagaatagactcgtgatcaaaaaccttgaggaagagaataaaaagctgtcaaccaggtgtacggatctgcttaacgatctggagaaattgcgcaaacaggaggcccacttacgcaaggagaaatactccactgacgctaaaatcaaaaccttcgaagataacctgattgaagccagaaaggaagtcgaagtgtctcagtctaagtataacgcccttagtctgcagcttagcaacaagcagacagagctgatccagaaagacatggacattaccctggtaagaaaagagctgcaagagctccaaaatctctataagcagaattctacccacaccgcccaacaggcagagcttatccagcagctccaggtactaaatatggacactcagaaggtgctgcggaatcaggaggacgtgcacaccgcagaaagcatcagttatcagaagctgtacaacgagctccatatctgcttcgaaactacaaagtcaaacgaggcgatgctgagacagagcgtaactaatttgcaggaccagcttttgcaaaaggaacaggaaaacgccaaactgaaggaaaagctccaggagagccagggtgctccgctgccactcccccaggaaagtgatccagactactccgcccaggtaccccaccggccatccctttccagcctggagacactcatggtttctcagaagagcgagattgaatacctgcaggaaaaattgaagattgctaacgaaaagctatctgagaatatttcggccaataaggggtttagccgaaaatcaatcatgactagtgctgaaggaaagcacaaggagcccccagttaagcgtagccgctctctgtcccctaagtcgtcttttactgacagtgaagagctgcaaaagctccgcaaagctgaaaggaagatcgaaaatctggaaaaagctctgcagctgaagagccaggagaacgatgagctgagggatgcccatgagaagagaaaagaaagattacagatgcttcaaaccaattaccgggctgtgaaggaacagctgaaacagtgggaagaaggtagcggaatgacagagatccggaaaattaagcgcgctgacccccagcagcttaggcaggaggatagtgatgcggtctggaacgagctggcctactttaagagggaaaaccaggagctgatgatacagaaaatgaatcttgaagaggagttagacgaactcaaagtccacatctccattgacaaggctgcgatccaggagctgaatcggtgcgtggcagagcgaagagaggagcagcttttccggtccggagaggatgatgaagtgaagaggtcaactccagaaaaaaatggcaaagagatgctggaacagacactccagaaggtgactgaactggagaatcgtctcaagtcatttgagaagagatccaggaagctcaaagaaggtaataaaaagctcatgaaagagaatgacttcctgaagtctttgctaaagcaacaacaggaagatacggagaccagagagaaagaactggagcagatcattaaaggaagtaaagatgtagaaaaagagaatactgagcttcaggtgaagatctcagaactggagactgaagtcacatcattaagaagacaggttgctgaggctaatgcactcagaaacgaaaacgaggaactgataaatcccatggaaaaatcccatcagagtgctgaccgggctaaaagcgagatggctaccatgaaagtgcgatcagggaggtacgactgtaagacaaccatgacgaaggttaaatttaaggctgcaaaaaagaactgtagcgttgggagacatcacaccgtgcttaaccactctattaaggttatgagtaatgtgttcgagaatctatcaaaagatgggtgggaagatgtctccgaatcatcctctgattccgaagcacagaccagccagactctgggaacaattattgtggaaacgagtcaaaaaatttcaccgactgaggatggaaaggaccaaaaggagtccgatccgacagaggattcgcaaacacagggaaaagaaatcgtacaaacttatctgaacatcgacgggaagaccccgaaggattattttcacgacaaaaacgccaagaagcccacatttcaaaagaagaattgcaagatgcagaaaagctcccataccgctgtgcccacccgggtgaatcgcgaaaagtataagaatatcaccgcacagaaatcctcctctaacattatcctgttgcgcgagcggattatatctctgcagcagcagaattcagtgttgcagaacgcaaaaaaaacggccgagctgagcgtaaaagaatataaagaagtcaatgaaaagctgctgcaccagcaacaagtgtctgatcaacggttccagacctctcggcagactataaaaaaacttaatttggaccttgccggactaaggaaggaaaaggaggacttattgaagaaactagaaagcagcagcgagattacctctctcgctgaggagaatagccaagtgacatttcctcgtatacaggtgaccagcctgtcccctagcaggagcatggacctagagatgaaacagcttcagtacaagctgaaaaatgctacaaacgaacttacaaagcagtcaagtaacgtgaaaacactgaagtttgagctcctcgcaaaagaagaacacatcaaggagatgcatgagaagataagtagaatggaaagagatatcaccatgaaaaggcacctgatcgaggacttgaagtttcggcaaaaggtgaacctggagtctaacaaaagcttctctgaaatgctccagaatttggacaagaaggttaaaacactaactgaggaatgcagtaataagaaagtgagcatcgactccttgaagcagcgattaaatgtggccgttaaggagaagtctcagtacgaacagatgtatcagaaatctaaagaagagttggagaagaaggatctgaagttgaccctccttgtgagtagaattagcgaaactgagagcgcaatggcggagattgaaaccgccgcaagcaagcaactgcaagaattagccctgcaatccgagcaagtgctggaaggagcccagaaaacacttctgctagctaacgagaaggtagaagagttcactacatttgttaaggccctggcaaaagagctgcagaatgatgtccacgtcgtgcgtcgccagattagggaactgaaaaaaatgaagaaaaatcgtgacgcttgtaaaacatcgacccataaggcgcaaactttagcggctagcattctgaatatctcaaggagcgacctggaagaaatactggacaccgaggaccaggtagagattgagaaaacaaagatcgacgcagaaaacgataaggagtggatgttatatattcagaaattactcgaagggcagctgcccttcgcatcttatctgcttgaagctgtccttgagaaaattaatgagaagaagaagctagtcgagggctacttcacaattatgaaggatattaggtag

SEQ ID NO: 217809 - DNA, 4221 bp, synthetic construct
  misc_feature 1..4221: note = Description of Artificial Sequence: Synthetic coding sequence
  source 1..4221: mol_type = other DNA
atggctgcgcgaagcccgccaagtcctcacccgagtcccccagcaagacagctcggccctaggtctccccgagttgggaggggggcagaagtgcatgcgatgagatccgaggcttccggattcgcgggtgccgcacgagaagtagtagccgacgaaagcgacaagatctgggtgggagaagagggatccggaggaaggcgtggacccggaggagctgccccagcacacgcccctcttctgagtgcacccatgggctcacgtcgcctggagggcatctccgtagaggaggcaatggtaacccgcactcagttacttgaggaagaactgtcatctttaaaagaggagctggccctctgccaggccgataaggagtttgtttggtcactgtggaaacggttacaagtgaccaatccagacctgacccaagtcgtgtctctcgttgtcgagcgcgagaagcagaaatccgaagcaaaagatcgaaaggtgctggaaattctccaagtgaaagacgctaagatccaagagttcgagcagagagagagcgtgctcaagcaggaaattaacgacctcgtgaagaggaaaattgctgtggacgaggaaaatgcctttttgcggaaagagtttagcgatctggaaaagaagtttaaggacaagtcccaggaaataaaagacacaaaagagtgcgttcagaataaagaagagcagaacaggctggttataaagaacctggaggaagagaataagaaactcagcacacgttgtacagacctgttgaatgatctcgaaaaattgcgcaagcaggaagctcacctgagaaaagagaagtactcgacggacgctaaaatcaaaactttcgaagacaacttgatagaggctagaaaggaggtggaggtgtctcaaagcaaatataatgctttaagcctgcaactgtccaacaagcaaaccgagcttattcagaaagatatggacattacactagtgcgccaagagctgcaggagctgcagaatctgtacaagcaaaactcgactcacaccgcccagcaagctgaactgatacagcagctgcaagtgttaaacatggacacacagaaagtgctgcgcaaccaggaggatgtccacactgctgaatctatatcttaccagaagttatataatgagttgcacatctgttttgaaacaaccaagagcaatgaggcgatgctcaggcagtctgttaccaacctgcaggatcaactactgcagaaggagcaagagaatgccaagctcaaggagaaactgcaggaatcgcaaggagctcccctgccactccctcaggaaagcgatcccgattacagcgcccaggttcctcaccgcccttctttgtctagcttagaaacgctcatggtgtcacagaagtcagagatcgagtaccttcaagaaaagctcaagatagcaaatgaaaaactaagcgagaatatctccgccaacaaaggcttctctagaaagagcattatgacttcggccgaagggaagcacaaggagccacccgtcaagcgcagccggtctctctcaccgaagagctcttttactgattcggaagagctacaaaaactgcgcaaggctgagcgaaagatagagaacctggaaaaggctctgcagcttaagagccaagagaacgatgaactgcgcgacgcacatgaaaaacgtaaagagcgactccaaatgcttcagacaaactatcgtgcagtgaaggagcagcttaaacagtgggaggagggaagcggcatgacagaaatccgcaaaatcaaaagagcggacccccagcagctccggcaggaggattctgatgctgtttggaatgagctcgcctattttaagcgggagaaccaggagctcatgatccaaaagatgaatctcgaggaagaactcgacgagctgaaggttcacatcagcatcgataaggctgccatacaagaactgaatcggtgtgtggctgagcggcgagaggagcagctgttcaggtccggggaggatgatgaagtgaaacgctctaccccagagaagaacggaaaggaaatgttggaacagaccctgcagaaggtcacagagctagaaaatagacttaagagtttcgagaaacgctccagaaaactgaaggaaggcaacaaaaagctcatgaaggagaacgactttcttaaatccctcttgaaacaacagcaggaggacaccgagactcgggaaaaggagcttgaacaaattatcaaggggagtaaagacgtagagaaggagaatacggagctgcaagtgaagatctcagagctggaaacggaggtgacctccttgcgcagacaagtcgcggaagcaaacgcactgcgcaatgagaacgaggagctgatcaaccccatggagaagtcccatcagagcgcggatcgcgcaaaatcagaaatggcaaccatgaaagtgaggagcggcagatacgactgcaagaccacaatgactaaagtgaagtttaaagccgctaaaaagaattgttctgtggggagacaccacacggtcctgaatcatagcattaaggtaatgtcaaatgtcttcgagaatctgtccaaagacggttgggaggacgtcagtgaatcctccagcgatagtgaagcgcagactagccagactctgggcacaattatcgttgaaacctctcagaagatttctcctacggaagacggaaaggatcagaaggaatctgatcccactgaagatagccagacgcagggaaaggaaatcgtgcagacgtacctgaatattgatggtaaaacgcccaaagactactttcacgataaaaatgcaaaaaagcctacatttcagaaaaagaattgtaagatgcagaagtcttcccatacagccgttcccacccgggtgaaccgcgagaaatacaagaatatcaccgcgcagaaatcaagttctaatataatactactccgggagcgcatcatatccctgcaacagcagaacagtgtcctgcagaatgccaaaaagacagccgagttgagcgtgaaggaatataaggaagtgaatgaaaagttattgcatcagcagcaggtttcagatcagagatttcagacatcccgtcagacaataaaaaagttgaatctcgatctggcgggtttgaggaaggagaaggaagacctgctcaaaaaactggaatcgagttctgagatcacttctttggccgaggagaactctcaggtgacattcccaagaattcaagtgacatcattgtcccccagtcgcagcatggatcttgagatgaagcagctccagtacaagttgaagaatgccaccaatgagctcaccaagcaaagctccaacgtgaagaccctgaaatttgagctgttagcaaaggaggagcatattaaagagatgcacgaaaaaatctcccggatggagagagatattactatgaaacgccacctcatagaggacctcaagttcaggcagaaggtgaatctggagagcaataaaagcttctcggagatgctgcagaatctggacaagaaggttaagactctgacggaggaatgtagcaataaaaaagtttcgatcgactcgctgaagcaaagactgaacgttgctgtgaaggaaaagtcgcagtacgagcagatgtatcagaaatccaaagaggaactggagaagaaagatctaaagttgacactgcttgtgagccggatctctgaaacagagtcagccatggctgagatagaaacagcagcctctaaacagctccaggagctggctcttcagtcagaacaggtgctcgagggcgcacagaagacactgctattggctaatgagaaggtagaggaattcactacttttgtcaaggcattagccaaggagctacagaacgacgtccacgtcgtccggcgacaaatccgggaactgaagaaaatgaaaaaaaaccgagacgcctgtaaaacatctacgcataaggcacagactctggctgcctccatcttgaacattagtcggtctgacttagaggaaatcttagacaccgaggaccaggtggaaatagagaaaacaaagattgacgcagagaacgataaagagtggatgctctacatacagaaactgctggaaggacaattaccttttgcatcttatctcttggaagcagtgcttgagaagatcaacgaaaagaagaaactcgtggaaggatattttactataatgaaggacattcgctag

SEQ ID NO: 217810 - DNA, 519 bp, synthetic construct
  misc_feature 1..519: note = Description of Artificial Sequence: Synthetic coding sequence
  source 1..519: mol_type = other DNA
atggcctcaggcttcaagaagccttccgcagccagcaccggacagaagcgaaaggttgcccctaagcctgagctgaccgaggaccagaagcaggaggttagagaagccttcgatctgtttgacgtggacggcagtgggacaattgacgccaaagagctgaaagtggccatgagagctctcggtttcgaacctcgtaaggaggaaatgaagaagatgatttctgaggtcgatcgcgaggggaccggaaagatcagtttcaatgacttcctcgccgttatgacccagaagatgtctgagaaggatactaaagaagaaatcctaaaggcatttcgtcttttcgacgatgacgaaacgggaaagatcagtttcaagaatctgaaacgggttgccaatgaactgggcgagaacctgaccgatgaggaattgcaggaaatgatcgatgaagcagaccgtgatggggacggcgaagttaatgaggaggagtttttgaggatcatgaaaaaaacttctctctattag

SEQ ID NO: 217811 - DNA, 519 bp, synthetic construct
  misc_feature 1..519: note = Description of Artificial Sequence: Synthetic coding sequence
  source 1..519: mol_type = other DNA
atggcctcaaatttcaaaaaagctaatatggcctctagctcacagaggaagcgtatgtctcctaaacccgagctgacagaggaacagaaacaagaaatcagggaagctttcgacctttttgatgcggatggaactggcaccatcgacgtgaaggaactgaaagttgctatgagggcattgggctttgagcctaaaaaggaggagattaagaaaatgatctctgaaatagacaaagaaggaaccggaaaaatgaactttggggactttctaacagtgatgacccagaaaatgagcgaaaaagatactaaagaagagattctgaaagcgttcaaactgtttgatgacgatgagacagggaagatttccttcaagaatctcaaacgggtcgccaaagagttgggagaaaatctgaccgacgaggaactgcaggaaatgatcgatgaggctgacagagacggtgacggggaggtaagtgaacaggagtttctccgcattatgaaaaagacttcgctgtactag

SEQ ID NO: 217812 - DNA, 378 bp, synthetic construct
  misc_feature 1..378: note = Description of Artificial Sequence: Synthetic coding sequence
  source 1..378: mol_type = other DNA
atggccatgcaggccgcaaagcgcgcaaacataaggctgcctccggaggtcaatcgaatactttacatcaggaacctcccctacaagatcaccgccgaagagatgtacgatatcttcgggaagtatgggcctattcgacaaattagagtgggcaatacaccagagaccaggggaaccgcgtacgtggtgtacgaagacatattcgatgcaaagaacgcctgcgaccacctcagcggcttcaacgtgtgcaatcggtacctggtggtgctgtattacaatgccaaccgagctttccagaagatggacacgaaaaaaaaggaggaacagctgaagcttctgaaagaaaagtatggaattaacacagacccgcctaaatag

SEQ ID NO: 217813 - DNA, 423 bp, synthetic construct
  misc_feature 1..423: note = Description of Artificial Sequence: Synthetic coding sequence
  source 1..423: mol_type = other DNA
atgggtcctcgcagaagatccagaaagccagaagctccccgtcggagaagtccaagcccaacccccacgcccggaccttcccgccgaggaccttctctgggtgcatccagtcatcaacactctcgccgtcgtcagggttggctcaaagagattcgtaaactgcagaaatccacccacctattaattaggaagcttccatttagtcgcttagcgcgagagatctgtgtgaaattcaccagaggggttgacttcaactggcaggctcaagccctgcttgccttgcaggaagccgcagaagccttcctggtgcacctcttcgaagacgcttacctcctgactctgcacgctggtagggtaactttgttccctaaagatgttcaactagcaaggcgtattcgaggactggaagaggggctgggatag

SEQ ID NO: 217814 - DNA, 1800 bp, synthetic construct
  misc_feature 1..1800: note = Description of Artificial Sequence: Synthetic coding sequence
  source 1..1800: mol_type = other DNA
atgggccctaaacggcgacagcttacttttcgcgaaaagagccggataatccaagaggtggaggagaaccccgatctgaggaagggagagatcgctcggagatttaatatccccccaagtaccctgagtaccatcctgaagaataagcgggcaattttagcatccgagcggaaatacggggtcgcgtctacatgcaggaaaactaacaagctcagcccttatgataaacttgaaggcctgcttatcgcctggtttcagcagatcagagccgcaggtctgcccgtaaaaggcatcatcctgaaagagaaagcactgcgaatagctgaagaactcggtatggatgatttcacagcctcaaatggctggctggaccgctttagaaggcgacatggcgtggtgtcttgttccggggttgctcgggcacgtgctagaaacgctgcccctcgcactccagctgcacctgccagccctgctgccgtcccttccgagggatcaggcggaagtactactggatggcgagccagagaggagcagccgccaagcgtggccgaaggatatgcatctcaggacgttttttccgccaccgagacctccttatggtacgactttttgcctgaccaggccgcaggcttgtgcggaggagacggcagaccgagacaagccacacagcgcctctcggtactgctgtgtgccaatgcagacggatccgagaagttgccgccactggtagcaggcaagtccgcgaagcctcgggcaggacaagcgggtctgccctgtgactatacagcaaacagcaaagggggtgtcaccacacaggctctagcgaagtatttgaaagccctggatacaaggatggccgctgagagcaggcgggtcctacttcttgcagggaggctggcagctcaaagcttggatacgtcggggttacgacacgtgcagctggctttctttccccctggaacagtgcacccactcgagagaggcgtggtgcagcaggtgaaggggcactaccgacaggccatgctgctgaaagctatggccgctttagaggggcaggaccccagcgggcttcagcttggcttaactgaggcactgcatttcgtggccgcagcatggcaggctgtcgaaccaagcgacattgccgcttgtttccgggaggctggatttggcggaggtccaaacgcaactatcactacaagcctcaagtctgaaggtgaagaagaggaggaggaagaagaggaggaggaggaagaagagggcgagggcgaagaagaggaggaggaaggcgaggaagaagaagaggagggaggggaaggagaggagctgggcgaagaagaagaagtagaagaggaaggggacgttgatagcgatgaggaggaggaggaagacgaagagtcaagttctgaaggtctcgaggcggaggactgggcacagggcgtggtggaggccggaggctccttcggcgcttacggggctcaggaggaagctcagtgtccaacccttcatttcctggaaggcggagaagactcggattctgacagtgaagaagaggatgatgaagaggaggatgacgaagatgaagatgacgacgatgacgaggaagatggggacgaagtgcccgttccatctttcggcgaggcaatggcctactttgctatggtgaagcgctatctaacaagctttccgattgacgaccgcgtccagagtcacattttacatctggaacatgatctcgtacatgttacgcgcaaaaaccatgcaaggcaagcaggagtgagagggctgggccaccagtcgtag

SEQ ID NO: 217815 - DNA, 417 bp, synthetic construct
  misc_feature 1..417: note = Description of Artificial Sequence: Synthetic coding sequence
  source 1..417: mol_type = other DNA
gaggatgaagaaagctcttccgaaggcctcgaagcagaagactgggcccagggcgtcgtagaagcagggggatcttttggcgcatacggcgcacaagaagaggcccagtgtccaacactgcatttcctggagggcggagaggattcagatagtgacagtgaggaggaggatgacgaggaggaggatgacgaggatgaagatgacgacgacgacgaagaggacggagacgaagttcccgtgcctagctttggcgaggcgatggcatactttgccatggttaaaaggtacttaactagctttcctattgacgacagggtgcaatctcacatcttgcatctggagcacgatctggtacacgtaacacggaagaatcacgccagacaggccggagtgcgcggactgggccatcagtcctag

SEQ ID NO: 217816 - DNA, 2832 bp, synthetic construct
  misc_feature 1..2832: note = Description of Artificial Sequence: Synthetic coding sequence
  source 1..2832: mol_type = other DNA
atggctgctagtggactcgatcatctgaagaatggctaccggagacgcttctgtcggccttcccgagccagggatatcaacactgaacagggccagaacgtcctcgaaattctccaggactgttttgaggaaaaatctttagctaacgacttctccaccaacagcactaagtccgtgcccaattccactcgcaaaattaaggatacatgcatccagtccccctcaaaggagtgccagaaaagccacccaaagagtgtccccgtgtcttcgaagaagaaggaggcatccctccagttcgtagtcgagccctctgaggccactaaccgctctgtgcaagcccacgaagtgcaccaaaagatcctagccacagacgttagctccaaaaatacccccgatagcaaaaaaattagctctcgaaacattaatgaccatcactcagaagctgacgaggagttttacctatctgtcggctcacctagcgtcctcctcgatgctaagaccagcgtgtctcagaatgtcattccaagctcagcccagaagcgggagacctatacctttgagaattctgtcaacatgctgccctcttccaccgaagtgagtgtgaaaactaagaaacgcctgaatttcgacgacaaagttatgctgaagaagatcgagatagacaataaagtgtctgatgaggaggacaagaccagcgagggacaggaaagaaaacctagtggaagctctcagaatagaattagggacagtgaatatgagattcaacgccaggccaaaaaatctttcagcacacttttcctggagacagtgaaaaggaagtctgagtcgtcacccattgtgaggcatgccgcaacagcaccccctcatagttgcccacccgatgacaccaagttaatcgaggacgagttcattattgatgaaagcgaccaatcttttgcgtctcgaagttggatcaccatacccagaaaagccggaagtttaaaacagcgtaccatatcgcccgctgagagtactgcactcctccagggcaggaagagtcgggagaagcatcataatattctccctaaaacactggccaatgataaacactcccataagccacatcccgtggagacttcacagcccagcgacaagacagttctggatacttcttacgctttaattggagaaacagttaacaattatagatcaaccaaatatgagatgtacagtaagaatgccgaaaagcccagtcgttccaagagaacaatcaaacagaagcaacgcaggaagttcatggcgaagccagcagaggagcaattggacgtgggtcagagcaaagacgaaaatatccacacatcgcacattactcaggatgagtttcagcgtaattccgatcgcaatatggaagaacacgaggagatgggtaacgactgtgtgtccaagaagcagatgccacccgtcggcagcaagaaatctagcacacggaaagacaaagaagaatccaagaagaaaaggttcagctctgaaagtaaaaataagttggtccctgaggaagtgacttctactgtgacgaaatccaggcgtatttcccggagacctagcgattggtgggtggtcaaaagtgaagagtctcctgtatattcaaatagcagcgtccgaaacgagctgcctatgcatcataattcatcaaggaaaagcacaaaaaaaactaatcagtccagcaaaaacatcaggaagaagacaatcccactgaaaaggcaaaagacagctacaaaaggcaatcagcgggttcagaagtttctgaatgccgaaggcagcggagggatagttgggcacgacgagatctcccgatgctccctaagtgagcctctggaatctgatgaggccgacttggccaagaaaaaaaaccttgactgctccagaagcactcgttcctcaaagaatgaggataacatcatgactgcccagaacgtacccctgaagcctcaaacctccggatatacctgtaacatccccacggagagcaatctcgactccggagagcacaaaacaagcgtcctggaagagtcggggcctagccggttgaataataattatctcatgagcggtaaaaacgatgtggatgacgaagaagtgcacggaagctccgatgattctaagcagtcaaaagtgattcctaagaacaggatccatcacaagctggtgttgcctagcaacacgcccaacgtacgccgtaccaaaaggacaagactgaaacctcttgagtactggagaggcgagcgaatcgattatcagggtcgaccaagcggcggttttgttataagtggcgtgctcagcccggacacaattagcagtaaacgcaaagccaaagaaaacatcggaaaggtgaacaaaaaatctaacaaaaagaggatctgtctggataacgatgagagaaagaccaatttgatggttaatctggggattccactaggtgaccctctgcaacctacacgcgtaaaagacccagagacaagagaaattatccttatggacctggtgagacctcaggatacctatcaatttttcgtaaagcacggcgaactcaaggtatataagacactggacaccccctttttctccactgggaaacttattctgggcccacaagaagaaaaaggtaaacagcacgtgggccaggatattctggtcttttatgtcaattttggtgatttgctctgtaccctgcacgaaactccgtatatactgtctacaggcgatagtttctacgtcccttctggtaactattacaacatcaagaacctccgaaacgaggagagcgtgcttctgtttacccagatcaaacgctag

SEQ ID NO: 217817 - DNA, 8106 bp, synthetic construct
  misc_feature 1..8106: note = Description of Artificial Sequence: Synthetic coding sequence
  source 1..8106: mol_type = other DNA
atggcagaggagggcgcagtggctgtgtgcgtgcgcgtaagaccactgaacagtcgtgaggagagtctgggtgagacagcacaggtgtattggaagaccgacaataacgttatctaccaagtggacgggtcaaagagttttaattttgatagggtcttccacgggaacgagactaccaagaacgtgtacgaagaaatagctgctccgatcatcgacagcgccatacagggttacaacggcaccattttcgcctacgggcagactgcctcaggaaagacatatacaatgatgggcagtgaggaccacctgggggtgattccgagagcaattcatgatattttccagaagataaagaaattccccgaccgtgagttcctgctccgggtttcatacatggagatatataacgagacaattacagatttgttatgtggtacacaaaagatgaagccactgataattagggaagacgtgaacaggaacgtgtacgttgctgatctgactgaagaagtcgtctacacatcagagatggcgctgaagtggatcaccaaaggagagaagagtaggcactacggggagacaaaaatgaatcagaggagttctcggtctcacaccatcttcagaatgatactcgagagccgcgagaaaggagagccatcgaattgtgagggatcggtgaaggtcagccaccttaacctggtggacctggccggttcagagcgcgctgcccaaactggggctgcaggggtgaggctcaaagagggatgtaacatcaacagatccctgttcatactggggcaggtgattaaaaagctgtctgatggccaagtgggaggctttattaattatcgggattcaaaactcactaggatcctccagaactccctcgggggtaatgcgaaaacacgcatcatctgcactataactcccgtgagctttgacgagacactgactgccttgcagtttgctagtaccgctaagtacatgaagaacacaccatatgtaaacgaggtttcaaccgatgaagcccttctcaaaaggtatcgcaaagagattatggatttgaaaaagcagctagaagaggtgtcccttgaaacacgggcacaggccatggaaaaggatcagctggcccaattgctggaggaaaaggatctgctacagaaagtacagaacgagaagattgagaacctgacccggatgcttgtcacaagtagctctctgactctgcagcaagagttgaaagcaaagcgcaaacgcagagtgacatggtgtctgggaaagatcaataagatgaaaaattcaaactatgcggaccaattcaatatcccgactaacattactaccaagacacataagctgagtattaatctgctgagggagattgatgaatcagtttgttcggaaagcgatgtgttttcgaacaccttggacactctcagtgaaatcgaatggaaccctgccactaaactgctgaaccaagagaacattgagtccgagttaaattctctacgcgcagattacgacaacctagtgctcgattacgagcagttgagaaccgaaaaggaagagatggagctgaagcttaaggagaagaatgacctagacgagttcgaagccctcgaacgaaaaacgaagaaagaccaagaaatgcagctgatccatgagatcagtaacctgaaaaatctggtgaaacatgctgaggtatacaaccaagatctagaaaatgagctctcaagtaaagtggagctactgagagagaaggaagatcagattaagaaacttcaggagtacatcgacagtcaaaagctggagaatatcaagatggatctgtcttactctttggaatccattgaggatcctaagcagatgaagcagactttatttgatgccgagacggtcgcacttgatgcaaagagagagagtgccttcttgagaagcgagaacctagagctgaaagaaaagatgaaagagctcgccacaacatacaaacagatggaaaatgatattcagctgtaccagagccagcttgaagcaaaaaagaaaatgcaagttgaccttgagaaagaattgcaatccgcatttaatgaaattactaagctgacatcactcattgacggcaaggtgccgaaagacctcctgtgtaacctggaacttgagggcaagattactgacctgcaaaaggaattgaataaagaagtggaggagaacgaagccctccgggaagaagtcatcctgctcagcgagctgaaatccctcccttctgaggtggaaagactccgcaaagaaatccaggacaaaagtgaggagttgcatatcataacaagcgaaaaggataaactcttctctgaggtggtgcataaagagtcacgagttcagggactgctcgaggagattgggaaaacgaaagatgatctcgcaacgacccagtccaactacaaaagcacagaccaggagttccagaatttcaagacactccacatggatttcgaacaaaagtacaagatggtcttggaggagaacgaacgtatgaatcaggagatcgtgaatttatctaaagaggcccagaagtttgactctagtcttggggctcttaagacagaactctcgtacaagacacaagaacttcaagaaaaaaccagggaggtgcaggagcggttgaacgaaatggaacagttgaaagagcaacttgagaacagggattctaccctccagactgttgaacgggagaagacactgattactgagaaattgcaacagaccttggaggaagtcaagactctgacgcaggagaaggacgatctgaagcaactacaagagtccctgcagatcgaacgcgaccagctgaagagcgatatccatgataccgtgaatatgaatatcgatactcaggagcaactgcgaaatgctctggagtcgctcaagcagcaccaggagaccatcaatacccttaagtccaaaatatccgaagaggtgagtcgtaatctccatatggaggaaaacaccggcgagactaaagacgaattccagcagaaaatggtgggaattgacaagaagcaagatctcgaggcaaagaacacacagactctgacagccgatgtgaaggacaatgaaatcattgaacagcagcggaaaatattttctctcatacaggagaagaacgaacttcagcagatgctggaaagcgtcattgctgaaaaggaacagctcaaaactgacttgaaagaaaatattgaaatgacaattgagaatcaggaagagctgcggctgttaggcgatgagctgaagaaacaacaggagattgtggcgcaggagaaaaaccacgctatcaagaaagagggggaactttctagaacttgtgatcgcctcgcagaagtggaagaaaagctaaaagagaaatctcagcaactccaggagaagcaacagcagttgttaaatgtgcaggaagagatgtccgagatgcagaaaaagatcaatgaaatcgaaaatttaaagaatgagctcaaaaacaaggagctgactctggagcacatggagacagagagactcgaactagcccaaaaactcaatgaaaactatgaggaagtgaagagcattaccaaagagagaaaagttctgaaggagttacagaagtccttcgagactgagcgggaccacctcagagggtatatccgtgaaattgaggccaccggcctgcaaactaaagaggagctgaagattgctcacattcacctaaaagaacaccaagaaacaattgatgagctgcgaaggtcagtcagcgagaaaaccgcgcagatcataaacacgcaagatctcgagaagtctcatactaaacttcaggaggaaatcccagtgctgcacgaagagcaggagctgctgcctaacgttaaggaagtttctgagacacaggagaccatgaacgagctggagttacttaccgagcaaagtaccaccaaagacagcaccacactggcgagaattgaaatggaaaggctaaggcttaatgaaaagtttcaggagtctcaggaggaaatcaaatcacttaccaaggagcgtgataatttaaagacaattaaggaggcgctggaggtcaaacacgatcagctcaaagagcacatacgagaaaccctcgctaagattcaagagtcccaatctaagcaggaacagtccctgaatatgaaagagaaggacaacgagaccactaagatcgtgtcagagatggaacaatttaagccaaaagactccgcgttgctgaggatcgagatcgaaatgctgggcctgagtaagcgcctgcaggaatcccacgacgagatgaagagcgtggcaaaggaaaaagatgatcttcagaggctacaagaagtcctccagtctgagagcgaccaactgaaggagaacattaaggagatagtagctaagcatctggagaccgaagaggagctgaaggtcgcccattgttgcttaaaggaacaagaggagacaataaatgaattgcgagtgaatctatctgaaaaggaaactgagattagtacaatacagaagcagctagaagcgataaacgacaagctccagaataagattcaggaaatctacgagaaggaggagcaatttaatattaaacagatcagtgaagtgcaagaaaaggtcaatgagttgaaacaatttaaagagcatcggaaggctaaagactctgccctgcaatccattgaatcaaaaatgcttgagctgacaaacagacttcaagagagccaggaggagatccagattatgatcaaagagaaggaggaaatgaagcgcgtgcaggaggccctgcagattgagagggatcagctgaaggagaataccaaggagatcgtggctaagatgaaggaatcccaggaaaaggagtaccagtttcttaagatgaccgcggtcaatgagacccaggagaagatgtgcgaaattgagcacctgaaagagcagttcgagactcaaaagttgaaccttgagaacatcgaaacagaaaatataaggctaacccagattcttcacgagaatctggaagaaatgagaagcgtgacgaaggagagagacgatttacggtcagtggaggagacactgaaagtagagagagatcagctcaaggagaatttgcgcgaaacgatcacccgcgacctggaaaaacaggaagagttgaaaattgttcatatgcatctcaaggagcaccaagagacaattgacaagttgagaggaattgtatcggaaaagactaatgagatcagcaacatgcaaaaggacctggagcattccaatgacgctctcaaagcccaggatctaaagatccaagaagaactaagaatcgcacacatgcatctgaaggagcagcaggagacgatcgacaaactgagagggattgtttcagaaaagaccgataagctgtctaacatgcaaaaggatctcgaaaacagtaatgccaagctgcaggagaaaatccaggaactcaaggcgaatgagcatcagctgatcactctcaagaaggacgttaacgaaacacagaaaaaggtttccgagatggagcagctgaagaagcagattaaagatcagtctctcacactgagtaaacttgagatcgagaacttaaaccttgcccagaaactccacgagaacctggaggaaatgaaatctgtgatgaaggaaagagataatctaaggagggtggaggagactctgaagctggagcgtgatcagctcaaagagagcttgcaggagactaaggcgcgagacctcgagatccagcaggaactgaaaactgccaggatgctctcgaaagagcataaggagaccgtcgacaagctccgcgaaaagatttcagagaagaccatccaaatcagtgacattcagaaggatctagataagagcaaggatgagctccaaaagaaaatccaggagctacagaagaaggagctccagctgctgagggtgaaggaggatgtgaacatgagccataaaaaaattaatgaaatggagcaacttaagaaacagtttgaagcccagaatctgagcatgcagtctgtgcggatggacaactttcagctgacaaaaaaacttcatgagagcttggaggagatccggatcgtggcaaaagaacgagacgagctgcgtcggattaaggagagtcttaagatggaacgcgaccagtttatcgcaactctacgggagatgatcgcccgagatcgccaaaatcatcaggtgaagcccgaaaagagattgttgtccgacggacagcaacaccttaccgagtctttgcgcgagaaatgttctagaatcaaggaacttctcaagcggtactccgaaatggacgaccattacgaatgtttgaatcgattaagtctagacttagagaaggaaattgaatttcagaaggagctgtctatgagagtgaaggcgaatctgagtttgccctatctgcagacgaagcacatcgagaagctgttcactgccaaccagcgctgcagcatggaattccatagaatcatgaagaagctgaagtatgtgttgagctacgtgactaagatcaaagaggaacagcatgaatcaatcaacaaattcgagatggacttcattgacgaggtcgaaaagcagaaggagctgctaattaagatccagcatctgcagcaggactgcgacgtgccctcaagggaacttagagaccttaagctgaaccagaacatggacctgcatatcgaggaaatactgaaggatttttctgagtccgaattcccttcaattaagaccgagtttcagcaggtcctcagtaatcggaaggagatgacacaattcttggaggagtggctgaacacacgattcgatattgaaaagcttaaaaacggaatccagaaagaaaacgacaggatttgtcaggttaacaatttctttaataaccgcatcatcgccataatgaacgagtctacagagtttgaggaacgatctgccaccatcagtaaagaatgggaacaagatttgaaatctttgaaggagaaaaacgagaagttatttaagaactatcagacattgaaaacctcccttgcctcaggggcacaggtaaaccccaccacccaggacaacaaaaatccgcatgtcacttctagggctacccaactgaccacggaaaagatccgggaacttgagaattctctgcacgaagccaaggaatctgctatgcacaaggagtctaaaataattaaaatgcagaaagagctggaagtaacaaacgatataatcgccaaattgcaggcaaaagtgcacgaaagtaacaagtgcctggaaaaaacgaaggagacaattcaggttctacaggataaagtcgccttaggggctaagccttataaagaggagattgaagacctaaagatgaaactggtgaaaattgatctggagaagatgaaaaacgcgaaagaattcgaaaaggagattagcgcaaccaaggctacggttgaataccagaaggaggttatcagactgctgagggagaatctgaggcgatctcagcaggctcaggatacctccgttattagcgagcacaccgatcctcagccatcgaacaagcctctgacatgtgggggaggttccggcatcgtacaaaacaccaaggccctgattctcaagagcgagcacatccggctggaaaaggagatctctaaactgaaacagcagaacgagcagttgattaaacagaaaaatgaactcttaagtaataatcagcacctgtccaacgaagtcaaaacttggaaggaacgaacactgaaacgagaagcgcacaagcaggtgacatgcgagaatagtcctaaaagtccaaaggtgacagggacggcctctaagaaaaagcagataactcctagccagtgtaaagagcgtaacctccaggatcctgtgcccaaggagagccccaagtcatgctttttcgactcgcgttcgaagagcttgccatctccacaccctgttcgatattttgataacagcagtctgggactctgccccgaggtgcagaatgcaggtgccgaaagcgttgattcacagcccggtccttggcatgcctcaagcggcaaagacgttcccgagtgtaaaacgcagtac

SEQ ID NO: 217818 - DNA, 7742 bp, synthetic construct
  misc_feature 1..7742: note = Description of Artificial Sequence: Synthetic coding sequence
  source 1..7742: mol_type = other DNA
atggccgaagagggagccgtagctgtctgcgtgcgagtcagaccgttaaactctagggaggagtcgctgggagagacagctcaagtgtattggaagacagacaataatgtgatctatcaagtggatggttctaagtccttcaatttcgacagagtgtttcacgggaacgaaacaacgaaaaacgtgtacgaggagatagcagccccaattatcgactccgccatccagggatacaatggcacaatctttgcctatggccagaccgcaagcggaaaaacctatacaatgatggggagcgaggaccatcttggtgtgatcccaagggcgattcatgacattttccaaaaaattaaaaaattccccgatagggaatttctactgcgggtgagctatatggagatctataatgagactatcaccgatttactctgtggcacccagaagatgaaaccgctgatcatcagggaggacgtgaacaggaacgtgtacgttgccgatctaacagaagaagtcgtgtacacatctgaaatggccctgaagtggataaccaaaggagaaaagtcgcgccactacggcgagacgaagatgaaccagcgaagctcgagaagccacacaatttttcggatgatacttgagagccgcgaaaagggggaacctagcaactgcgaggggtctgtgaaagtttctcacctgaatctggtggatcttgctggctccgaacgagctgcccaaacaggagcagcgggagtccgactgaaagagggctgtaacattaatagaagtttgtttatcctcggccaggtgataaaaaaactctctgacggccaggtgggagggtttattaactaccgggattccaagttgacacgcatcttgcaaaactcgctaggcggtaatgctaaaacccgaatcatttgtactattacccccgtctccttcgacgagaccctgaccgctttgcaatttgcatccacagccaagtacatgaaaaatacaccttatgtgaacgaggtctcaacagatgaagcattattgaaaagatatcggaaagaaatcatggacctcaagaaacagctagaagaggtttcgttggagaccagagcccaagccatggagaaagaccaactggcgcagctcttagaggagaaggaccttcttcagaaggtgcagaacgaaaaaatcgaaaatttaaccagaatgttggtcacttcgtccagtctcacactgcagcaggagctgaaggcaaagcgtaagcgccgagtgacctggtgcctggggaagatcaacaaaatgaaaaattctaactatgcagatcagttcaacatcccaaccaatatcacgaccaagacacataagttatccataaatctgctcagggaaatagatgagtccgtgtgctcagaatcagacgtcttcagcaacacactagataccctgtccgagatagagtggaaccctgcaaccaagttactgaaccaggagaacatagagtctgaattaaactccctgcgagccgattacgacaacttagtcctcgattacgagcagctgcggactgagaaggaagaaatggaactcaagctgaaggaaaagaatgacctggacgagtttgaagccctagaacgaaaaacgaagaaagaccaggagaatgagctctcgagcaaagtggaactgctgcgagagaaagaggaccaaatcaaaaaattacaagaatatatagattcccaaaaattggagaacatcaagatggacctgagctactcactggaatcaattgaagatcctaaacagatgaaacaaacgctgttcgatgccgagacggtggcactggacgccaaacgtgaatctgcattcctgagaagcgagaacctggagctcaaagagaagatgaaggagctggctaccacctacaaacagatggaaaatgacatacagctgtaccagagccagttggaggcaaaaaaaaagatgcaggtggatttggagaaggaattgcagtctgccttcaacgagataacaaaactaactagcttgattgacggtaaagtgccaaaagatctgctgtgtaatcttgaactagaaggcaagatcacagatctccaaaaggaactgaacaaagaggtggaggaaaacgaggcactgagggaggaagtcatattgttgagtgagctgaagagcctgccctccgaggtggagcgcctccggaaagagatccaggataaatcagaggaactccacatcatcacatctgaaaaggacaaacttttcagcgaggtggtgcacaaagagagccgagtccagggtttgctagaagaaatcggaaaaactaaggacgacctggcaacaacccagagcaactataagtcgaccgatcaggaattccaaaatttcaaaactctgcatatggactttgaacaaaagtataagatggtgctcgaggagaacgaaagaatgaaccaagaaattgtaaacttgtctaaggaggcccagaaatttgattcatccctcggcgcactgaagactgagttgagctacaaaacccaggagctacaggagaaaacacgggaggtccaggagcggctgaacgagatggagcagctcaaggagcagctcgaaaaccgcgatagtaccctgcagaccgtggaaagggagaaaaccctgatcactgagaaactccagcaaaccctagaggaggtgaagacgttgacccaggaaaaggacgaccttaagcagctgcaagaatctcttcagattgaacgtgatcaacttaaatccgacatccacgataccgtgaatatgaacatcgatacacaggaacagcttagaaatgccctcgagtcacttaagcaacatcaggagaccatcaacacactgaagtcaaagatcagcgaagaggtttctagaaatctgcatatggaagagaatacaggagagaccaaggatgagtttcagcagaaaatggtggggatcgacaaaaagcaagatctggaggcgaagaatacacagacactcacagctgatgtgaaagataatgaaatcatcgaacaacagcgcaaaatcttttctctcattcaggagaaaaacgaacttcagcaaatgctggaatctgtgattgctgaaaaggagcaactcaaaacggaccttaaggagaatattgagatgaccattgaaaatcaggaggagcttaggctgctaggtgatgagctgaagaagcagcaagaaattgtggcccaggaaaaaaatcacgctattaaaaaagagggcgaactgtcacggacatgcgacagactggccgaagttgaagagaaactcaaggagaaatctcagcagctccaggaaaagcaacagcagctactgaacgttcaagaggagatgagtgaaatgcaaaaaaagatcaatgagatagagaacttaaaaaacgagctaaagaacaaggaactgactctggagcacatggagacggagcggctggaactggcacagaaacttaatgagaactatgaggaggtgaagagtatcactaaggagaggaaggtgcttaaggagctccagaagtccttcgaaaccgagcgggatcatttgaggggatatattagggagattgaagccactgggctgcaaaccaaagaagagctgaaaattgcccatatccacttaaaagaacatcaggaaaccatcgatgagcttcgcagatcagtttccgagaaaacagcacagatcataaatacccaggacctggaaaagagtcataccaagctgcaagaagaaatccccgtacttcacgaggaacaggagctcctgccaaatgtcaaggaggtttccgaaacacaggaaacaatgaacgagcttgagctgttgaccgaacagtctaccacaaaggactctactacgttagcgagaatcgaaatggagcgactgagactgaacgaaaagttccaggaatctcaggaagagatcaagagtttaacaaaggaaagagataaccttaagactatcaaagaagccctagaagtcaagcacgaccagttaaaggaacatatacgcgagaccctagccaagattcaggaatcccagtctaaacaggaacagtcgcttaacatgaaggaaaaggataacgaaactacaaaaatagtcagcgagatggaacagtttaaacctaaggattcagccctgcttcgtatcgaaattgagatgttgggtctgagcaagcgtctccaggaatcccatgatgaaatgaagtccgttgcaaaggagaaggacgatttgcagagactgcaggaagtactgcagtcagaaagcgatcagctgaaggagaacattaaagaaatagtcgcaaaacacctggaaaccgaagaagagcttaaggtcgcacattgttgtctcaaagaacaagaggagactatcaacgagttacgcgtaaacctgtcagagaaagagaccgaaatttccacaatccaaaagcagctggaagccattaatgacaagcttcagaacaagatacaagagatttatgaaaaggaagaacagttcaacatcaagcagatttctgaagtgcaagagaaagttaacgaactgaaacagttcaaagaacatcgtaaggcaaaggattccgctctacaatccatcgagagtaagatgctcgagttgaccaatcgcttacaggagagccaggaggagattcagatcatgataaaagagaaagaggaaatgaagcgagttcaggaggctttacagattgagagggatcaactgaaagagaacaccaaagaaattgtcgccaagatgaaagaaagccaggagaaagagtatcaattcttaaagatgacagcggtcaatgaaacgcaagaaaagatgtgcgaaattgaacacctgaaagaacagtttgaaacccagaagctcaacctggagaacattgagaccgagaacatccggttgacccaaattctgcatgaaaatctggaagagatgcgatctgtcaccaaagagagagacgatcttaggtctgtagaggaaactctgaaggttgagcgggatcaactcaaagagaacctgagagagactattacaagggacctggaaaagcaggaggagctgaagatcgttcacatgcatctgaaagagcatcaggagacgatcgataaactcagggggattgtttctgagaagaccaacgaaatcagtaatatgcagaaggatttggagcacagcaacgatgctttaaaagctcaggatcttaaaatccaggaagagttaagaatcgctcatatgcacctaaaggaacaacaagaaacgatcgataagctccggggaatcgtgagtgaaaagacagataagctgtcaaacatgcagaaggaccttgagaacagcaacgcaaaactccaggaaaagatccaagagttaaaggcgaacgagcaccagctgataacactaaaaaaggatgtcaatgaaactcagaagaaagttagtgagatggagcagttaaaaaagcagataaaggatcagtccctgacactatcaaaactggaaatagagaacttgaatttagcacaaaaactgcatgaaaacctggaagagatgaagagcgtaatgaaggaacgcgacaaccttcgccgagtcgaggaaactctcaaacttgaacgggaccaactcaaagagagtttgcaggagacaaaggcaagggatctcgaaattcagcaagagctgaagacggccagaatgttgagcaaggagcataaagagacggtggacaaactcagagagaaaatatctgaaaaaacaattcagataagtgacattcagaaggacctggacaaatccaaggatgagctccagaaaaagcaggatagacagaatcatcaggtgaagcccgaaaaacgacttctctccgatggtcagcaacacctgactgaatctttgcgtgagaaatgcagcaggattaaggaactcctaaagcggtactcagagatggatgaccactatgagtgcctcaacagactgtctctggatctcgaaaaggagatagagtttcagaaggagttgagtatgagagtcaaggccaacctgagtctcccttatctgcagactaagcacatcgagaagctgtttacggccaaccagcgctgctctatggaatttcaccgcatcatgaagaaattgaaatatgtgcttagttatgtgactaaaataaaggaggagcagcacgagtccataaacaagttcgagatggacttcatcgatgaggtggagaagcaaaaagaattgttaattaagatccagcatctgcagcaggattgtgacgtgccttcgcgcgaactacgtgatctgaaattgaatcagaatatggaccttcatatcgaggaaatcctgaaagatttctctgaatctgagtttccgtcaataaaaactgagttccagcaggtgttgagtaaccggaaggagatgactcagttcctggaagaatggctaaacacaaggttcgatatcgaaaaactgaagaacggcatccaaaaagagaatgatcgcatctgtcaggtgaacaatttttttaacaataggattatcgccatcatgaatgaatctactgagttcgaagagagatccgcaacgatcagcaaagagtgggaacaggatctgaagtccttgaaagaaaagaacgagaagctgtttaagaactaccagactctaaaaaccagtctcgcctcaggcgctcaggtcaatcctactacacaagacaacaagaatccacatgtgacaagtagggcgacacagttgacaacagaaaagatccgggagttagagaacagtctgcacgaagcaaaagagtctgccatgcacaaggagagcaagatcattaagatgcagaaggagctagaagtgaccaacgatattatcgccaagctgcaagctaaggtgcatgagtccaataagtgccttgagaagaccaaagagacgatccaggtgttgcaggacaaagttgcgcttggagctaaaccttataaagaggagatcgaagatttaaagatgaagctagtgaagatcgatttggagaaaatgaagaacgccaaggagttcgaaaaggagattagtgcgaccaaggcgactgtcgaataccagaaagaagtcattaggctgctgcgtgagaacctcaggaggtcccagcaagctcaggataccagcgtgatctctgaacacacagacccccagccatccaacaagccactgacgtgcgggggtggctccggtattgtccagaatactaaagctctgatcctgaaaagcgagcacatcagactcgaaaaggagatttcaaagctgaagcagcagaacgaacagctcattaaacaaaagaatgaactgctgagcaataatcagcacctgtccaatgaggtgaagacatggaaagaaagaacactaaaacgggaggcgcacaagcaggtcacctgtgagaacagtcctaaaagcccgaaggttacagggacagcaagtaaaaaaaagcagattactccaagtcaatgcaaagagcggaacctgcaggaccccgtacccaaagagagccccaaatcttgttttttcgattctcgaagcaaatctttaccaagcccccaccccgtccgctacttcgataactctagtctgggcctgtgcccagaggtgcagaatgccggtgctgaatccgtagatagccagcccggtccttggcacgcttcttcaggaaaggacgtgcccgaatgcaagactcagta

SEQ ID NO: 217819 - DNA, 7037 bp, synthetic construct
  misc_feature 1..7037: note = Description of Artificial Sequence: Synthetic coding sequence
  source 1..7037: mol_type = other DNA
atggctgaggagggcgcagttgcagtgtgcgttagggtccgaccacttaattctcgcgaagaatcgcttggagagaccgctcaggtgtactggaaaaccgataataacgtgatctatcaggtagacggatccaagagcttcaactttgatcgcgtttttcacggaaacgaaaccaccaagaatgtctatgaagagatcgctgctcctatcatcgactccgccatccaaggctataatgggactatcttcgcatatggtcagaccgcttcgggaaaaacttacacaatgatgggctctgaggaccatctcggagtaattcctagagccatccacgacatcttccagaaaattaaaaaattccccgaccgggagtttctgctgagagtgtcatacatggagatctataatgagaccatcacagacctactgtgcggaacgcagaagatgaagcctctgatcatccgggaggatgtgaatcggaacgtctacgttgctgatctgacagaggaagtagtttatacttcagagatggctttgaagtggatcaccaagggggagaaatccaggcactatggggagaccaagatgaaccaacggagctcaaggagccacacaatctttagaatgatactcgaaagcagggagaagggggagccttccaactgcgagggctcagttaaggtgtcccatcttaatctggtggatttggcagggagcgaaagagctgcccagaccggggcagctggcgtgcgattgaaggagggctgcaatattaaccgatctctcttcatactaggtcaggtgatcaagaagctgagcgacggccaagttggcggtttcattaattacagagactctaagctgacccggatccttcagaattcgctgggcggaaatgcgaaaacacggattatttgcaccattactccagttagctttgacgagacactgaccgctctgcagtttgccagcaccgctaaatacatgaaaaacaccccctatgtgaacgaggtatctacggatgaagcgctccttaagagatatcgcaaagaaatcatggacttgaagaagcagctggaggaagtgagtctagaaacacgggcacaagcaatggagaaggatcaactcgcccagttgctggaggagaaagatctcttgcagaaggtgcagaacgaaaaaattgagaacctgacaagaatgctggtgacctcctcatctttgaccttacaacaggagttaaaagcaaagcgaaagaggcgcgtgacctggtgtctgggcaagattaataagatgaagaactcaaattatgccgatcagtttaatattcccacaaatataacaacaaaaactcataagctctctataaacctgctgagagagatagatgagtcagtatgttctgagagcgacgttttttctaacacccttgacacactatccgaaatcgaatggaatccagcgaccaagctcttgaatcaggaaaacatcgagtccgagctaaacagtttgcgagcagattatgacaatctggttctggattacgagcagctccgtactgagaaggaagagatggagttgaaactgaaagaaaaaaacgacttagatgagtttgaggcattagagagaaagactaaaaaagaccaggagatgcaacttattcacgaaatttcaaatctgaaaaacttggtgaaacacgcagaggtgtacaatcaggatctcgagaatgagctgtcatcgaaagttgagctgctgcgagagaaggaagaccagattaagaagcttcaggaatatatagattcccagaagttggagaatatcaaaatggaccttagctattccttggagagcattgaggatcctaagcagatgaaacagacgctgttcgacgccgagacggtcgctctagatgctaaacgggagtctgcgttcttaaggagtgagaatctggaattgaaagagaagatgaaggaactcgctaccacatacaagcagatggagaatgacatccagctttatcagagccaactcgaggccaaaaagaagatgcaagtggatctggagaaggagctgcagtctgcttttaacgagattacaaagctcacaagtctcatcgacggtaaggtcccaaaagatcttttatgcaaccttgagttggaaggcaagattactgatcttcaaaaggagttaaacaaagaggttgaagagaacgaggccctgcgtgaggaggtcatccttctgtcagaacttaagtcgcttccatcagaggtggagcgcctgaggaaagaaatccaagacaaatccgaagaactacatattatcacaagcgagaaggataagctgtttagtgaggtcgtccacaaggagtcccgcgtgcagggtttactcgaagagatagggaagactaaggacgatctggcaaccacgcagagtaattacaagtctacagatcaggagttccagaacttcaaaacactgcacatggattttgagcagaagtacaagatggtgttggaggagaacgagcgaatgaatcaggagattgtcaacctgagtaaggaagcccaaaaattcgactcttccctgggcgcactgaaaaccgagttgagctacaagactcaagagctccaggagaaaactcgtgaagtgcaggagcggctcaatgagatggaacagctgaaggagcagctggaaaaccgtgactcgaccctgcagaccgtagaaagagagaaaacactgattactgaaaagctacagcagaccctggaggaagtcaagaccctcactcaagagaaggacgatctgaaacagttgcaggagagcttgcagattgagagggaccagttgaaaagcgacatacacgataccgtgaacatgaatattgacacacaggaacagctgcgcaatgcattagagtcccttaagcagcatcaggagaccattaacactctgaaatcaaaaatctccgaagaggtctcccgcaatcttcatatggaggagaatacaggcgagacaaaagatgagtttcagcaaaagatggtgggaattgacaagaaacaagatctggaggctaaaaacacacagacacttacggccgatgtaaaggataacgagataattgagcagcagaggaagattttcagcctgatccaagagaagaatgagctgcaacagatgctggaatccgtcatcgcagagaaggagcagcttaagactgatctgaaggaaaacattgaaatgaccatcgagaatcaagaggaactgcggctactcggagacgaactgaagaagcaacaagagatcgtggcccaagagaagaatcacgccatcaagaaggagggagaactctcacgaacctgcgacagactggctgaggtagaggaaaagttgaaagagaaatctcaacagttgcaggagaagcagcagcagctgctgaacgtgcaagaggaaatgagcgagatgcaaaagaagatcaacgagatcgagaatctaaagaacgagttaaagaataaggaacttactctggaacatatggagacggaacggctagagctggctcaaaaactgaacgaaaattacgaggaggtgaaaagcatcacaaaggagcggaaagtgctgaaggagctgcagaaaagttttgagactgaaagggatcatttgcggggttatataagagagattgaggctaccgggctccagacgaaagaagagctcaaaattgcccacatccatcttaaggagcaccaggaaactattgacgaactccggagatctgtgtccgaaaagacagcccagattattaatacgcaagatctcgagaaatcccacactaagttgcaggaagagatccccgttctccatgaagagcaggaacttctacccaatgtaaaggaagtgagcgaaacccaggaaacaatgaatgagttagagctgctgacagaacaatcaacaaccaaggattctacaacattggccagaattgaaatggagagactgcgactcaatgaaaaattccaggagtcgcaggaggagattaaatctctcaccaaagagcgcgataatctcaagaccataaaagaggccctcgaagtgaaacatgatcagctcaaagaacatattcgcgaaacgttggccaagattcaagagagtcagtccaagcaggagcagtccctgaatatgaaagagaaggataacgagacaaccaagattgtgagtgaaatggagcagtttaagcctaaagactctgcactgctgaggattgagatcgaaatgcttgggttgagtaaacgcctgcaggagtcacacgatgaaatgaagtcagttgctaaagagaaggacgatcttcagcgcctgcaggaagtcctccagtctgaatctgatcagttgaaagagaacattaaagagattgtcgcaaaacacctggaaactgaggaggagttaaaggtagcacattgttgtcttaaggagcaggaagagacaattaatgaactcagggtcaatctgtctgaaaaggaaaccgagatcagcaccatccagaaacagctagaggccatcaatgacaagttgcagaacaaaatccaagaaatatacgagaaggaagagcagttcaacattaaacaaattagcgaagttcaagagaaggttaatgaactgaaacagtttaaggagcaccggaaggcaaaagattccgctttgcaatctatcgagtccaagatgctggagctgactaatcgactccaggaatctcaggaggaaattcagatcatgatcaaggaaaaggaggagatgaagagagtgcaggaggccttacaaatcgaaagagaccagctgaaggagaacactaaggaaatcgtagctaaaatgaaagaaagccaagaaaaggagtaccagttcctgaaaatgaccgccgtgaacgaaactcaggaaaaaatgtgtgagattgaacatctgaaggagcaattcgagacacaaaagttgaatcttgagaatatcgagactgagaatattcggctcacccagatcctccatgaaaacctagaggaaatgcgcagcgttacaaaagaacgtgatgacctgcgatccgttgaggagacccttaaagtggagcgcgaccagcttaaggaaaacctcagggagacaatcactcgggatctggagaaacaggaggaattaaagattgtgcacatgcacctgaaagagcaccaggagacaatcgacaagttgcgcggtattgtctctgagaagacaaatgaaatctcaaacatgcaaaaagacttagagcattcaaacgatgcgctaaaagctcaagacctaaagattcaagaggagctgcgcattgcgcacatgcatctcaaggagcagcaagagaccatcgacaaactccgtgggattgtttccgaaaaaaccgacaagctgtctaacatgcaaaaggacctggaaaacagcaatgcaaagctgcaggaaaagatccaggagctgaaagccaacgagcaccagctgatcacattgaaaaaggacgttaatgaaacacaaaaaaaggtcagcgagatggaacagctgaagaaacaaatcaaagaccaatctctgaccctatctaagctcgaaattgaaaacctgaacctggctcagaagttacacgagaacttagaagaaatgaaatccgtaatgaaagagagggataacctgcgcagggttgaggaaaccctgaaactagaacgggaccagctcaaagagtccttacaagaaacaaaagccagagacctggagatacaacaagaattaaaaactgccaggatgctgtcaaaagaacacaaagaaaccgtggacaagttgagggagaaaatttctgagaagaccattcaaattagcgacatccaaaaagacttggataaatccaaggacgaactacagaagaaaatccaggaactgcaaaaaaaggagcttcaactgctgcgggtgaaggaggacgtgaacatgagtcacaaaaagatcaatgagatggaacaactcaagaagcagtttgaggcgcagaatttgtcaatgcagtccgtacgcatggataattttcagctgacaaaaaagctccatgagtccctggaggaaattagaatcgtggccaaggagagggatgaactgcggcgaatcaaagaatctctcaaaatggagagagatcagttcattgccactctccgcgagatgattgctcgagaccggcagaaccatcaggtcaaaccagagaagaggctgttgagcgacggccagcaacatttgaccgaatccctccgtgagaagtgctctcggatcaaagaactcctcaagcggtacagcgagatggacgatcattacgaatgtctgaaccggctttccctggatctcgaaaaagagattgagtttcaccggatcatgaaaaaactcaaatacgtgctatcctatgttaccaaaattaaggaagagcagcacgagtcaattaataagttcgagatggatttcatcgatgaagttgaaaagcagaaggaacttcttatcaaaattcagcatctccagcaggactgcgacgtaccttccagggaattgcgcgacctgaagctcaaccaaaacatggacctccatatagaagaaatcctgaaagattttagcgagtcagaatttccatccattaagactgagtttcaacaagtgctgtcaaacagaaaggagatgacgcagtttctggaagagtggctcaacacccgtttcgacatcgaaaagttaaagaatggtattcaaaaggaaaacgatagaatttgccaggttaacaatttttttaacaaccggatcatcgcaattatgaatgaatctactgagttcgaagaacgaagtgccaccatcagcaaggaatgggagcaggatcttaagagtctgaaggaaaagaatgaaaagctgttcaaaaattatcagactctcaagacctcactggcttcaggcgcacaggtgaatcctactacccaggataacaagaaccctcacgtgacaagcagagcaacccagttgactaccgagta

SEQ ID NO: 217820 - DNA, 9344 bp, synthetic construct
  misc_feature 1..9344: note = Description of Artificial Sequence: Synthetic coding sequence
  source 1..9344: mol_type = other DNA
atgtcctgggctctggaggaatggaaggagggtctccccacgcgagccctgcaaaaaatccaggagctagaggggcagctcgataaactgaagaaggaaaaacagcagaggcagtttcagctggattctctggaggccgcattacagaaacagaagcagaaagtggaaaacgagaagacagaagggacgaaccttaaaagagaaaaccaaaggctgatggaaatctgcgagagtctagaaaaaactaagcaaaaaattagccacgagctccaggtgaaggagtcacaagtaaactttcaggaagggcagctgaactcgggcaagaagcagattgagaagctggagcaggagctaaaaaggtgtaaatccgagctagaacgtagtcaacaggccgctcagtcagcggacgtgtcactgaacccatgcaataccccccagaaaatttttactacgccgttaaccccatcccagtattattccggcagcaaatatgaggatctcaaggagaagtataataaggaggtggaagaacgcaaaagactcgaggcagaagtaaaggccctccaagccaagaaggctagccaaacacttccacaagccaccatgaaccatcgggacatagcacggcatcaagcatcctcaagtgttttcagctggcagcaggaaaagacccctagccatctttcatccaatagccaacgcaccccaattaggcgggatttctccgccagctatttcagtggtgagcaggaggtcaccccctctcggagtactttacagatcggaaagagggatgctaactcatccttttttgacaacagcagttccccccacctgctggatcagctgaaagcccaaaatcaggaactgcgaaacaaaatcaacgagttagagctgagactgcaggggcatgaaaaagagatgaaaggtcaggtgaacaagttccaggagctgcaactccaacttgaaaaagccaaagtggaattaattgaaaaggagaaagttcttaataagtgccgcgacgaactcgtcaggacaaccgctcagtatgaccaggccagtacaaaatatacagccttggagcagaaactgaaaaagttgacagaggacctctcctgccagcgccagaatgctgagtccgcgagatgttccttagagcagaaaattaaggagaaggagaaagagtttcaggaagagctgtcacgccagcaacgaagtttccagactttagatcaggagtgcatccaaatgaaggcacgtctgacacaggagctgcagcaagcaaagaacatgcacaatgtgctacaagccgaactggataagctgaccagcgtgaagcagcagctggagaacaacttagaggagtttaagcagaagttgtgcagagctgaacaagcctttcaggcgtcccagattaaggaaaatgaattaagaaggtcaatggaagaaatgaagaaggagaacaatctgctgaaatctcactccgagcagaaagcacgggaagtctgtcacttagaagcagagttaaaaaacatcaaacagtgtctgaatcagtcgcagaactttgccgaggagatgaaggccaaaaatacttctcaggagacgatgctgcgcgatcttcaggaaaagataaaccagcaggaaaactccctgaccctggaaaagttgaagctcgccgtggccgacctagagaagcagagggactgttcccaagacctgcttaaaaagagggagcaccatatagagcagctgaatgacaagctgagcaaaacagagaaggagtccaaggccctcctgtcagccctggagttgaagaagaaagagtatgaggaattaaaggaggagaaaacccttttttcttgttggaagagtgaaaacgagaaattattaacacaaatggaatccgagaaggagaatctgcaatccaagataaatcacctcgaaacttgcctgaagacccaacagataaagagtcacgagtataatgagcgagtgcgaaccttggaaatggatcgggagaatctgagtgttgagatccggaatctccataacgtgttggactcgaaatcggtggaagtggagactcagaagctcgcctacatggagctacaacagaaggccgaattcagcgatcaaaaacaccaaaaagagatcgagaatatgtgccttaaaactagccagctgactggacaagtggaggacttggaacacaaactgcagctactcagtaacgaaatcatggacaaggatagatgttatcaggacctgcatgccgagtatgagtcactgagggatcttctcaaaagcaaagatgctagcctggtgactaatgaggatcatcagcggtcactactcgcgttcgaccagcagccagccatgcatcactcctttgcaaacataatcggagagcagggctccatgccttcagaacggtccgagtgccgccttgaagctgatcagagcccgaaaaattctgctattcttcagaaccgcgttgacagcttggagttcagcctcgaaagccagaaacagatgaactccgatctgcaaaagcagtgcgaagagcttgtccagatcaaaggcgagatcgaagagaacctcatgaaggccgaacagatgcatcaaagctttgtggccgaaacttctcagagaatctcgaaactgcaggaggacacctcagctcaccagaatgtcgtggccgagaccctcagtgctctcgagaataaagagaaagaattacagttgctcaacgataaggtggagaccgagcaggcagagatccaagagctgaagaagtctaatcatcttctcgaggactcattgaaggagctgcagcttctgagtgaaacattgtctctggaaaaaaaggagatgagctccataattagtctgaacaagcgcgagatcgaagaacttacccaagaaaacggcacactcaaggaaataaacgcgtccctcaatcaggaaaaaatgaatcttatccagaagtcagagtcctttgcaaactacatcgacgagcgcgaaaaatctatctctgaactgtctgaccagtacaagcaggaaaaattgatcctattacagaggtgtgaggagacgggaaacgcttatgaggacctgtcacagaaatataaggcagcccaggagaagaattcaaagctggagtgcctactcaacgaatgtacctctttgtgcgagaatcgtaagaatgaacttgagcagctaaaagaagcttttgcgaaggagcatcaggagtttcttaccaagcttgcattcgctgaggagcgcaaccagaacttaatgctggagctcgagacggtccagcaggccttgaggtctgagatgacagataatcaaaacaactctaaaagcgaggccggaggactgaaacaggaaatcatgacattgaaggaggaacaaaacaaaatgcagaaggaagtgaatgatttactccaagagaatgagcaacttatgaaagtgatgaagacaaagcacgagtgtcagaacctggaaagcgagccgattcggaattcggtgaaagaaagagagtctgaacggaaccagtgcaacttcaagccccaaatggacctggaggttaaagagataagcctggactcttataatgcccagctggtgcaattggaggcgatgctgagaaacaaggaactcaagctgcaggagtcagaaaaggaaaaggaatgcttgcagcacgagctgcagacaatccggggagacttggagaccagcaacctgcaggatatgcagtcacaggagatctcaggccttaaggactgtgaaatcgatgcagaagaaaaatatatcagcggaccgcacgaactcagcacatctcagaacgataatgcacacctgcagtgttcactgcagaccacaatgaataagctgaatgagctagaaaagatctgcgaaatccttcaggccgagaagtacgagctggtgaccgagctcaacgatagtcgatccgagtgcataactgcaaccagaaaaatggcggaagaagtcggcaaactgctcaatgaagtcaagatcctgaacgatgacagcgggctgcttcacggtgagctagtggaggacataccaggcggagagttcggggagcagcctaacgagcagcacccagtcagtttggctcctctggacgaatcgaactcctatgagcaccttacgcttagcgataaggaggttcagatgcactttgctgagctccaagagaagttccttagtctgcagtctgaacacaagatcctgcatgaccagcactgtcaaatgagctcgaaaatgtcagaactacaaacctacgtggattcactcaaggctgagaatctggtgctaagtaccaacctgcgcaactttcaaggagacctggtgaaggaaatgcagcttggccttgaagaggggctggtgccaagtctgagcagctcatgtgtgcccgattcttccagcctgtctagtcttggcgattcttctttttacagagcgttacttgagcagacaggagacatgtcgttgctctccaaccttgagggggcagtcagcgcgaaccagtgctccgtggatgaggtattttgttcttctctgcaggaggagaacttgacacgcaaggagacacctagtgctcccgctaagggggttgaagagctggaatcgttgtgcgaagtctatagacagtctttggaaaagttagaggagaagatggaaagtcaaggaattatgaaaaataaggagatacaagagctggagcagcttctctctagcgagcgacaagaactggactgcctccggaaacagtacctgtccgaaaacgaacagtggcagcaaaaactgacttctgtcacactggaaatggagtcgaaactagccgcagaaaaaaagcagaccgagcagctgagcctcgaactggaagtagctagacttcaactgcagggactggatctttctagccgctctttgttgggcatagacacagaggacgcgattcagggccgaaatgagagctgtgacatttccaaggagcacacttctgagacgaccgagagaacacccaaacatgacgtgcatcagatctgcgacaaagacgcacagcaagatctcaatctggatatcgagaaaatcaccgaaactggcgcagtgaagcctaccggagaatgtagtggagagcagtctccagatacaaactatgaacctccgggagaggataaaacacagggctcaagtgagtgcatctccgaactgtccttttcaggccctaacgcgcttgtgcctatggacttccttgggaaccaggaggatatccataacttgcagttaagagtcaaggagacctctaatgaaaatctgaggttactacatgtgatcgaggacagggatcgcaaagtcgagtccctgctgaatgagatgaaggagctcgattccaaactccacctgcaggaagtccagttgatgactaagatcgaggcctgcatcgaattggagaagatagtcggtgagttgaaaaaggagaattcagatctgtcggagaagctcgagtactttagttgtgaccatcaagagcttctgcaacgtgtggaaaccagtgaaggtctcaacagcgatctggaaatgcacgccgataagagttccagggaggacatcggcgacaatgtggctaaagtaaacgattcctggaaggagaggttcctagacgtggaaaacgaactttctcgaatcaggtctgagaaggcatctatagaacatgaagccctgtatcttgaggccgatcttgaagtggtgcagactgagaagttgtgccttgaaaaggataacgagaataagcagaaagtgattgtgtgtctggaagaggagctctcagtggtgactagcgagcgcaaccaactcaggggcgagctggatacaatgtcaaagaagactacagcccttgatcagctttcagaaaagatgaaagagaaaactcaagagctggaaagccaccagtccgaatgtctccattgcatccaagtggctgaggccgaggtaaaagaaaagaccgagctcctacagaccctaagcagtgatgtgtcagagctgttaaaggacaaaacacacctccaagagaagctccaaagcctggagaaagacagccaagctctgagcctcacaaaatgcgagctggaaaatcagatagctcagctgaataaggagaaggaattactggttaaagagagtgagtcgttacaggccaggctgagcgaatccgattacgagaaactaaatgtgtcgaaagcactggaagctgctctcgtggagaaaggtgaattcgccctaagactaagcagcacccaagaggaggtccaccaactccgcaggggtatagagaaacttagggtcagaatcgaagccgacgagaagaaacagctgcacatcgccgaaaagttgaaagaacgggaacgagagaacgactcactcaaagataaggtggagaacctggagcgcgaactccagatgtccgaggagaaccaggaactagtgatactcgacgcagaaaactcaaaggcagaagtggaaactttgaaaactcagatcgaagaaatggcaaggtctctaaaagtgttcgagctggacctggtcacactgcgcagtgaaaaagagaatctgaccaaacagatccaggaaaaacagggccaattgtccgagctggacaagctgctgagctccttcaaatcactactggaagaaaaggaacaggccgagatacagatcaaagaagaatccaagactgccgtagaaatgctgcagaaccaattgaaggagctgaatgaagctgtcgcagcactctgtggtgatcaagaaatcatgaaggctaccgaacagtcactggacccccctattgaagaagagcaccagttgcgaaattcaatcgaaaaattacgtgctaggctggaggcggacgagaagaaacagctttgcgtgctgcagcaattgaaagagtcggagcaccacgctgatctcctgaagggacgagttgaaaacctggagcgtgagttagaaattgctaggactaatcaggaacacgccgcattggaggcagagaactccaaaggcgaggttgaaactctaaaagcaaaaatcgagggaatgacccagagtttacggggactggagctagatgtggtcacaatcaggtcagagaaggagaatctgactaacgagctccagaaggagcaggaacgcattagtgagctagagataatcaattcgtcgttcgaaaatatcctgcaggagaaggaacaggagaaggtgcaaatgaaggagaagagcagcacagcgatggaaatgctgcagacccaattgaaggagctgaatgaaagggtcgctgcactccacaatgaccaggaggcttgcaaggcgaaggaacagaatcttagctctcaggtagagtgtcttgaattagagaaggctcagctgctccagggcctcgacgaggcgaagaacaattacattgtgctgcaatctagtgttaacggtcttatacaagaagttgaggacggaaagcagaagctggaaaaaaaggacgaagaaatctctcgcctcaaaaaccaaatccaggatcaagagcagctggtgtccaagctctcccaggtagagggagagcaccaactttggaaagagcagaaccttgaactgcgcaacctgaccgttgagctggagcagaaaatccaggtgctgcagagcaaaaacgcttcattacaggacaccctggaagttcttcaatcgtcctataaaaacctcgagaatgagctggagctcactaaaatggacaaaatgagctttgtggagaaggtcaacaaaatgactgccaaggagactgagctgcaacgcgaaatgcacgaaatggctcagaagaccgccgagctgcaggaggaactgtccggcgagaagaaccgattagcaggggaactacagttgctgctcgaggagatcaaaagcagcaaggaccaactgaaagagctgacgttagagaacagtgagctgaaaaagagtctggattgcatgcacaaagatcaagtggagaaagagggtaaggtgcgggaggagatagctgagtaccagttacgcctgcacgaggctgagaaaaagcaccaagctctgctgttggacacaaataagcagtacgaggtagaaattcagacatatagagagaagctcaccagcaaagaggaatgtctgtctagccaaaaattagaaatcgacctgctgaagtcatctaaggaggagctgaataattctctgaaagcaaccacacagattctggaggagctgaagaagaccaagatggataacctaaaatacgtgaaccaactaaagaaggagaatgaacgtgcccagggaaaaatgaaacttctgatcaagtcgtgcaagcagctagaagaggagaaagagatcctgcaaaaggaattgtctcagttacaggcagcccaggaaaaacagaagacaggcaccgtaatggataccaaagtggatgaactcactaccgaaataaaagagctcaaagaaactctggaagaaaagacaaaagaggccgatgaatatctggataaatactgcagccttctaatctctcatgaaaagttggaaaaagccaaagagatgttagagacacaggttgcccatttatgtagccaacagagcaaacaggacagtcgcggttcacccctgctgggcccagttgtgccagggccaagccctatcccgagcgtcaccgagaagagactgagtagcggccagaacaaagcttcaggtaaacggcagcggagttctgggatctgggagaacggacgcggacccacacctgcgaccccggaaagcttcagcaagaagtccaagaaagcagtcatgtcaggaattcaccccgctgaagataccgagggcactgaatttgagcccgagggcttaccagaggtggtaaagaaaggctttgccgacattccgaccggtaagacctccccctacatcttgcggagaactaccatggctacgcgcacatcaccacggctcgctgcccagaaactggccctaagccctctttcactgggtaaggagaacttggccgagtcgtccaaacccaccgccggaggctcacgatcgcaaaaagtgaaagtcgcacaacggtccccggtggattcaggaaccattctaagggagcctacaacaaagagtgttcccgtgaacaaccttccggagaggtctcccaccgacagtcccagggaaggcctgagagtgaagcgtggaagactggtgcccagcccaaaagcgggactggaaagcaatggcagtgaaaattgtaaggtccagta

SEQ ID NO: 217821 - DNA, 528 bp, synthetic construct
  misc_feature 1..528: note = Description of Artificial Sequence: Synthetic coding sequence
  source 1..528: mol_type = other DNA
ctcatgattaaaggccgaaaggggaaagtgaataagatgacagcaaaggagacggaactccagagagaaatgcacgagatggcgcagaaaaccgcggagctccaggaggagctctccggagagaagaacagattagccggtgaattgcagttgctgttagaagaaattaaaagctctaaggaccaactgaaagaactgactctggaaaacagcgagctcaaaaaatccctggattgtatgcataaggaccaggtcgaaaaagagggaaaggttagggaagaaatcgccgaatatcagcttcgcctgcatgaagccgagaagaagcaccaggcattgctccttgacacaaacaagcagtacgaagtcgagatccagacgtacagagagaagctgacctccaaggaggagtgtttatcctcacagaaactcgagatcgatctgctgaaaagctccaaagaggagttaaataactctctgaaagcaacgacccaaatattggaagagctgaaaaagaccaaggaaaattag

SEQ ID NO: 217822 - DNA, 4017 bp, synthetic construct
  misc_feature 1..4017: note = Description of Artificial Sequence: Synthetic coding sequence
  source 1..4017: mol_type = other DNA
atgtttttgatgcccacttctagtgagctgaactccgggcagaactttcttacccaatggatgaccaatccatcaagagccggagtgattcttaataggggattcccaatacttgaagctgacaaggagaaacgtgccgcagttgatatctcgacatcctttcctattaagggcacccatttttcagattcctttagcttcatcaatgaggaggattctttactcgaggagcagaaactggaaagcaacaacccctacaagcctcagtctgataagagtgaaactcacacagctttcccttgcattaaaaagggtccacaagtggctgcctgtcattccgcacctggacaccaggaggagaacaaaaacgactttattccagatttggcctcagagtttaaggaaggagcttacaaggacccattatttaaaaagcttgaacaactgaaggaggttcagcagaaaaaacaggaacaattaaagcggcagcaactggagcagctgcagaggctaatggaagagcaggagaaactcctcaccatggtcagtggccagtgtacgctgcccggtcttagcctgttgccagacgatcaaagccagaagcataggtcacccggtaatacaaccaccggagagcgggcaacatgttgtttcccatcttacgtgtaccctgatccaacccaggaagagacctaccccagcaacatcctctctcacgaacagagcaatttttgtcgcaccgcacatggcgactttgtgctgactagtaaacgggcttcccctaacctgttttcagaagcccaataccaggaggccccagtggaaaagaacaatctgaaggaagaaaaccggaatcaccccaccggagagtctattctctgttgggagaaagtgaccgaacagatccaggaggctaacgacaagaaccttcagaaacacgacgattcctcagaggtggccaatatcgaagaacggcctattaaagccgctatcggagaacggaagcagaccttcgaggattacctggaagaacaaatccagctggaggaacaggagctgaagcaaaagcagttgaaggaggccgaggggccactgccgatcaaagccaagcccaagcagcccttcctgaaaaggggggaaggcctcgcaagattcactaacgctaaaagtaagttccagaagggtaaggaaagtaagctggttaccaaccaatccacgtcagaggaccagcccctttttaagatggatcgacagcaactgcagcgcaagactgcccttaaaaacaaggagctttgcgcagacaacccaattttaaaaaaagatagcaaagccagaaccaaatccggctctgttacactgtcacagaagccaaagatgctgaagtgctcgaatcgtaagtccttatctcctagcggccttaagatacagactggaaagaagtgcgacggccagtttcgtgaccaaataaagttcgaaaacaaggtcacttccaacaataaagagaacgtcaccgagtgccccaagccgtgcgatactggctgtacggggtggaataaaactcaggggaaagaccgcctgccattgagcactggccctgcttcccggctagccgcaaaaagtccaatccgcgagaccatgaaggaaagtgagtctagtttggatgtgtctctccagaagaagcttgagacgtgggagcgggaaaaagagaaggaaaatctggaactggacgagtttctgttcctcgaacaggcagcggacgagatcagtttttcctctaattcttccttcgttctgaagatattggaacgtgatcagcagatttgtaaaggccacagaatgagctcgacccccgtcaaagcagtccctcagaaaacaaaccctgcggaccccatttcccattgtaatcgcagcgaagatctcgaccatactgcacgtgaaaaggagagcgagtgcgaagtcgcgcctaaacagctgcactctctgtcttctgctgatgaattgcgagagcagccctgcaagatccgaaaggcagtgcagaagagtactagtgaaaaccagactgaatggaatgctagagacgatgaaggagttcccaattctgattcctcaaccgacagcgaggagcagctggacgttacaattaagccttcaaccgaagaccgagaacgaggaatctcatcccgcgaggatagcccacaagtgtgtgatgataaaggaccctttaaagacaccagaacacaggaagataaaaggagagacgtcgacctggacttgtcagataaagattattcctctgacgagtcaatcatggaaagtataaaacacaaagtgagtgagcccagcaggtctagctctctttccctctcgaaaatggacttcgacgatgagcgaacatggactgacctcgaagagaacctatgtaaccacgatgtggtcctgggaaacgagagcacctacggcaccccacaaacgtgttatccaaacaatgagatcggcatattagataagaccatcaaacgcaaaatcgctcctgtaaaacggggagaggacctgtcaaagagtagaaggagccggtcgcctcccactagtgagttgatgatgaaattctttcccagtctgaagccaaagcctaagagtgattcacatctggggaacgagctgaaacttaatatctcacaggatcagcccccaggtgataacgccaggtcacaagtactgagggagaagattatagaactggagacggaaatcgaaaagttcaaggccgaaaatgcatctttagcgaaactgcgcatcgagcgggagagcgcactcgagaaactcagaaaggagattgcggattttgagcagcaaaaggcgaaggagctggctaggatcgaggagtttaaaaaggaagaaatgcgcaaacttcagaaagagcgcaaggtgttcgaaaagtacacgaccgcagccaggacttttcccgataagaaggaacgggaggagatccagactttaaagcagcagatcgcagatctcagggaagatttaaagcgcaaagaaactaagtggtccagcacccattccagactgcgctcccagatccagatgttggtgcgcgagaatactgacctccgagaagaaattaaggttatggagagatttaggcttgacgcatggaaaagagcagaggccatagagagcagcctggaagtggagaagaaagacaagctcgcaaacacctcggtcagattccagaatagccagatatccagcgggactcaggtcgagaagtacaagaaaaactaccttcccatgcaaggaaatcccccaagaaggtccaagagcgcccctcctcgggatctgggaaacctggataagggccaggcagcctcccctcgggagcccctggagccactcaatttcccagaccctgaatacaaggaggaggaagaagaccaagatatacagggagaaatcagccaccccgatggcaaagtggagaaagtttacaagaacggttgccgagtcatactcttccccaacggaactcgcaaggaagtcagtgcagacgggaagacaataacggtaacctttttcaatggcgatgtcaaacaggtcatgccggatcagcgcgtgatttattactatgccgctgcccagaccacgcacaccacttaccctgagggcttggaagtcttgcatttttccagcggtcaaatcgagaaacactatccagacggacgcaaagaaattacttttccagatcaaacagttaagaatctgttccccgatggccaggaggaaagtatttttccggacggcaccatagtgcgggtccagagagacgggaataagctgattgagtttaataatggacaacgtgaactacacacagcccagtttaagcgaagggaatatccagacggaacagtgaagaccgtttacgcaaatggacaccaagagacgaagtaccgctctggacgaataagagttaaggacaaggaaggcaacgttttaatggacactgagttgtag

SEQ ID NO: 217823 - DNA, 3411 bp, synthetic construct
  misc_feature 1..3411: note = Description of Artificial Sequence: Synthetic coding sequence
  source 1..3411: mol_type = other DNA
atgtttctgatgcccaccagctccgagctgaatagcggccaaaacttcctgacccaatggatgaccaacccttctagagccggtgtcatcttaaatcgaggcttcccaattctcgaggccgacaaagagaagagggccgctgtggacattagtacttcttttccaattaagggcactcatttttccgacagcttctcctttatcaatgaggaggactccctgctggaagaacagaaactggaatcaaacaacccgtataaaccacagtctgataagagcgaaacacacaccgcgttcccctgtattaagaagggtccacaggtcgcggcttgtcattccgctccaggccaccaggaagaaaacaaaaacgatttcattcccgatttggcaagtgaattcaaggagggagcatacaaggacccgctgttcaaaaaactcgaacaacttaaggaggtccagcagaaaaaacaggaacagctcaagcggcagcagctggaacagctgcaacgcctgatggaagagcaagaaaagttactgacaatggtgtccggacaatgcaccctcccaggcttgagtctcctacccgatgaccagtcccagaaacacaggagtcccggaaatactacaaccggcgagcgggcaacttgctgctttccctcctacgtgtaccctgatccaacccaggaggagacatatccatctaatatcttatcccacgaacaaagtaatttctgccgtacagcccacggtgattttgtcttgacctctaaacgcgcaagcccaaacctgttttcagaggcccaataccaggaagcacccgtagagaagaataacctcaaagaggaaaatagaaaccatccaacaggtgagagtatcctgtgctgggaaaaagttactgaacaaatacaggaggcaaatgacaaaaacttacaaaaacatgatgactcaagcgaagttgcgaacatagaggagaggcctatcaaggcagctataggcgaacgaaagcagactttcgaagactatttagaagaacaaatccaactggaagaacaggaactgaagcagaagcagcttaaggaagcagaaggccctctgcctattaaagccaaaccaaagcagccctttctgaagcgcggtgaaggcctcgcgcgatttaccaacgctaagtctaagtttcagaagggtaaagaatccaaactggtgaccaatcaaagtacatcagaggaccagcccctgtttaagatggatcgacagcaactgcagagaaagacggcattgaagaataaagagttatgcgcagataaccccattttaaagaaagacagcaaagcgcgtacaaaatctgggtccgtcaccttaagccagaaacctaaaatgctgaaatgctccaaccgtaagtcactgtcaccctcaggccttaagatacagacaggcaaaaaatgcgatggtcagttcagagaccagataaagttcgagaacaaagtgacttcaaataacaaggagaatgtcactgagtgtccaaaaccctgcgatacaggttgtacaggttggaacaagactcagggaaaagacaggctgccactgtctactggacctgcttcccgtctggcagccaagtcaccgatccgggagaccatgaaggaatcagagtcttctctggatgtctctttacagaagaagctcgaaacctgggagagggaaaaagagaaagaaaacctggaactggacgaattcctattcctcgaacaggctgccgacgagatctcttttagcagcaatagttcttttgtgctgaaaattttggagcgcgaccagcaaatatgtaaaggacacagaatgtcatcaacccctgtgaaggctgtgccccagaaaaccaacccggctgatccaatttcacactgcaatagatccgaggatctcgatcacaccgcgagagaaaaagagagtgagtgcgaagtagctccgaaacagctgcactctcttagcagtgccgacgagttgcgagagcagccctgcaaaattagaaaagctgttcagaaatcaacttctgaaaaccagacagaatggaacgccagggatgatgaaggcgtgcccaacagcgacagctccactgactcggaagagcagctggacgtcacgatcaaaccgtccactgaggatcgagagaggggaatctcaagcagagaggatagtccccaggtgtgcgatgacaaagggcctttcaaggacacgcgcactcaggaagacaagcggagggacgtggatcttgacctgtccgacaaagactactcctccgacgaaagtatcatggagtctatcaagcacaaagtcagtgaaccgagtaggtcatccagccttagtctatcgaagatggatttcgatgacgagcgcacatggacagacctagaagaaaatttgtgcaatcatgacgtcgttctgggcaatgaaagcacatacggcactcctcagacatgctatccaaacaacgaaatcgggatacttgataagactattaagcggaagatagcccctgttaaacgtggtgaggatctaagcaagtcaaggcggagccgctctccccctacatccgagttgatgatgaaattcttcccttccctgaagccaaaaccgaaaagcgacagccacctgggcaatgaactgaagttgaatatatcacaggatcaacctccaggggacaacgcaaggtctcaagttttgagggaaaaaattatcgagctggagacagaaatagagaagtttaaggccgagaatgcttccctggccaaactaagaattgaacgagagtctgcgctagaaaagctaagaaaggagatcgctgattttgagcaacaaaaagccaaggaactggctcggatcgaggagttcaaaaaagaagaaatgagaaaacttcagaaagagcgaaaggtattcgaaaagtacaccaccgccgctaggacctttccagacaagaaggagcgggaagagatccagacgctaaagcaacagattgcagatttgagagaagacttaaagagaaaggaaaccaagtggagcagtactcactctcgattacggtcgcagatccaaatgctggtccgcgaaaatacggatctgagagaagaaatcaaggtcatggagagattccggctggatgcttggaagcgggcagaggctatagagtccagcctggaagtggaaaaaaaggacaagttggccaacacatctgttaggttccagaattcacagatctcttccggaacccaggtggaaaaatataagaagaactacttgcctatgcagggaaccgcgcaacctccacacacaccatcaagcttgttggctgatcatttacctccactctcatcttttagacctttttctaggaatattcagttgtgttacaccttctag

SEQ ID NO: 217824 - DNA, 3261 bp, synthetic construct
  misc_feature 1..3261: note = Description of Artificial Sequence: Synthetic coding sequence
  source 1..3261: mol_type = other DNA
atgtttctgatgcctacctctagcgagcttaattcaggccaaaacttcctgacacagtggatgactaacccctctcgagctggcgtgatactgaaccgtgggttcccaatactggaggcagacaaagaaaagcgggctgccgttgatatctccacatcattccccatcaaagggacacatttcagcgattccttttccttcatcaacgaagaggactctcttcttgaggagcaaaaattagaatctaataacccctataagcctcagtccgacaagtcagaaacacataccgccttcccctgcataaagaagggaccgcaggtagccgcatgccattccgcgccaggccaccaggaggaaaataagaatgatttcatacctgaccttgccagtgagtttaaagaaggagcttataaggatcctctgtttaaaaagcttgaacagctcaaggaagtgcagcaaaagaaacaggaacaactcaaacgacaacagcttgagcagctccaacggctgatggaagagcaggaaaaactcttgaccatggtgtctggccagtgcactctccccggtctttcccttctgcctgatgaccaatcccagaagcataggagccctggcaatacgaccaccggggaaagagccacatgctgctttccttcttatgtttacccagaccccacccaagaagaaacctatccctcaaacattctttcgcacgagcaatccaatttctgcagaaccgcccacggcgactttgtgctgaccagcaagagagcctcccctaatctcttcagtgaagcccagtatcaggaagcacccgtggagaaaaacaatctcaaagaagaaaacaggaaccaccccaccggagagtctatattatgttgggagaaggtaacagagcagatccaggaggcaaacgacaagaacttgcaaaagcacgatgattcgagtgaagtggccaatatcgaggaacgtccaattaaggccgcaatcggtgagagaaagcagacattcgaggactacctggaagagcaaattcagctggaggagcaagagctgaagcagaagcaactgaaagaagccgaggggccacttccgatcaaggctaaacctaagcagccattcctgaaacgcggagaaggcctagccaggtttaccaatgccaaaagcaagttccaaaaaggtaaagaatctaaattggtcacgaaccagtctacaagtgaggaccagcctctatttaagatggaccgacagcagctgcagcgtaaaacagcgcttaagaataaagagctgtgcgccgataatcccatactgaaaaaagactccaaggctcgaaccaagagcggttcagtgaccctgtctcagaagcctaaaatgttgaagtgctccaaccgtaagtcactgtcaccctccgggttgaaaattcaaacaggaaagaagtgtgacgggcaattcagggatcagatcaaattcgagaataaagtaaccagcaataacaaagaaaacgtgacggaatgccctaagccatgcgacaccggctgcactgggtggaataaaacccaggggaaagatcgactgcccctcagtacaggccctgctagcaggctcgcagctaagtctccaattcgcgagactatgaaggagagcgaatctagtttagacgtgagtctgcagaaaaagctggaaacttgggaacgggaaaaagagaaagagaacctagagctggatgagtttttgttcctcgaacaggcagcggatgaaatctccttctcctccaatagctcatttgtgttaaaaattctggagcgtgatcagcaaatttgcaaaggccaccgaatgagttctactccggttaaggccgtgccccaaaagactaacccagccgaccctatcagccactgtaatcgcagcgaagatctggatcacacagcccgagagaaggaaagcgaatgcgaagtggcgccaaaacagctgcactcactgtcaagcgccgacgagcttcgtgaacagccctgtaaaatccggaaggccgttcaaaaaagtacatctgagaaccagacggagtggaacgcgagggacgacgaaggcgtgccgaactccgacagttctaccgatagcgaagagcaactggacgtcacgatcaagcccagcacagaggaccgagagcgcggtatttcatctagagaggattctccacaggtctgtgacgacaaaggcccttttaaagacacacgaacgcaagaggataaaagaagagacgtggacttggatttgagcgataaagattacagttccgacgagtcaattatggagagcatcaagcacaaggtgtccgaaccgtcccgctcctccagcctgtccctctctaagatggactttgacgatgagagaacttggactgacctggaggagaatctttgtaaccacgacgtggttctcggcaacgaatccacctatggtaccccccagacctgctaccccaataatgagattggtatcttggataagacgattaaacgcaaaattgccccagtcaagcggggagaagatctgtccaagtctcgaagaagccggtcacctcccacttcggaactgatgatgaagtttttcccatccttaaagccaaaacctaagtcagacagccatctggggaacgagctcaagctgaacatctcgcaggaccagcccccaggagacaatgcgaggtctcaggtcctgcgcgaaaagataattgaattggaaaccgagatcgagaagtttaaggccgagaatgcctcactcgcaaagctaaggatcgaacgggagtccgctctggagaaattgcggaaagaaatcgcagatttcgagcagcaaaaggccaaagaactggcacgaatcgaggagtttaaaaaggaggagatgcgcaagctgcagaaggaacgcaaagtttttgagaaatatactacagcagcccgtacttttcccgacaaaaaggagagagaagagatccagacattgaaacagcagatcgctgacctgcgtgaggacctgaaaaggaaggagactaaatggtcttccacgcacagccggctgcgaagccagatccagatgttagtgcgagaaaatacagacctccgcgaggaaatcaaagtgatggagcgattcaggctagacgcttggaaaagggccgaagccatagagtcgtctttagaagtggaaaagaaagacaagttagctgctattcatctggaagatccatcactgcaccttctggttatttag

SEQ ID NO: 217825 - DNA, 1035 bp, synthetic construct
  misc_feature 1..1035: note = Description of Artificial Sequence: Synthetic coding sequence
  source 1..1035: mol_type = other DNA
atggatagttactctgctccagaaagcaccccatctgcttctagtcgccctgaggattacttcataggggcaactccattacagaagagattagagtctgtgcgcaagcaatcaagttttattctgaccccaccacggagaaaaattccccagtgctctcagctccaagaggacgtggatcctcagaaggtggcttttctgcttcacaagcagtggacattgtacagcctaacccctttgtataagttcagctacagtaacctcaaggagtattcacgtctgctgaatgcatttattgtggccgagaaacaaaaagggttagccgttgaggtgggggaagactttaatataaaggtgatcttttccaccctactcggtatgaaaggtacccagcgagaccccgaagcttttctggttcagatcgtgtccaaatcccagctgccaagtgagaatcgggagggtaaagttctgtggactggttggttttgctgcgtcttcggagactcgctgcttgagacggtgtcagaggatttcacctgtcttcctttatttctggccaacggcgctgaaagcaatacagcaatcatagggacgtggttccagaaaacctttgattgctattttagcccattggccataaacgcgtttaacctgtcttggatggcagcgatgtggacagcctgcaagatggaccactacgtagctaccaccgagttcctttggagcgtgccctgctctccacagagtttagatatttcttttgctatccatcccgaggacgccaaggcactgtgggactccgtacacaaaacgcctggcgaggtcacacaggaggaagtggatctgttcatggattgcctctatagccacttccaccgacacttcaagattcacctatccgctacccgtctggtgagagttagtacaagcgtggccagcgcgcacacagacggcaaaataaagattctgtgccacaaatacttgattggcgtgctcgcatatctgaccgaactggctatcttccagatcgaatag

SEQ ID NO: 217826 - DNA, 1173 bp, synthetic construct
  misc_feature 1..1173: note = Description of Artificial Sequence: Synthetic coding sequence
  source 1..1173: mol_type = other DNA
atggattcctattctgcccctgagtctactcctagtgccagtagccggccagaggattattttattggcgcaacccccttgcagaagcggctggaatcggtaagaaagcagtcgtccttcatcctgacccccccaagaaggaagatcccccagtgttcacaactccaagaagacgttgatccccagaaggtggctttcctgctgcataagcagtggactttgtatagcctgaccccactgtacaagttcagttattctaatctaaaagagtatagtagactccttaacgcctttattgtcgctgaaaaacaaaagggcctcgccgtggaagtcggagaggacttcaacattaaggtgatcttctccacgttgctggggatgaaggggacccaaagagatccggaagcttttctcgtgcaggggctgattctgtcaccacggctggagtacagcggaacgattctcgtggattgcaacctctgtctgctcggcagttccgatccttctacactggccttccaggtcgcaggaacagccggtgcctgtcatcacacgcgcatcgttagcaagagtcaattgccatctgagaaccgggaaggaaaagtgttatggaccggctggttttgctgtgtgttcggcgattctttgttagagacagtgtcagaagacttcacttgtctcccactgttcctcgcaaacggcgcagagtcaaatactgccatcataggcacctggtttcagaagacattcgattgttatttctcaccgctcgccattaacgcatttaatttgtcctggatggcagcaatgtggaccgcctgcaagatggatcattatgtcgcaactacggaatttctatggagtgtcccttgctccccccagtcattggatatctcatttgcaatccacccggaagatgctaaggcgctgtgggactctgtgcacaaaacccctggcgaggttactcaggaggaagttgacctctttatggattgcctatactcccactttcacaggcacttcaagatccacctctccgccacacggctcgtccgggtgagtacatccgttgccagtgcacacactgatggaaaaatcaaaatcctgtgccataaatatctgatcggcgttctggcttatttaacagagctggccatatttcagattgaatag

SEQ ID NO: 217827 - DNA, 1035 bp, synthetic construct
  misc_feature 1..1035: note = Description of Artificial Sequence: Synthetic coding sequence
  source 1..1035: mol_type = other DNA
atggactcctatagtgccccagaatctacaccttccgcctccagtagacctgaggactacttcatcggggctacccccttacagaagaggttagagtcggttagaaaacaaagctcatttatcctgactccacctagaagaaagataccccagtgttctcaactgcaggaggacgttgacccacagaaggtggcatttctgcttcataaacagtggaccctttatagtttaacccccctttataaattcagctacagcaacctcaaagaatatagccggctgctgaatgcctttatcgtggctgagaaacaaaaagggctagccgtggaggtaggcgaagacttcaacatcaaggtgatttttagcacactgctggggatgaaagggacgcaaagggaccctgaagctttccttgttcagatagtttccaaatcacagctgccctccgagaatcgcgaaggaaaggtcctatggactgggtggttttgctgtgtatttggcgactcattactcgagaccgtaagtgaagacttcacatgcctgcctttgtttctagccaatggagctgaatccaacactgctattatcggaacctggttccagaagacgttcgactgttatttttcccctctcgctatcaacgcattcaacttaagctggatggccgctatgtggacagcctgcaagatggatcattatgtggctaccactgagtttctgtggtcagtgccttgtagcccacagagccttgacatcagctttgcaattcatcccgaggacgcgaaagcgttgtgggattcagtgcataaaacacctggagaagtcacccaggaagaggtggacttgtttatggattgcctgtattcgcactttcaccgacatttcaagattcatttgtctgccactaggctcgtgagagtgtccaccagcgtggccagtgcacacaccgacggaaagattaaaatcctgtgtcacaagtacctgatcggggtgttggcctacctgacagagctcgccatcttccagattgaatag

SEQ ID NO: 217828 - DNA, 615 bp, synthetic construct
  misc_feature 1..615: note = Description of Artificial Sequence: Synthetic coding sequence
  source 1..615: mol_type = other DNA
atggacgagactgtggctgagtttataaaaaggaccatactcaagattcctatgaatgagctaaccactatcttgaaagcatgggacttcctttcggaaaatcagctgcaaaccgtgaactttaggcaacgaaaggaatccgtcgtccaacacttgatccacctctgtgaggaaaaacgtgcttctataagcgacgcagcccttttagatattatctacatgcagttccatcagcaccagaaggtctgggaagtgttccaaatgtccaaagggcctggcgaggacgtggacctgtttgatatgaaacagtttaaaaactcctttaaaaaaatcctccagcgagctttgaaaaatgtgactgtgtctttccgtgaaacggaagagaacgctgtgtggatcagaattgcatggggtacccagtatacaaagccaaatcagtacaagcccacctacgtggtgtattacagccagaccccgtacgccttcacatcttctagtatgttgcgaaggaataccccactcctcggacaggaactggaggctaccggcaagatttacctacggcaggaagagatcattttagatattactgagatgaaaaaggcatgtaattag

SEQ ID NO: 217829 - DNA, 1020 bp, synthetic construct
  misc_feature 1..1020: note = Description of Artificial Sequence: Synthetic coding sequence
  source 1..1020: mol_type = other DNA
atggatgaaaccgtggccgagttcataaagcgcaccatcctgaagatacctatgaacgagctcaccaccatcctaaaggcatgggacttcctttccgaaaaccaactgcagaccgtaaacttccgccagaggaaagagtcagtcgtgcagcacctcatacatctgtgcgaagagaagcgcgcaagcatctcagacgctgcactgctcgacattatatacatgcagtttcatcaacatcagaaggtgtgggaagtcttccaaatgtctaaggggcctggagaggacgtggacctcttcgatatgaagcagttcaagaattctttcaagaagatcctgcagcgcgcactcaagaatgtgactgtatccttccgtgaaacagaagaaaatgctgtgtggattcgcattgcttgggggactcagtacactaaacctaatcaatacaaacctacttatgttgtgtattactcccagactccctatgcatttaccagcagcagtatgctgagacgcaacacacccctgctgggccaggccttgaccatagcttcaaagcaccatcagattgttaaaatggacctccgttctaggtacctggatagtctgaaagccattgttttcaaacaatataatcagacatttgagactcataactcaacaaccccacttcaagagagatcgctggggctggatattaacatggactcgcgaatcattcacgagaatatcgtggaaaaggagagagtgcagagaattactcaggagaccttcggcgactatccccagccccaactggagttcgcccaatataagttggagacaaagttcaagtccggacttaacggcagtatactcgcggaacgcgaggagccgctgagatgcctaatcaagttcagttctccccatctgctggaagcgctgaaaagtttggctccagcaggaattgccgacgccccactgtcccccctactgacctgtattccaaataagcggatgaattactttaagattcgggacaaatag

SEQ ID NO: 217830 - DNA, 918 bp, synthetic construct
  misc_feature 1..918: note = Description of Artificial Sequence: Synthetic coding sequence
  source 1..918: mol_type = other DNA
atggacgagactgtagccgagttcatcaagcgaacaattctcaagattccaatgaacgagttgactactatcttaaaggcctgggactttctgagcgagaaccagcttcagacagtcaatttcaggcagcgcaaagaaagtgtggtgcagcacctgatccacctctgtgaggagaagagggcctcgatcagtgatgccgctctgctggatattatctatatgcagttccatcagcatcaaaaggtctgggaggtgttccaaatgagtaaaggcccaggtgaggatgtcgacctctttgacatgaagcagtttaaaaactctttcaagaagatcctgcagcgagccctaaagaacgtcaccgtatcattccgtgagactgaagagaacgccgtttggatccggatagcatggggcactcagtacactaaacccaaccaatacaagcccacctacgtggtgtactattcacagactccttatgccttcacctcaagctctatgcttaggcgcaacacacctcttctgggtcagactttcgagactcataattccacaaccccgctccaggaacgcagcctggggctggatataaacatggattctaggatcattcatgagaacatcgtcgagaaggagagagtccagagaataactcaagagaccttcggagactatccccaaccccagctggagttcgcccagtataagttagaaaccaaatttaagagcggcctcaacggctcaattttagctgaacgagaagagcctcttagatgtctcatcaagttcagcagtcctcatttgcttgaagcgttaaagtctctggccccagcgggaattgctgacgctccactgagccctttgctgacttgcattccaaataagcggatgaattacttcaaaatccgggataagtag

SEQ ID NO: 217831 - DNA, 960 bp, synthetic construct
  misc_feature 1..960: note = Description of Artificial Sequence: Synthetic coding sequence
  source 1..960: mol_type = other DNA
atggatgagaccgtagcagagttcattaagcggacaatcctcaagattccaatgaatgagctgactactatcttgaaagcttgggatttcctttccgagaatcaactccagaccgtgaacttccggcagcgcaaggagtccgtagtgcagcatttaattcatctgtgtgaggagaagagagcctcaatcagcgacgcagccctcctggacattatatgtgaagacgtggatctgttcgatatgaaacaattcaaaaactcttttaaaaagatcctgcagcgtgcactgaagaacgtgaccgtgtcattcagagagactgaggaaaatgctgtgtggatccggatcgcctgggggacccagtacacgaaaccgaatcaatacaagcctacttacgtggtctattatagccagactccgtatgcatttacctcctcaagcatgttacggaggaacacccctctgttggggcaggctctaaccattgcatctaaacatcatcaaatcgttaagatggacctgagatcacggtacctggattcactgaaagcgatcgtcttcaagcagtacaatcagacgttcgaaacccataactctaccactccactccaggagcggagcctcggtctggatattaatatggatagtcgcattattcatgaaaatattgtcgaaaaagaacgggtccagcgtatcactcaagaaacttttggcgattacccccaaccccaacttgaattcgcccagtataagctggaaacaaagttcaagtccggacttaacggtagcatactggccgagcgggaggaacctctgcgctgtctcataaagttctcatcaccacacctacttgaagcactcaaatcactggctcctgccggaattgctgacgcgccactatccccactgctgacctgtatcccaaataaaagaatgaattatttcaagatcagagacaaatag

SEQ ID NO: 217832 - DNA, 1062 bp, synthetic construct
  misc_feature 1..1062: note = Description of Artificial Sequence: Synthetic coding sequence
  source 1..1062: mol_type = other DNA
atggacgagacagtcgccgagtttattaagaggaccattcttaagattccaatgaatgagttgacgactattcttaaggcctgggatttcttaagtgaaaatcaactgcaaactgtgaattttcggcagcggaaggagagtgttgtccagcaccttatacacctgtgcgaagagaagcgggcaagcatctctgatgcagcacttcttgacatcatctacatgcagtttcaccagcaccaaaaagtgtgggaagtcttccaaatgtccaagggacctggggaagacgtggacctgttcgatatgaagcaattcaagaatagttttaagaaaatcctgcagagggccctaaagaatgtcaccgttagctttcgggagaccgaagagaacgctgtctggatccgcattgcttgggggacccagtatactaagcccaatcagtacaaacccacttatgtcgtctattactcccaaaccccctacgccttcacctcatcctctatgctgcgtcgtaacacacccctgctggggcaggcccttactattgcaagcaagcatcatcaaatagtaaaaatggatctccgttcgcgctacctagactctctgaaggccatcgttttcaaacagtataatcagacttttgagacacacaacagtaccacccccctccaagagcgcagtcttggcctggatattaatatggattcccgaattattcatgagaatatcgtcgagaaagagagagtccagaggatcacacaggagactttcggggattacccgcaaccccagcttgagtttgcccagtacaaactcgagacaaagtttaaatcggggctgaacggcagtattctggccgagagagaggaaccattacgctgcctgatcaagttctccagcccccatttgctggaggcactaaaaagcctggcgcctgccgctctggtgtgtcgaatccagaagctgctttgttattcaggcagtcacagccagggcactcaagatccatccagctggcagaaggatctgtatttactgtttgtacccctatatccgcgatgttag

SEQ ID NO: 217833 - DNA, 903 bp, synthetic construct
  misc_feature 1..903: note = Description of Artificial Sequence: Synthetic coding sequence
  source 1..903: mol_type = other DNA
atggagcaagcaaatcccctgagacccgacggggagagcaaggggggagtgctggcccacctggagcggctggagacccaggtgagccgatcgcgaaagcagtcggaggaactgcagtctgtgcaggctcaagaaggagccctgggtaccaaaattcataaactgcgtagattgcgtgacgagctccgcgctgtagtgaggcacaggagagcctctgtgaaagcatgtattgcaaatgtagagccaaaccagactgtggagatcaacgagcaggaagccctggaggagaaactggaaaacgtgaaggctatactgcaggcttatcactttacaggtctttcaggcaagcttaccagtaggggggtgtgcgtgtgcatttctactgctttcgagggaaaccttcttgatagttactttgttgatctcgttatccagaagcctctgaggatccaccatcatagcgttccagtttttattccgctggaagaaatcgcagccaagtacctgcagaccaatattcagcacttcctcttctcattgtgcgaatatctgaatgcgtactctggacgcaagtaccaagccgatcgcctccagagcgacttcgctgctttactgacaggccctctacagaggaacccactgtgtaatcttttgagtttcacctataaactcgaccccggaggacaatcatttccattctgtgctcgacttttatataaggatctgacagcaaccctgcccacagacgttactgttacatgtcagggagttgaagtgctcagcacaagctgggaggagcagcgggcatctcacgaaactttgttttgcaccaagcctctccatcaggttttcgccagtttcactaggaaaggcgaaaagcttgacatgagcctggtatcctag

SEQ ID NO: 217834 - DNA, 903 bp, synthetic construct
  misc_feature 1..903: note = Description of Artificial Sequence: Synthetic coding sequence
  source 1..903: mol_type = other DNA
atggaacaggcaaatcccctacggcctgatggagagagtaaaggcggagttttggcgcacttggagcggctcgagacccaggtctctcgatcccgaaaacagtccgaagaattacagagtgttcaggcacaagagggagctctggggactaaaatccacaagctcagacggctccgtgatgagctacgcgcagttgtgcgccaccggagagctagcgttaaggcttgcatcgctaatgtggaaccgaatcaaactgttgaaatcaacgaacaggaagctcttgaggagaaactggaaaatgtgaaagcgatcctacaagcttaccatttcaccggactcagcggaaaattaacttctcgcggtgtttgcgtgtgcatctcaaccgccttcgaaggcaacctgctggacagttacttcgtggaccttgtgatccagaaaccgttgcggatacatcatcactcggtgcctgtctttattcctcttgaggagatcgcagcaaagtacttgcagacaaatatacagcacttcctgttctccttatgtgaatacctgaatgcgtatagtggcaggaagtaccaggccgataggcttcaatccgatttcgccgcactgcttactggcccacttcaacgaaaccctctgtgcaatttactttcattcacctacaagctggatccgggaggccagtcttttccgttttgcgcgaggctgttgtataaagacctgacggccacgcttccgaccgatgtgaccgtgacctgtcaaggggtcgaggttctaagtacttcttgggaggagcagcgggcatctcacgaaacactgttttgtactaaaccactgcaccaggtgttcgccagtttcacacgtaaaggcgagaagctagacatgagcctggtgagttag

SEQ ID NO: 217835 - DNA, 885 bp, synthetic construct
  misc_feature 1..885: note = Description of Artificial Sequence: Synthetic coding sequence
  source 1..885: mol_type = other DNA
atggccggaattttggctagtggcctgggagtgcttgcccacctggaacgcctggagacccaagtctccagatctcgcaagcagagcgaagagctccagtctgtgcaagctcaggaaggggctctggggactaaaattcacaagctaagacggttgagagatgagctgcgggcagtagttagacatcgacgagcaagcgtcaaagcttgcatagctaatgtcgagccaaaccaaacagtcgagatcaacgaacaagaggccctggaagaaaagctcgaaaacgtcaaggctattttacaagcttaccactttaccggcctatccggaaaattaacttctaggggagtgtgcgtgtgcatcagcacggcatttgaaggcaacctgctcgacagctacttcgtggatctggtgattcagaagccactgagaattcatcaccactctgtgcctgtcttcattcccttggaagagatcgcagccaaatacctgcaaactaatatccagcactttctgttctccctgtgtgaatatcttaatgcctacagcggcagaaagtatcaagctgaccgcttgcagtccgacttcgcagccctgttaaccggcccacttcagcggaatccgctgtgtaacttgctaagctttacttataagcttgacccaggtggccagtcttttcctttttgtgcacgactactgtacaaagatctgacggccacacttcctactgacgttaccgtaacgtgtcagggagtggaggttctgagcacatcttgggaggaacagcgagccagccacgagaccttgttctgtaccaaacctctgcaccaggtcttcgccagtttcaccagaaaaggcgagaaactggatatgtctttggtatcttag

SEQ ID NO: 217836 - DNA, 309 bp, synthetic construct
  misc_feature 1..309: note = Description of Artificial Sequence: Synthetic coding sequence
  source 1..309: mol_type = other DNA
atgcaggagaagtatcctgatgcagtgtatttgagcgaaggcccatctagttgttctatgggcataaggagcgcaagtagaccagggtttgagctcgtgattgtgtggaggatacagatagacgaggatggaaaagtgttccccaaacttgatctactgacgaaggtgccacagagggccctggaactggacaagaaccgcgctatcgagaccgcacccctgagttttcgaacactggtggggctgctgggcatcgaggccgctctggagagcttgatcaaatccctgtgtgcagaagagaacaactag

SEQ ID NO: 217837 - DNA, 348 bp, synthetic construct
  misc_feature 1..348: note = Description of Artificial Sequence: Synthetic coding sequence
  source 1..348: mol_type = other DNA
atggaagccccaagctggtctgtgctgcagcggagtggagatgaagagaagtaccccgacgcagtgtacctgtccgagggtccaagctcctgttcaatgggaatccgttcagcttcgaggcccggatttgaactggtcatagtctggcgcattcaaatagacgaggatgggaaggttttcccaaaactggatctgctaactaaagtgcctcaacgagctctggagctggacaaaaatcgggctatcgagactgctcccctgtcatttcgcaccctagtgggcttgctgggcatagaggctgcattggaaagcttaattaagtctttatgtgccgaggaaaacaactag

SEQ ID NO: 217838 - DNA, 867 bp, synthetic construct
  misc_feature 1..867: note = Description of Artificial Sequence: Synthetic coding sequence
  source 1..867: mol_type = other DNA
atggacgcagagctcgcagaggtaagggcactgcaggctgagattgctgctcttagaagggcctgtgaagaccctccggctccatgggaagagaaatctcgggtccaaaagagctttcaggctatccaccagttcaacctggagggctggaaaagtagcaaggaccttaagaatcagcttggccatttggagagtgagttgagctttctgagtactctcactggcattaacattcgtaaccatagtaagcaaactgaggaccttacctctaccgagatgaccgaaaagtctattcggaaggtgctacaacgccacaggttatctggcaattgccatatggttactttccagttagagttccagatcctggagatccagaacaaggagcggcttagttcagccgtaaccgatctgaacataattatggagccgactgaatgttccgaactgagtgaattcgtctcaagagcagaggagcggaaggatttatttatgtttttcaggagccttcactttttcgttgagtggttcgagtaccgcaaaagaacatttaagcacctgaaggagaagtatcctgatgctgtatatcttagcgaaggcccttctagctgcagtatgggtattagatccgcttcccgaccagggttcgaactggtgattgtttggcgcattcaaattgacgaggacggcaaggtctttcccaagctagatctcctgactaaggtgccacagcgagcattagagctggacaagaaccgggcaattgaaacagccccattaagctttcgcaccctagtaggtctgctggggatcgaagctgccctggagtccctgatcaaaagcttatgcgctgaggaaaataattag

SEQ ID NO: 217839 - DNA, 744 bp, synthetic construct
  misc_feature 1..744: note = Description of Artificial Sequence: Synthetic coding sequence
  source 1..744: mol_type = other DNA
aagagagcgggacgttccgacagttgcgcagccggaccagccgctgtcagcaacgcgccttggacacagtcctggcaaaggtgcgcaccgtgcaaactccggtcccggccatgtggagaaagagttcggacccacagaagacccggaaaaaggtccccagaatcctcgatcagaaaggtgctccaaagacaccgtctgagcggtaactgtcacatggtgacattccagctggagtttcagattctcgaaatccagaataaagagagactgagttcagctgttaccgatctcaacataatcatggagcccactgaatgtagtgaactctcggagttcgtctcacgggctgaggagagaaaggatctgttcatgttctttcgaagcctgcacttctttgtggaatggttcgagtaccgtaagaggacgttcaagcatctgaaggaaaagtacccagacgctgtctacctttccgagggtccgtcatcctgctccatgggaatccggagtgcatcccggcctggctttgagctggtcattgtctggcggatccagattgacgaggacggtaaggtattccctaagctggaccttctcactaaggtgccccagcgggctctggaactggataaaaacagggccatagagacagccccactctcattcagaaccctggtcgggcttcttggcatcgaggccgctctcgagtcactgattaaatctttatgcgcagaagagaacaactag

SEQ ID NO: 217840 - DNA, 807 bp, synthetic construct
  misc_feature 1..807: note = Description of Artificial Sequence: Synthetic coding sequence
  source 1..807: mol_type = other DNA
atgtcaggaaaggctaatgcctctaagaaaaatgcacagcagttgaaacgcaaccccaagaggaagaaagataatgaggaggtggttctcagtgaaaacaaagtgcggaacactgtgaaaaagaacaaaaaccacctcaaggacctatctagcgagggacagactaagcacaccaatctgaaacacgggaagactgctgcttcaaagcgcaagacgtggcagccgctcagtaaatccacccgggaccacctgcaaactatgatggagtcagttattatgacgattctgagtaacagcatcaaggaaaaagaagaaatccagtaccatctcaattttctgaagaaacggttgctccagcagtgtgaaaccctcaaagttccaccgaagaagatggaggatctgaccaacgtgtcaagcctgctaaatatggagcgtgctcgcgataaagcaaatgaggaaggattggctctcctccaagaggagattgacaaaatggtggagactacagagctcatgaccggcaacatccagagcctcaaaaacaagatccagatcctggcaagcgaggtggaggaggaagaggagcgcgttaaacagatgcaccaaatcaacagctctggggtgttgagcctgcctgaattgagccagaagaccttaaaggcccctaccttacaaaaggaaatcctggctctcattcccaaccagaacgccctcctcaaagatcttgacattctgcataatagctcacaaatgaaatcaatgagcacttttatagaggaggcttacaaaaaactcgatgcaagctag

SEQ ID NO: 217841 - DNA, 807 bp, synthetic construct
  misc_feature 1..807: note = Description of Artificial Sequence: Synthetic coding sequence
  source 1..807: mol_type = other DNA
atgagcgggaaagccaacgcttcaaaaaagaatgcccaacaactgaaaaggaatccaaaacggaagaaagacaatgaggaggttgtgctttctgaaaataaggtgcgcaacactgtaaaaaaaaacaagaaccatctgaaggatctatccagtgagggtcagacgaagcacacaaacctaaaacacgggaaaactgctgcttcgaaaaggaagacctggcaaccattgagtaagagtacacgtgaccaccttcagacgatgatggaatcagtgatcatgactattctgtctaacagtataaaggaaaaagaagaaatccagtatcacctgaatttccttaaaaagcggctcctccagcagtgcgagacgttgaaagttccaccaaagaagatggaggatctgaccaatgttagtagcttactgaacatggaacgcgcacgtgacaaggccaacgaggagggcctagctctcctgcaggaagagatcgacaagatggtggagaccacagaactgatgacagggaacattcagtcactgaagaacaagatccagatactggcatcggaggtcgaggaggaggaagaacgcgtaaagcaaatgcatcagataaattcttccggggttttgtcactgcctgagctttctcaaaaaacactcaaggcccctaccctccagaaggaaatcctagctctaatacccaaccaaaacgctctgctgaaggatttggacatcttgcacaacagttcacagatgaagagcatgtctacttttatagaggaagcttacaagaagctcgacgcctcatag

SEQ ID NO: 217842 - DNA, 384 bp, synthetic construct
  misc_feature 1..384: note = Description of Artificial Sequence: Synthetic coding sequence
  source 1..384: mol_type = other DNA
atgggcgacaaacccatctgggaacagatcggcagctcttttatccaacactactaccaattatttgataacgatcgtacacagctgggtgccatctacatagacgctagctgcctgacgtgggagggccagcagttccagggaaaggctgctatcgtagagaagctttcatccttgccttttcagaagatacagcactccataaccgcccaggatcatcagcccacgcccgactcttgtattatttcaatggtggtcggtcagctcaaggcagacgaagatccaatcatgggcttccaccagatgttcctgctgaagaatatcaacgatgcatgggtctgcactaacgacatgttcagattagcgcttcacaatttcggttag

SEQ ID NO: 217843 - DNA, 786 bp, synthetic construct
  misc_feature 1..786: note = Description of Artificial Sequence: Synthetic coding sequence
  source 1..786: mol_type = other DNA
atgtcttggtgttgtttgtggctctgcctttcttcggttgggagaacgggctccgccggtccaagtctccccttcagcgaactgtgttcactgggtctgctccgactgcgaccggtgttcagccccctccatagcggcccaggtaaaccagcccagttcctggcaggcgaggccgaggaagtgaatgccttcgcattagggtttctttccactagctctggagtatccggggaggacgaagtcgaaccacttcatgatggagtagaggaagcggagaagaagatggaggaggagggagtttcagtgagcgagatggaagcaacgggggctcagggcccttctcgagtggaggaagcggaaggacatactgaggttacggaagccgagggaagccagggtactgcagaagccgatggccctggcgcatcctccggggatgaggatgcgtctggcagggcagcctcaccagagtcagcgagttccactcccgaaagcctacaggcccgacgccaccaccaatttctggaacctgccccagctcctggagccgcagtgctgtcaagcgagcctgcagaaccccttctcgtgcgccaccccccaaggccacggaccacagggccaaggccccgtcaggatccccacaaagctgggttatcacactacgtgaagctttttagcttttatgccaaaatgccaatggagaggaaggctctcgagatggtggaaaaatgtatttttgtaatgatttggaggtatctgctgctaatgctggccgctcgtctatag

SEQ ID NO: 217844 - DNA, 1686 bp, synthetic construct
  misc_feature 1..1686: note = Description of Artificial Sequence: Synthetic coding sequence
  source 1..1686: mol_type = other DNA
atggccgaccataacccagactcagacagcacccctcgaactcttctgaggagagtactggacactgcggatccgaggacccccagacggccaaggagcgcaagagccggagcccgaagagcactgctagaaacagcctcccccaggaagctctctggccagactcgcaccatagccaggggcaggtcccatggagccagaagtgtcggcaggagtgcgcatatccaggcctccggtcatctggaagaacagacgcccaggactctcctgaagaatattttgttgacagctcccgagagttccattctgatgcccgagagcgtagtgaagcctgtacccgctcctcaggcagtgcaaccctcccgacaggagtcttcctgtggttcccttgaactccagctgcccgagctggaacctccaaccacactggctcctgggttgttagcccctggcagacggaagcagcgcctgagattatccgtgttccagcagggagtggatcagggcctaagcctttcgcaggagcctcagggtaacgccgatgcatcctcactgactcgatcactcaatctgaccttcgcaactccattacaaccacagagtgttcagcggcctggtcttgcacgtcgaccacccgcacggagggcagttgatgttggtgcctttctgcgcgacttacgggacacaagtctggccccacctaatattgttcttgaggatactcagccttttagccagcctatggtgggttctccgaatgtgtaccacagtctcccttgtaccccgcataccggagccgaggacgccgagcaggccgctgggcgaaagacacagtcctctggcccaggcctgcagaagaacagcccgggtaagcccgcacagttcctggctggtgaagctgaagaagtaaacgcattcgctctgggattcctgtctacctcgtctggagtcagtggcgaggacgaagtggagcctctccacgatggcgtagaggaggcagaaaaaaagatggaggaagagggggtctccgtctctgagatggaggctactggagcacaaggaccgtctagagtggaggaggccgagggacacaccgaagtgactgaggcggaaggaagtcagggtactgcagaggcagacgggcctggtgcaagttcaggggacgaggatgcttctggcagggccgcttcacctgagtcagcctctagtacgcccgagagcctgcaagccagacggcatcatcagtttctcgaaccagccccagctcctggcgctgccgtcctgtcctcagaaccggctgaaccattgctcgtccggcatccgcctaggccgagaactaccggccctcgcccacgccaggacccccataaagccggtctgagtcattatgttaaactcttctcattctacgcaaagatgccgatggaaagaaaggctctcgaaatggttgaaaaatgtctggacaaatacttccagcacctgtgtgatgatttggaggtctttgcagcacatgccggaagaaagactgtgaaacctgaagacctggagctgctaatgaggcgccaagggctagtgacagaccaggtctccctgcatgtcttagtagagaggcatctccccctggagtatcggcaattgctcatcccttgtgcatatagcggcaattctgtttttcctgctcaatag

SEQ ID NO: 217845 - DNA, 447 bp, synthetic construct
  misc_feature 1..447: note = Description of Artificial Sequence: Synthetic coding sequence
  source 1..447: mol_type = other DNA
atgcccgaatctgtcgtcaagccagtaccggcaccacaggcggttcaaccaagtagacaagaaagctcatgcgggagtttggaactgcagcttcccgagctagaacctcccacaacactcgccccaggacttctcgcccctgggagacgcaagcaacggctccgcttaagtgttttccagcaaggagtcgaccaaggactttcactctctcaggaaccccagggcaacgccgatgcctcatctttgacccgctccctaaacctgactttcgctaccccactgcagccgcagagcgtccagagaccgggtttggcccgacgtccgcctgcgagacgcgcagtggacgtcggggcattcctgagagatctgcgcgatacgtcgcttgcacccccaagcaaagtcggcttttccccggctggcctttggggcaaattgtctcctttgtag

SEQ ID NO: 217846 - DNA, 1686 bp, synthetic construct
  misc_feature 1..1686: note = Description of Artificial Sequence: Synthetic coding sequence
  source 1..1686: mol_type = other DNA
atggccgaccacaatccagattcggattcaacaccacgcacactcttgaggagagtgttagacaccgccgatcctcggactcctaggcggccacgctcagcccgtgctggtgcaagaagggcactgctagaaactgcatctccccgtaaactgtccggacaaacccggaccatcgctcgaggcagatcccacggggcacggagcgttggcagaagcgctcatattcaggcttctgggcatctagaagaacagacccctcgtacgttactgaaaaacatcctgctgactgctccggaatccagtatcttgatgccggaatcggtcgtaaagcccgtccccgcacctcaggccgtgcagccgtcacgccaggagtctagttgcggcagcttggagcttcaactgcctgagttggagcctcctacaaccctggccccaggcctgttagccccaggtcggagaaagcagcgactacgtctctctgttttccagcagggcgtggaccagggactgtccctaagtcaggagccccaaggcaatgcggatgccagctcacttaccaggtcgttaaacctgactttcgcaacacctctgcagccccagtccgtccagagacccggattggccaggcgccctcccgctcggagagctgtggatgtcggggctttcctgcgggatctccgagatacatcactggcaccccctaatatcgtacttgaagacacccagcctttctctcagcctatggtaggaagtccaaatgtataccatagcctgccctgcaccccacataccggcgcagaggacgctgagcaggctgcgggtcgtaagacacagtcctctggcccaggactgcagaaaaactctccaggcaagccggctcagtttctggctggtgaagcggaggaagtcaatgcctttgcactcggattcctttccacctcatcaggcgtgtctggggaagacgaagtggaacctctgcacgacggagtagaggaggctgaaaaaaagatggaagaggagggagtgagcgtttccgagatggaggcgaccggggctcaagggccaagcagagtagaggaggctgagggacacactgaggtaactgaagcagaggggagccaagggaccgcagaggctgacggtcccggagcatcctcaggagatgaggacgcttccggaagggcggctagtcctgagtccgcctcttccactccagagtccctgcaggcccgtagacaccatcagtttttggagccagccccagctccgggagccgcagtgctgtcatccgaaccggctgaacctctgctggtacgtcaccctcccaggccgaggacaacaggacctagaccacgacaagacccccataaggctggtctgagtcattacgtgaaactcttttccttctacgctaagatgcccatggaacgaaaggcacttgagatggtggaaaagtgcttggacaaatattttcaacacctgtgtgacgatttagaagtatttgctgcacatgccggaagaaaaaccgttaaaccagaagatctggaactgctcatgcgacggcagggcttggtgactgaccaagtatccctgcacgtgctggtggaaaggcacttacctctagagtacaggcagctactgattccctgcgcgtatagtggcaacagcgtattcccagctcagtag

SEQ ID NO: 217847 - DNA, 819 bp, synthetic construct
  misc_feature 1..819: note = Description of Artificial Sequence: Synthetic coding sequence
  source 1..819: mol_type = other DNA
atgagacgtagccgcagctccgccgcagcaaaactccgcggacagaagaggtctggagcgagtgctgcaccagctgcctctgctgcagccgctctcgcccctagtgccacaagaacaagacgatccgcgtctcaggcgggatcgaagtcccaggccgtggagaaacctccttctgaaaagcctagactcagacgtagctcaccacgggcacaagaagaagggcctggcgaaccgccacctcccgagctggccctgctaccaccaccacccccacccccaccgacccctgccacccctacctcgtcagcatctaaccttgacctgggtgaacaacgggaacgctgggaaaccttccagaagcggcagaaactgacctctgagggggcagccaaactgctgctggacacattcgagtaccagggacttgtgaagcataccggtggatgtcattgtggtgccgtgcggtttgaggtttgggcgtccgccgatctgcacatctttgattgcaattgctcaatctgcaagaaaaagcagaaccggcatttcatcgttcccgcatccagattcaagctgctgaagggagcggagcatatcactacgtataccttcaatacgcataaggctcagcacacgttttgcaaaaggtgtggagtgcaatccttttacacccccaggtccaatcccggaggatttggcattgcgcctcactgcttggacgaaggcaccgtccgatccatggtcacggaagagtttaacggctcagattgggaaaaggcaatgaaggaacacaagacaataaagaacatgtctaaggaatag

SEQ ID NO: 217848 - DNA, 2961 bp, synthetic construct
  misc_feature 1..2961: note = Description of Artificial Sequence: Synthetic coding sequence
  source 1..2961: mol_type = other DNA
atggttagtaagagtgatcagcttctgattgtggtatctatattagaaggcaggcacttccctaagaggcccaaacacatgctggttgtcgaagcgaagttcgatggagagcagttagccactgatccagtggatcataccgatcagcctgagtttgccacggagctagcctgggagatcgataggaaagcactgcaccagcaccgtctccaacggacaccgataaagttacagtgtttcgccctggatcccgtgacctccgccaaagaaacaataggatatatcgttttggacctgaggacagcccaagaaaccaagcaagcaccaaagtggtatcaattactttccaataagtataccaagttcaagagtgaaatccagatcagtatcgctctggagactgacacgaagccgccagtggatagctttaaggccaaaggcgcacccccacgagacgggaaggtgccagccatcctggccggtctggatcctcgcgatatcgtggcagtactgaatgaagaaggaggataccatcagatcggccctgctgagtattgtacagattcctttataatgagcgttacaatcgccttcgccactcaactggagcagctgatcccctgcactatgaagctcccagaacggcagcctgagttctttttctactatagcctgctcgggaatgatgtgaccaacgaacccttcaatgatttaattaatccaaattttgaaccggagcgggcaagcgtgagaatccggtctagtgtggagatcctgcgagtatatctagccttgcagtcgaaactgcagatacatttgtgctgcggcgaccaatccctggggtccacagagattcccctgactggtctcctgaagaaaggttctacagaaatcaaccagcatcctgttactgttgaaggtgcctttactctggatcccccaaaccgcgcaaaacagaaactggccccaatacccgtcgaattagcccctacagttggcgttagcgtagctctccagcgggaaggcatcgacagtcagagcttaatcgaactgaaaacccagaatgagcacgagcctgagcactccaagaagaaagtactcacccccattaaagaaaagacactcactgggcctaagtctcctacagtctcaccagtgcctagccacaaccaatcaccacctacaaaagacgacgccacggagagtgaggtggaatcacttcagtatgataaggatacaaagccaaatccgaaggcctctagtagtgtccctgcctctctggcccagctggtgaccacctctaatgctagcgaggtcgccagcggccaaaagatcgccgtcccagctacctctcatcatttctgcttctccatcgatctccgttcgattcatgcgctagaaatcggttttccgataaactgcatcctgagatacagctatcctttttttggtagcgcagccccaatcatgacgaatcccccagtagaggtgagaaagaatatggaagtgttcttgcctcagtcgtattgcgccttcgacttcgcgacaatgccgcaccagttacaagatacctttctgcgcatcccactccttgttgaactgtggcacaaagacaagatgtccaaggatctgctgctcggcattgccagaattcaactgtctaacatcctgtcctccgagaagacacgttttctggggtctaacggtgagcagtgttggaggcaaacatactccgagagtgttccagtaatagctgcccaggggagtaataaccgaattgctgacttaagttacacggttaccctggaggactatggacttgtgaagatgcgagaaattttcatcagtgatagttcacaaggagtgtccgccgtgcagcaaaaaccatcgtccctccctccagccccttgccccagcgagattcaaaccgagcctcgcgaaacgctggaatataaagcagcactcgaacttgagatgtggaaggaaatgcaagaggatatcttcgaaaatcagttgaagcagaaggagctcgcacatatgcaggcgctggctgaggagtggaaaaaaagagatagagagagagagtctcttgtgaagaaaaaggttgccgaatacaccatccttgagggtaagcttcaaaagaccctgattgacctcgaaaagagagagcagcaacttgcctcagtcgagagtgaactgcagcgggagaagaaggaacttcaaagtgaaaggcagcgcaatctgcaggagttgcaggacagtatcaggcgagctaaggaagattgtatacaccaggtcgaactcgagagactgaagatcaaacagctggaagaggacaagcatcgactgcagcagcagctgaacgatgccgaaaacaagtacaagatactggaaaaagagttccagcagttcaaagatcagcaaaacaacaagcctgagatccgcctccagagcgagataaacctcctgaccctcgagaaggtggaactggagagaaagcttgaaagcgcaaccaagtccaagctgcactataagcagcaatgggggcgtgccctgaaggaactagccagactaaagcagagagagcaggagtcacaaatggcacggttgaagaaacagcaagaagaactggagcaaatgcgactgaggtatctggcggcagaagagaaagacactgtaaaaaccgagagacaggagctccttgatatcagaaacgagcttaatcgactccgacagcaggaacagaagcagtatcaggacagtactgagattgcttctggcaaaaaagacggccctcacgggtctgtgctagaggaaggcctggatgattatctgactagactgatcgaggaaagggacactctgatgagaactggcgtgtacaatcacgaagaccggataatcagtgaattggatcgtcagatccgcgaaatcctcgctaaatcaaacgcttcaaattag

SEQ ID NO: 217849 - DNA, 2883 bp, synthetic construct
  misc_feature 1..2883: note = Description of Artificial Sequence: Synthetic coding sequence
  source 1..2883: mol_type = other DNA
atgctggtagtggaggcgaagtttgacggagagcagttagccactgatcctgttgatcacaccgatcagccagagtttgcgaccgagctggcgtgggagatcgatcgcaaggcgctgcatcagcatcggcttcaaaggactcccatcaagctgcagtgtttcgctctggatccagtgacatctgcgaaagaaacaatcggctatatcgttctggatctgcgaacagcacaagaaacaaagcaggctcccaaatggtaccagctgctgagcaataagtacacaaagtttaagtccgagattcagatctcaatagcccttgagacagacactaaaccacctgtggatagtttcaaggccaaaggagcgcctcccagagacggtaaagtacccgctatccttgctggactcgaccccagggatatcgtcgctgtcctgaacgaagaagggggttaccaccagataggccctgccgagtactgtactgatagcttcatcatgtccgtgactatcgccttcgcaactcagctcgaacagcttattccctgcacgatgaaattgccagaaagacagccagaattctttttctactattctctgctaggcaacgacgtgacaaatgaacccttcaatgatctgatcaatccaaacttcgaacccgaaagagctagcgtgagaatcaggagtagcgtcgagatcttacgcgtgtacttagccctgcagtccaaacttcagatccacctgtgctgcggcgaccagtccttggggtctaccgagattcccctgacaggattattgaaaaaggggtcaactgaaattaatcaacaccccgtcaccgtagaaggtgccttcactctcgacccccctaatagagctaagcagaaattagccccaatcccagtggagctggcccctaccgtgggcgtttctgtagcccttcagcgggagggcattgacagccagtctctaatcgagttgaagactcaaaatgaacacgaacccgaacattctaagaagaaagtcctgacccctatcaaagaaaaaacactgacaggccctaagtccccaacagtgagtccagtccccagccacaatcagagtcctcctactaaagacgatgcaactgagtccgaagttgagtccttgcaatatgacaaggacactaaaccaaaccccaaggccagctcttcagtacctgcgtcgttggcccagcttgtgacgacttcaaacgccagcgaggtagcttccggacagaagatagccgtgcccgctaccagtcatcatttttgttttagcatagatctgaggtccatccacgctttggaaatcggattccccataaactgcattttacgctactcctatccttttttcggcagtgcagcaccaatcatgaccaatcccccagtagaggtgaggaagaacatggaggtcttcctgccacaatcgtactgtgccttcgacttcgccaccatgccccaccaactccaggatacattcctgagaatcccactgttggtggagttgtggcataaggacaaaatgagtaaggacctgctgctcgggatcgcacgaatccaactgtccaatattctctcatccgagaaaacaaggtttttaggttcgaatggcgagcagtgttggcgccaaacctacagcgaaagcgtgcccgtgatcgcagcacaagggtctaacaatcgaattgccgatttgtcttatactgtaaccttagaggactatggactggtgaaaatgagggagatcttcataagcgacagctcccagggagtctccgcggtccagcagaaaccgtctagcctgcccccagccccttgcccatctgagatccagaccgaaccgcgagagactttagagtacaaggctgcccttgaactagagatgtggaaggagatgcaggaagacatatttgagaaccagctgaagcagaaggaactcgcacacatgcaagccctggccgaggagtggaagaagcgggatcgagagcgggaaagtcttgtgaagaaaaaagtcgcagagtacaccatactggagggaaagcttcagaagacactgatagacctggagaagcgcgagcagcagcttgcctccgtggaatcggagctgcagagggagaaaaaagagttacagtctgaacgccaacggaaccttcaagaactccaagactcaattaggcgggctaaagaagattgcattcatcaggtggaattagagcgactgaagatcaaacagctggaagaagataaacatagactgcagcagcagctcaatgacgcagaaaataaatataaaatcttagagaaagagtttcagcagttcaaagatcagcagaataacaagccggagatccggctgcaatcagagattaacctcctgaccctcgagaaagtggaacttgaaaggaagctcgagtccgcaaccaaatccaagctgcattataaacagcagtggggcagagccctcaaagagttagctcgactgaaacagcgtgagcaggaatcccagatggccagactcaaaaagcagcaggaggaactggaacaaatgcgcttgcgctacctggcggctgaggagaaagacaccgtgaagacggagaggcaggaactcttggatatacgcaacgaactgaaccggttgagacaacaggaacagaagcagtaccaggattctacagaaatcgccagcggaaaaaaagatgggcctcacggcagcgttctagaagaaggactggatgattaccttacccggttaatcgaagagcgcgacaccctgatgcgcaccggagtttacaatcacgaggaccgaataatctcagagctggaccggcagattagagaaattctggccaagtcgaacgcttcgaactag

SEQ ID NO: 217850 - DNA, 2961 bp, synthetic construct
  misc_feature 1..2961: note = Description of Artificial Sequence: Synthetic coding sequence
  source 1..2961: mol_type = other DNA
atggtgtctaagagtgaccagctcttgattgttgtctcaatcctcgagggaaggcattttcccaagcggccaaagcacatgctcgtcgtcgaagcaaaatttgacggggaacagttagccactgatcctgtggaccacaccgatcagcccgaattcgctacagagctagcgtgggaaatcgatcgcaaagccctgcaccaacaccggctgcagcgcacccctatcaagttgcaatgttttgctttggacccggtgacgtcagctaaagagacaatcgggtatatcgtcctggatctacggaccgcacaggaaactaagcaggctccaaaatggtatcaactgctcagcaacaagtatacaaagttcaaaagcgagattcagataagcatcgctttggagacagatacgaaacccccagtggactcctttaaggccaagggcgcacctccccgtgatggcaaggtccctgcgatcctggctggactcgacccccgagacatcgtggccgtgttaaatgaggaaggaggataccaccagattggccctgccgaatattgtaccgactcttttataatgtccgtgacgattgctttcgccactcagcttgagcagctcatcccgtgcactatgaaactgcctgagcgtcaaccagagttcttcttttactattccctgctgggaaacgacgtcacgaacgaaccattcaacgatctcatcaatccaaacttcgagcccgagcgggctagcgtgagaatacggtcatccgtagagattctgcgagtttatctggccctccagtcaaagctgcagatccacctgtgctgtggagatcaaagcctgggctcaacagaaattccgttaaccgggcttctgaagaagggtagtaccgagattaatcagcatcctgtgacagtggagggtgcttttacacttgaccccccaaaccgcgcaaagcaaaaactcgctccaatcccggtcgaactcgcaccgaccgtgggggtgtctgtagctctgcagcgcgaggggatcgatagccagtccctcattgaacttaagacccaaaacgaacacgaaccagagcacagcaagaaaaaggtgctgactcccatcaaggaaaaaactctgacaggcccaaaaagccctaccgtgtcgccagtaccctcccataatcaatcaccaccgactaaagatgacgctaccgagtctgaggttgagagtctgcaatacgacaaagataccaagccgaacccgaaagcatcctcttcggtaccagcaagcctggcccagctcgtgacaacgtccaacgccagcgaggtcgcatcgggacagaagatcgctgttcccgctaccagccatcacttctgtttctcaattgacctcagatctatccacgcccttgaaatcgggtttccaataaactgtatcctccgatactcttatcccttcttcgggagtgctgcaccaatcatgacgaaccctcccgtggaggtgaggaaaaacatggaagtctttctgccccagtcttactgcgccttcgactttgcgactatgccacaccagctgcaggatacttttctccgcattcctctgctagtagaactgtggcacaaggacaaaatgtctaaagacctgctgcttggcatagccagaatccagctgtccaatatcctgtcaagtgagaagacccgctttctgggatccaacggcgagcagtgttggagacagacctattcagagtccgtgccagttattgctgcccagggcagcaacaatcgcattgcagacttgagttataccgttacactggaagactatggtctggtgaaaatgcgggagatatttatcagtgactctagtcaaggtgtttctgccgtgcaacagaagccctcttccctcccgccagctccatgtccatccgaaatacagacagaacctcgggaaacccttgagtacaaggccgcattggagcttgaaatgtggaaggaaatgcaggaggacattttcgaaaaccaactgaagcagaaagaactggcccatatgcaggccctagctgaagagtggaagaagagggatagggagagagagtccctcgtgaagaaaaaggtggcagagtacacaatcctcgagggcaagcttcagaagacactgatcgatctggaaaaacgcgagcagcagcttgctagcgtggaaagcgagcttcagagagaaaagaaggaacttcagtctgaacgccagcggaatctacaggaactgcaggattctattcgaagggccaaagaagactgcattcaccaggtcgagctggagaggctgaagataaaacaattggaagaagacaagcaccggctgcagcagcagttgaatgatgctgaaaacaagtacaagatactcgaaaaagagttccaacaatttaaagatcagcagaacaataaacccgaaattcggttacagagcgaaattaaccttttgacattagaaaaagtcgagctggaacgcaagctggaatcggccacaaagagtaaactgcattacaagcagcagtggggcagagctttgaaggaacttgcacggttgaagcaacgagagcaagagagtcaaatggctcgtctcaagaagcagcaggaagagctggaacagatgcgattaaggtatctggctgcagaggaaaaggacacggtgaagaccgaaaggcaggagttgctggacatcagaaatgagctgaacaggctgagacagcaggaacagaagcagtatcaagactctacagagatcgcttcaggcaagaaagacggccctcatggatcagtcctggaggaaggtctggatgactacctgactcgccttatcgaagaacgtgatacgctgatgcgcactggtgtgtataaccacgaggaccgtatcattagtgagctggacagacagattagagagatcctggccaagtccaacgcctctaattag

SEQ ID NO: 217851 - DNA, 1143 bp, synthetic construct
  misc_feature 1..1143: note = Description of Artificial Sequence: Synthetic coding sequence
  source 1..1143: mol_type = other DNA
atggtgagtaaatcagatcaattgctcatcgtcgtgagcatcttagagggcagacatttcccaaagcgcccaaaacatatgctggtcgtggaagctaaattcgatggcgagcagctggccactgacccggttgatcatacagaccaaccggagtttgccacagaactcgcttgggagatcgatagaaaggccttacatcagcaccggctccagcgtaccccaattaaactacagtgctttgccctagatccagtgacctcagccaaagaaactatagggtacatcgtgctagacctgaggactgctcaggagactaaacaggcgccaaagtggtatcagttgttaagcaacaaatacactaagttcaagtccgaaatccagatttcgatagcgctggaaaccgacaccaaaccacctgtggattcttttaaggcaaagggcgctcctccaagggacggaaaggtgcctgccatactggccggactagacccccgtgatatcgttgcggtcctcaacgaagagggcggttaccaccagattggccctgccgagtactgcacagactcatttatcatgagtgttacaatcgcctttgctacccaactcgagcaactgatcccatgcacaatgaagctgccagagcgtcaacccgaattctttttttattattcactgctaggaaacgatgttaccaatgagcctttcaatgatctcatcaatcctaattttgagcccgaaagggccagcgtaagaatccggtcatctgtagagattctccgggtgtacctggcccttcagagcaagctgcaaattcacctgtgttgcggcgaccagtccctgggtagcactgagatcccgctcaccggactgttgaaaaaagggtctaccgagatcaatcagcaccccgtgaccgtggagggcgctttcacactggatcctcccaacagagcaaagcagaagctcgctccaatcccggtggaactggctcctactgtgggcgtgagcgttgcgttgcagagggaagggatcgactcccaagacgccttctggtattcagctttggacataatatttcctttatttatatttttattcctggtactggacgccattaggaagtttgccaactatgaagagaaatag

SEQ ID NO: 217852 - DNA, 3828 bp, synthetic construct
  misc_feature 1..3828: note = Description of Artificial Sequence: Synthetic coding sequence
  source 1..3828: mol_type = other DNA
atgtccctagactttggaagcgtggccctcccagtgcaaaacgaagacgaagagtatgacgaggaggactacgaacgcgaaaaggagttacaacagcttctgacagatcttcctcacgatatgctggatgatgacctcagttcccctgagttgcagtactcagattgcagcgaagatgggaccgacgggcagccccaccatcctgaacagcttgaaatgagctggaatgagcaaatgctccccaagagccaatcagttaatggcccaagctgtcaaggtctagaaccttacaacaaggtgacgtataaaccatatcagagcagcgcccagaataacggttctccggcacaggaaatcacagggagtgatacctttgaaggcctccagcagcaattcctaggggcaaatgaaaactccgccgagaacatgcagattatacagcttcaggtgctgaacaaggctaaagaacggcagctggaaaacctgatcgagaagcttaacgaatctgagagacagataagatatcttaaccaccagttagtcatcatcaaagacgagaaagatggactgaccctttcgctccgggagagccagaagctgtttcagaatggcaaggagagggagatccagctggaagcccagattaaagctttggagactcagatccaggccctcaaagtgaacgaagagcagatgatcaagaagtctagaacgactgagatggcattagaaagcttgaagcagcaactcgtcgacctgcatcatagcgagagcctccagcgggcacgagagcaacacgagagtatcgtcatgggtctcaccaaaaaatacgaagagcaggtgctgtccttacaaaaaaacttggacgcgactgtcaccgcgcttaaggagcaggaggatatctgttcccgcctcaaagaccacgtaaaacaacttgagcgtaatcaggaagctattaagctggagaagacggaaatcattaacaagctgacacgtagccttgaggaatcccagaaacaatgcgctcatctgctacagtcgggcagcgtgcaggaggtcgctcagctgcagtttcaactgcagcaggcccaaaaggctcacgccatgtcagcaaacatgaataaagccttacaggaagaactgaccgagttgaaagacgagatttctctgtacgagagcgccgctaagctgggcatccaccccagtgactccgagggggaactcaacattgagctgacggagtcatatgttgacttagggattaagaaggtgaactggaagaaaagcaaggtgacatccatcgtacaggaagaagaccctaatgaagagctgtccaaagatgagttcatacttaaactcaaagcggaagtgcagagattgctgggaagcaactctatgaaacggcatctcgtttcccagctccagaacgacctgaaggactgccacaagaagatagaggacctgcatcaagtcaagaaggacgaaaaaagcattgaggttgaaactaagactgacacctcagagaaacctaaaaaccaattgtggcctgagagttccacatcagacgttgttagggacgacatcctgcttcttaagaatgagattcaagtcttgcaacagcagaatcaagaactgaaagaaaccgagggtaagctgcggaataccaatcaagatctgtgcaaccaaatgagacagatggttcaagatttcgaccacgataaacaagaagccgtggaccgttgtgagcgaacatatcagcaacatcacgaggctatgaagacacagatcagggaatccttgttggcaaagcacgctctagagaaacagcagctgttcgaagcatacgagcgcacccacctgcagctgagaagcgaattggacaaattgaacaaggaagtgacggccgtgcaggaatgctacctcgaagtttgccgcgagaaggataatcttgaactgacactgagaaaaacaacagagaaagagcagcagacgcaggaaaagattaaggaaaagttgatacaacaactcgagaaggagtggcagagcaaactggaccagaccattaaagctatgaagaagaagacacttgattgcgggtctcaaaccgaccaggtgaccacaagcgatgtgatctccaagaaagagatggccattatgatcgaggagcaaaagtgtacaatccagcagaacctggagcaggagaaggacattgcgatcaaaggcgcaatgaaaaagttggagatcgagctagagctgaaacactgtgagaacattactaagcaggtggaaatcgccgtacaaaatgcccatcagagatggctcggggaacttcccgagttagccgaatatcaggcactggtgaaggccgaacagaaaaagtgggaagaacagcacgaggtatccgtcaacaaaagaatctcctttgcagtgtctgaggccaaagagaaatggaagtcggagctggagaatatgcgaaagaacatactccccggtaaggagctagaggaaaagatccacagtttacagaaagaactcgagttgaagaacgaagaagtgccggtggtgattcgagcggaactggccaaggctcggagcgaatggaacaaggagaaacaggaggaaatccaccggattcaggagcaaaatgaacaagattatagacagttcttggacgatcacaggaacaagataaatgaggtgctcgcggctgccaaagaggacttcatgaagcaaaaaactgaactgctgctgcagaaagagaccgaacttcagacctgcctggaccaatcccgtcgggagtggaccatgcaggaggccaaaaggatccagctggagatctatcagtatgaggaggacatacttactgtcctgggcgtgctgctttctgatacacagaaagaacatatctcggactccgaggacaagcagctgctggagattatgtctacctgtagcagcaaatggatgagcgtacagtatttcgagaagctgaaagggtgcatccaaaaggcctttcaggacacattacccttactggttgagaatgcagatcccgaatggaaaaagcgcaatatggctgagctgagtaaggattcagccagccaggggaccggccagggagaccctgggccagccgctgggcatcacgcccagccattagccttgcaggccaccgaagccgaagccgacaagaagaaagtactcgagattaaggatctgtgctgcgggcactgcttccaggagctcgaaaaggccaaacaggaatgtcaggacctgaaaggaaaattggaaaaatgttgcaggcacctgcagcatctcgagaggaaacacaaagctgtagtggaaaagatcggcgaagaaaacaacaaggtggtggaggaactcattgaggagaataacgatatgaaaaataagctggaggagctccagactctttgcaaaacacctcccagaagcctgagtgcaggggctatcgagaatgcttgtctgccttgcagtggcggagcgttagaggagctgagaggccagtacattaaggcagtgaaaaagataaagtgcgacatgcttcggtacatccaagagtctaaagagagagcagccgaaatggtcaaggccgaggtcttgcgcgagcgccaagaaaccgccagaaagatgaggaagtattatctgatttgcctgcagcagattttgcaggatgatggcaaagagggggctgaaaagaaaataatgaacgccgctagcaagctcgctactatggccaagctcctcgagacaccaatcagctcaaagtcccaaagcaagactacccagtccggcatgtccaagtag

SEQ ID NO: 217853 - DNA, 5132 bp, synthetic construct
  misc_feature 1..5132: note = Description of Artificial Sequence: Synthetic coding sequence
  source 1..5132: mol_type = other DNA
atgagtctcgactttggatcagttgccctaccagtgcagaacgaggacgaggagtacgacgaggaggactatgagcgcgagaaggaattgcagcaattgctcacagatctgccccacgacatgctggacgacgatttatcttcccccgagctgcagtattccgactgctctgaagacggtaccgacggacagccccatcatcctgagcaattagagatgtcttggaatgagcagatgttgcctaagagccagagcgttaatgggtataatgagatccagtccctgtacgcaggcgagaaatgtggcaacgtttgggaggaaaacaggtccaaaaccgaagataggcaccccgtctaccatcccgaagagggaggagacgaagggggtagtgggtactctccaccctccaagtgcgaacagactgacctataccacttgccggaaaactttcgtccatatactaatggccagaagcaggagtttaacaaccaagctacaaatgtgattaagttttccgacccacagtggaatcacttccaggggccttcgtgtcagggattagaaccatacaacaaggtgacgtacaagccgtatcagagttcagcgcagaataacggctccccggctcaggagataaccgggtctgacacattcgaggggctgcaacagcaattcttgggcgcaaacgagaactcggccgaaaatatgcaaattatacagttgcaagtactgaataaagctaaggaacggcagttggaaaacctgattgaaaaactcaatgagtccgaaaggcaaatcagatatctaaatcatcagctcgtgatcattaaagatgaaaaagacgggttaacgctgtcacttagggagagccaaaaactcttccagaacggcaaggaaagagagatccagctcgaagcacagataaaggcgcttgagacccagatccaggctctcaaagttaatgaagagcagatgattaaaaagtcccgcacgacagagatggctctggagtccttgaagcaacagctcgtggacctgcatcacagcgagagtctccagcgggcaagagagcagcacgaatccattgtgatgggcctgaccaagaagtacgaggagcaggtactgtcgcttcagaagaatctggacgcaacggttactgccctgaaggagcaggaagatatatgtagtcggctaaaggaccatgttaagcaattggagaggaatcaggaagccatcaaactggagaagacggaaatcattaacaaactcactcggagcctggaggagagccaaaagcagtgtgcccacttgctgcagtccgggtctgttcaggaggttgcccaattgcagttccagctccaacaagcacagaaagctcacgccatgagcgccaacatgaataaggccttgcaggaagaactcaccgagctcaaggacgagatctcactctacgagtccgctgccaagttgggcattcacccctccgattctgagggcgaactgaacatagaactgaccgagagctacgtggacctgggaattaaaaaagttaattggaagaaaagtaaagtgacaagtattgttcaggaagaagatccaaatgaggagctgtctaaggatgaatttatactaaaactcaaagctgaagtgcagcggttactgggctccaacagcatgaaaaggcatctagtgtcccaacttcagaacgatctaaaggactgccacaagaaaatcgaggacctgcatcaggtgaaaaaagatgaaaaaagcatcgaggtagagaccaagaccgatacctccgaaaagcctaaaaaccagctatggcccgaaagctccacaagcgatgtggtgcgagacgacatcctgttgcttaaaaatgagatccaagtgctccaacagcaaaaccaggaactgaaagagacagagggaaaattgagaaataccaaccaagacctttgtaaccagatgcggcagatggtacaagacttcgaccacgacaaacaggaggcagtagatagatgcgagagaacctaccaacagcaccatgaggcaatgaaaacacagatccgagagagtctgcttgccaaacatgccctggaaaaacagcagctgttcgaagcttacgagaggacgcacctgcagctgcggtctgaactggataaactgaataaagaggtgactgcagtgcaagaatgctatttagaggtttgtcgggagaaggataatctcgaattgaccctcagaaagacgactgagaaggagcaacagacacaggaaaaaattaaagagaagctaatacaacagctggaaaaggaatggcagagcaagctagaccagacaattaaagcaatgaagaagaagaccctggattgcggctcccagaccgaccaggttacaaccagcgacgttatctccaagaaggaaatggcgatcatgatagaggagcagaagtgcacaatccagcagaacctcgaacaggagaaggacatcgccatcaagggcgcaatgaagaaactggagatcgaactggagctcaagcattgcgaaaacatcacaaagcaagtcgagatcgctgtccaaaacgcccaccagcggtggcttggcgagctgccggagcttgccgagtaccaagccctggtgaaggccgagcaaaagaaatgggaggaacagcacgaggtttcagttaataagcgtatttccttcgccgtgtctgaggcaaaggagaaatggaaatccgaattggagaatatgcggaagaacattctccccggaaaggagctcgaggaaaagattcacagtcttcagaaagaactggagctgaaaaatgaggaggttccagtcgtgattagggccgagctcgcgaaggcgagatcagaatggaataaagaaaagcaggaggagatccatagaatccaggagcagaacgaacaggactaccgtcagttcctggacgatcaccgaaataagataaatgaggtccttgccgctgcaaaggaagattttatgaagcaaaagaccgagttgctcctgcaaaaagaaacggagctgcagacatgcctggatcaatctcgcagagaatggaccatgcaggaagccaagaggatccagctcgaaatctaccagtatgaggaagatattctgaccgtccttggggtgctgctgagtgacacgcaaaaagaacacatctcggatagcgaggacaaacagctgctggaaatcatgtccacatgctcgagcaaatggatgagcgtccagtactttgagaaattaaaaggttgcatccagaaggctttccaggacactctacctcttctcgtagagaatgcagatccggaatggaagaaaaggaacatggcagagctatccaaagacagcgcttctcaaggaaccggtcagggcgaccctggaccagcagcgggtcaccatgcccaacccctggctctgcaggctaccgaagccgaagcagacaagaaaaaggtcttagaaattaaagacctgtgctgcggccactgctttcaggagcttgagaaagccaaacaggagtgccaggacttgaagggcaagctggagaaatgctgccgtcacttgcagcacctggaacggaagcacaaagctgtggtcgagaagattggggaggagaacaataaagtagtggaggagctgattgaggagaacaatgacatgaaaaacaagctagaggagctccaaaccctgtgcaagacaccacccaggtcattatctgccggagcgatcgagaacgcatgccttccgtgctccggaggagccctcgaagagctgaggggtcaatatatcaaagcggtcaagaagatcaagtgcgatatgctacgttatatccaggagtccaaagaaagggctgccgagatggtcaaggccgaagtcttaagagagaggcaagaaacagctcgcaagatgcggaagtactacctaatctgtctacaacagattctgcaggacgacggcaaagagggtgccgagaagaagattatgaatgccgcatcaaaattggccacaatggcgaagctcctagagacccccatcagtagcaaatcacagagcaaaaccacccaatctgctctgcctttgacatccgaaatgctcattgctgtgaaaaaatcaaaaagaaacgatgttaatcaaaagatcccttgctgtatcgaatctaagtccaactccgttaatacaatcacacgcacactgtgcgagcaggcgcctaagcggagagctgcctgtaatcttcagcgcctgctggaaaattccgaacatcagtccatcaagcacgtcggttctaaggaaactcacctggagtttcagttcggcgatggctcctgtaaacatctgaactccttgccacgcaatgtttcccccgaattcgtcccttgtgaaggggaggggggttttgggctgcacaagaaaaaagacctactgtctgacaacggatcagaatctctgccacactcagctgcctacccctttcttgggaccctggggaataagccaagcccaaggtgtaccccgggacctagtgaatccgggtgtatgcatattaccttcagagattcaaacgaacggctgggcttgaaggtgtataaatgcaaccctcttatggagagcgagaacgctgcctcggaaaaatcacaaggactcgatgtccaggagcctcctgtaaaggatggcggtgatctctccgactgcctgggatggccttcatcatctgccaccctgtcattcgatagtcgagaggccagcttcgtgcacggccgtccccagggaacactcgagattccctcggagagcgtaaagtcgaagcagtttagccccagcgggtacttgagcgataccgaggaaagcaacatgatttgtcagacaatgaaatgtcagcggtatcagactccgtacctctccgaagagaccacctacctggagcctggcaaaattagtgtgaattgcggacacccttccaggcataaggctgaccgtctgaaatcagacttcaagaagttgagctctactctcccatcctctgtctgccagcagccaagtcggaagttaattgtcccccttagctcccaacaggacagcggctttgactctccgtttgtgaacttggacta

SEQ ID NO: 217854 - DNA, 4965 bp, synthetic construct
  misc_feature 1..4965: note = Description of Artificial Sequence: Synthetic coding sequence
  source 1..4965: mol_type = other DNA
atgtctctggacttcggttccgtcgctctaccagtgcagaacgaggatgaagaatatgatgaggaagattacgaacgggagaaagaactccagcagctcctgaccgatctgcctcatgatatgctggacgacgacttgtccagccccgagcttcagtatagcgattgcagcgaggacggcacggacgggcaaccccaccatccggagcagttagaaatgagttggaatgaacagatgctgcccaagtctcaatccgtgaacggctacaacgaaatacagagcctctatgctggagagaaatgcggcaatgtatgggaagagaacagaagtaagacagaagaccgacatccggtgtatcaccccgaggaaggaggcgatgagggaggatcaggttactctcccccatcaaagtgcgaacagactgacctgtatcaccttcccgagaacttccggccttatacaaacggccagaaacaggaatttaacaaccaggccactaacgtcatcaagttctcggacccccaatggaatcattttcagggcccatcatgccagggacttgagccttacaataaggtcacctataagccctaccaatctagcgcccagaacaatgggagtccggctcaagaaatcaccggctcagatacttttgaggggctccagcagcaatttctgggcgctaatgagaactctgcagaaaatatgcagataatccaactgcaggtcctgaataaggcaaaagagcgacagctggagaaccttatcgaaaagctgaacgaaagcgagaggcagattagatatctgaatcaccagctagtgatcattaaagatgagaaggacggattaaccctgtcattgcgggagagtcaaaaattgttccagaatggaaaagagcgagagattcagttggaagctcagattaaggcacttgagacacagatccaagccttaaaggtgaatgaagagcagatgatcaagaaatcacgcacaacggaaatggccttggagagcctgaaacaacaactggtcgaccttcatcactccgagtcgttgcagcgtgcccgtgagcaacacgaaagtatcgtgatgggcctcacaaagaagtatgaggaacaagtcctttccctgcagaaaaatctggacgctacagtgacagcgctgaaagaacaggaagacatctgctctcggctgaaggaccatgttaaacagcttgagcgaaaccaagaggcaatcaaactagagaaaacggagattattaacaaactcacaaggagcctggaagagtcccaaaagcagtgcgcccatctcttgcagagtggaagcgtgcaggaggttgcccagttgcagtttcaactacaacaagctcaaaaggcccatgcaatgagtgccaatatgaacaaggcgctccaggaggagttgactgagctgaaggacgagattagtttgtatgagtctgctgcaaagctcgggattcacccatctgactccgaaggcgagctcaatatcgagctgaccgagtcctacgtggacctcggtataaagaaggtcaactggaaaaagtcaaaggtcacatccattgtgcaagaagaggacccaaacgaagagctatcaaaggatgaattcattctcaagctcaaggccgaggtgcaaagactcctgggatcaaattctatgaaacgccatctggtgagtcagcttcaaaatgatttgaaggattgccacaagaagatcgaagacttacaccaggtgaagaaggatgagaagtcaatcgaagtcgagaccaagacggatacttcagagaaacccaagaaccaactctggccggaaagctctacgtcagacgtcgtgagagatgatattctactgcttaagaatgagattcaggtgttacagcagcagaaccaggagctaaaagaaactgagggaaagctccgcaacactaatcaggatctgtgtaaccagatgcggcaaatggtgcaggacttcgaccacgacaagcaggaggcggtcgaccggtgtgagagaacataccagcaacaccacgaggccatgaaaacgcagatcagggagagtctgcttgccaagcacgcgcttgaaaaacagcaactgttcgaggcatacgaaaggacacacctccagctgaggagcgagctcgataagctgaataaggaagtaactgccgtacaggaatgctatctggaggtctgtagagagaaggacaacctagagctgaccctgcgaaagactacagaaaaagaacagcagacgcaggagaaaataaaggagaagctcattcaacaactggagaaggaatggcagtcaaaacttgatcaaaccatcaaagccatgaagaagaagaccctggattgcggatcacagactgatcaggttactacttcagacgtgattagcaagaaggagatggccatcatgatcgaagagcagaaatgcaccattcagcagaatctggagcaagagaaggacattgctatcaaaggggctatgaaaaagctggagatcgagctggaactgaaacactgcgagaacatcaccaaacaagtggagattgcagtgcagaatgcccatcagcggtggctgggcgagttgcctgaactcgccgaatatcaggctctggttaaagcggagcaaaagaagtgggaggagcagcacgaggtgagcgtgaacaagcggatcagctttgcagtgtccgaagcgaaggagaaatggaaaagcgagttggaaaacatgagaaagaatatactgcctggaaaggagctcgaagaaaaaatccactctttacagaaagaattagaactcaagaatgaggaagtacccgttgtgataagagctgagctcgctaaagcacggtctgagtggaacaaggaaaagcaagaagagattcacaggatccaggagcaaaatgaacaagattatcgccagttcctggatgatcaccggaataaaatcaacgaggtgctggctgctgccaaagaagactttatgaaacagaaaactgagctgctgctccagaaagagaccgagctacagacctgcctggaccaaagcagacgggagtggacaatgcaggaagccaagcggatccagctggaaatctaccagtatgaagaagatatattaacagtgctcggcgtcctgctcagtgacacacagaaagaacacatctccgattctgaagataagcagttgctggagattatgagcacatgctcatccaagtggatgtcagtgcaatactttgagaaactgaaaggatgcatccagaaggcatttcaggacacgcttcccctgctcgtcgagaatgcagatccagaatggaaaaaaaggaacatggccgagctcagcaaggatagtgcttctcagggcacgggtcagggagatccagggccagcagccggacatcacgctcagccactggcgctgcaggccactgaagctgaggccgaagaaaacaataaagttgttgaggaacttatcgaggagaataacgacatgaagaacaaactggaggagttgcagacattatgcaagacccccccacgttccctgtccgccggagcaatcgagaacgcttgtcttccatgcagcgggggagctctcgaagagttgaggggccaatacattaaggcagtcaaaaaaataaagtgtgacatgttaagatacattcaagaatctaaggaacgcgcagccgagatggtgaaagctgaggtgctgcgtgagcgacaggaaaccgccaggaaaatgcgtaagtattacctgatttgtctccagcagattctgcaagacgacggcaaggagggggctgagaaaaagattatgaacgcagccagcaaactggccaccatggcgaaactgctggaaaccccaatttcctctaagagccaatcaaaaacaacacaatctgccttgcctctgacctcagagatgcttatcgccgtgaagaaatctaaacgaaacgacgtgaatcagaagatcccctgttgcatcgaatctaagagcaactcggtgaacacgattaccaggacgctgtgcgaacaggccccaaaacggcgagcagcctgcaacctgcagcgcctgctggagaattcagaacaccagagtataaagcacgtgggttcaaaagaaacacatttggagtttcagttcggcgatgggagctgtaaacatctgaactcccttcccagaaacgtgtctccagagttcgtgccttgtgagggggaggggggattcggactccataaaaaaaaggatcttttatccgataatggtagtgagtcgctgccccatagcgccgcatatcccttcttgggcacactgggcaataaaccaagtcctcgctgcacacccggtcctagcgagagcggctgtatgcacattacttttcgtgattctaacgagcgcctgggattaaaggtgtacaagtgtaatccactcatggaaagtgagaacgccgctagtgagaaaagtcaaggcttagacgtgcaggaaccgcctgtcaaggatggaggagatttatcagattgcttggggtggccatcatcatctgccactctttcgtttgactctcgtgaggcgtcttttgtgcacggccgtccccaggggaccctggaaatcccatctgagtcagtgaaaagcaaacagttcagccccagcgggtacctgtccgatacggaagaaagcaatatgatttgccagacgatgaaatgtcagcggtatcaaactccttatctgtcagaggagacaacctatctggaacctgggaaaatatcggtgaactgcggccatccctcccgccacaaagccgatcggctgaaatctgatttcaagaagttatcctccactctgcctagttcagtgtgccagcagcctagtcggaagctgatcgtgcctttgtcgtcacagcaggattcggggttcgactccccatttgtgaacctggactag

SEQ ID NO: 217855 - DNA, 1779 bp, synthetic construct
  misc_feature 1..1779: note = Description of Artificial Sequence: Synthetic coding sequence
  source 1..1779: mol_type = other DNA
atgtcactcgatttcggctcagtcgctctcccagtgcagaatgaggatgaggagtacgacgaagaggactacgaaagagagaaggagctacaacagcttcttacagatctgccacacgacatgctggacgacgatctgtctagcccagagcttcagtactccgattgcagtgaggacgggaccgatgggcagccacatcatcctgaacagttggagatgtcctggaatgagcaaatgctcccaaagagccagtctgtgaatggctataatgagattcagtccctgtatgccggagagaagtgcggaaatgtttgggaagaaaatcgaagtaaaacagaagaccgacatcccgtctatcatcctgaggagggcggtgacgaagggggtagtgggtatagcccaccttccaagtgtgagcaaacagatctctaccacctcccggaaaactttcggccatacacaaacggccagaaacaggaattcaataaccaggccactaacgttatcaagtttagtgaccctcagtggaatcattttcagggcccaagctgccagggactcgagccctacaataaagtcacttacaagccatatcagtctagcgcccagaataatgggagccctgcccaggagatcaccggtagcgatacctttgaaggcctgcagcaacaattcctcggagccaatgagaacagtgcagaaaacatgcagatcattcaactacaggtgctgaataaggcaaaggagcggcagctagaaaatctcatagagaaactgaacgaatcagagaggcagattaggtacctcaaccatcagttagttattatcaaggatgagaaggatgggctgacactgtcattacgggaatcccaaaagctctttcagaacggcaaagagagagaaattcagctggaagcccagatcaaagcactggaaactcagattcaggctctgaaggtgaacgaggaacagatgatcaagaaatctaggaccaccgagatggcactagaatccctgaagcaacagcttgtggatttgcaccacagcgagtctctgcagagagctagggaacaacatgagtcaatcgttatggggctcacaaagaagtacgaggaacaagtcctgtccctgcagaaaaacctcgacgcgactgtaacagcactcaaagagcaggaggacatctgtagcaggctcaaagaccacgtgaaacagttagaaaggaaccaagaagcaatcaaactggagaagactgaaataatcaataagttgactagaagcctggaggaatcgcagaaacaatgcgcccaccttcttcagtcaggcagcgtgcaggaagtagcacagctgcagtttcagctccagcaggcccagaaagcccatgctatgtctgccaatatgaacaaggcactgcaggaggagcttactgagctgaaggacgagatcagcctctacgagtcagccgcaaaactgggcatccatccctccgacagcgagggagagctgaacattgagctgacagagagttatgtggacctaggcatcaagaaggtgaactggaaaaagagtaaggtgaccagcatagtccaggaagaggaccctaacgaggagctcagcaaggatgagttcatcttaaagctgaaagctgaagtacagcgcctcctggggtctaatagcatgaagaggcatcttgttagtcaattgcagaacgacctcaaggattgccataagaagattgaagatctgcatcaggtgaaaaagaaaaaaaaaaaaaagaagtag

SEQ ID NO: 217856 - DNA, 207 bp, synthetic construct
  misc_feature 1..207: note = Description of Artificial Sequence: Synthetic coding sequence
  source 1..207: mol_type = other DNA
atgagcctggatttcgggtccgtagcactgccggtgcagaacgaggacgaggaatacgacgaagaagattatgagagggaaaaggagctacaacagctccttaccgacttaccacatgatatgctggacgatgatcttagtagccccgagctgcagtactctgactgttccgaagacgggacagatggacaacctcatcacccttag

SEQ ID NO: 217857 - DNA, 4755 bp, synthetic construct
  misc_feature 1..4755: note = Description of Artificial Sequence: Synthetic coding sequence
  source 1..4755: mol_type = other DNA
atgagtcttacctcgtggttcctcgtgtccagtggcggtacgcgtcacagactccccagggagatgatttttgttggacgcgacgattgcgagctgatgctccagtctcgttccgtggacaagcagcacgctgtcattaactacgacgcatcaaccgatgaacatctggtaaaggatctggggtcactgaacggcaccttcgtgaacgatgtaaggattcctgaacagacttacatcacactgaaattagaagataagctgagatttggatatgatacaaacttgttcacagttgtccagggagaaatgcgagtcccagaagaggccctcaaacatgagaagttcacaatccaactgcaactcagccagaagagctcggaaagcgaattatctaaaagtgccagcgcaaagagtatagactcgaaggttgcagatgctgccacggaggtgcagcacaaaaccactgaggcgttgaagtccgaggagaaggccatggacataagcgccatgccaaggggcactccgctctacgggcagccaagctggtggggcgacgatgaggtggatgagaaaagagccttcaaaactaatggaaaacccgaagaaaagaaccatgaagccggtacaagcggttgcggtatcgacgccaagcaggttgaggagcagagtgctgccgctaacgaggaggtactgtttccattctgccgggagccgtcctactttgagatccctaccaaagaattccagcaacctagtcagatcaccgaaagcactatccacgagatcccaacaaaagacactccaagcagccacatcactggggcagggcatgcctcctttaccatcgaattcgatgatagcactcccggaaaggtgacaataagagaccatgtaaccaaatttactagcgatcagcgccataaatccaagaaaagcagcccaggcacgcaggacctgctggggattcagacaggaatgatggctccagagaacaaggtcgcggattggctggcccaaaacaatcccccacagatgctgtgggagcgcacagaggaggatagcaaaagtatcaagtctgatgtgccagtgtacctgaagagactcaaagggaacaagcatgatgacggtacccagagcgattctgaaaacgcaggagcccatcggcgttgcagcaagcgcgctacgctggaggaacacctgagacgtcaccatagtgagcacaaaaaacttcagaaggttcaggctaccgagaaacaccaagatcaggcagtaacctccagcgcgcatcaccgcggaggacatggagtaccccatggcaaactacttaagcaaaagtctgaagaaccctcagtttcaatccctttcctccaaacggccctgctccgctccagcgggtccctcgggcatagaccatcacaggaaatggataagatgttgaaaaatcaggccacctctgccacgtctgagaaggataacgatgacgaccagtcggacaagggaacatatactattgagctcgaaaatcctaactccgaagaggtagaagccaggaagatgatagataaggtgtttggggtggacgataaccaagattataatcggcctgtaattaacgagaagcacaaagatctgatcaaagactgggcgctctcatccgctgccgcagtcatggaggagcgtaaaccattaacaacatcaggctttcaccactccgaagaaggtacgtcctcttccggctctaaaagatgggtcagccaatgggcctctctggccgcaaatcacacccggcacgaccaggaagaacgcatcatggagttttcagcacccctgcctctggaaaatgaaaccgagatcagtgaaagtggcatgaccgtgaggtccacaggaagcgcgacttctttagcttcgcagggcgagcgtcgcagaaggacgctgccccaactgcctaatgaagaaaaatcgctggagtcacatcgggctaaggtagttacccaacgctctgagatcggcgagaaacaagatacagagctccaggagaaagaaacccctacccaggtatatcaaaaagacaagcaagacgccgataggccgctctctaaaatgaaccgtgcagtgaatggggagacactaaaaactgggggagacaacaaaaccctcctgcacctcggaagtagcgctcctgggaaagagaaatctgaaacggacaaggaaactagtctggtgaaacagactctggccaagctgcagcagcaggagcagagagaagaagcacagtggaccccaacaaaactttcctccaagaacgttagtgggcagaccgacaagtgccgggaagagacctttaagcaggaaagccaacctcctgaaaaaaactcaggccatagcacttcaaagggtgacagggtcgctcaaagcgagtccaagagacgcaaagccgaggagatcctgaagtcacagacccccaagggcggtgacaagaaggaatcctctaaatcgctggtccggcagggcagctttaccatagaaaagccatcccctaacattcctattgaattgatcccccacataaataagcagaccagcagtactcccagctccctggcattaacgagcgcctctcggatcagggagcgcagcgaatcactggatcccgattcttccatggataccactctgatcctcaaggatacagaggccgtcatggcattcttggaggccaagctccgtgaagataacaaaactgacgaaggacctgatacgcccagctataatcgagacaattctataagtccggagtcagatgttgacaccgcctccaccatctcccttgtgactggcgaaaccgagcgcaaaagtactcagaagcgtaaaagcttcaccagtctgtacaaggaccgatgttctactggcagcccttctaaggacgtgaccaagtcatcatcatcgggggcacgagagaaaatggagaaaaaaactaagagccgctcaaccgacgtggggtcacgggctgacggcagaaaatttgtacagtcttccgggagaatcaggcaaccatcggttgacctgacagatgatgaccaaacaagtagtgtaccccactccgctataagcgatatcatgtcctcagatcaggaaacatactcatgcaagcctcacgggaggactccgcttacttctgccgacgaacatgtacattctaagctggagggtagtaaggtcacaaaaagtaagacttcccctgtagttagtgggtcaagcagcaagagtaccacgttgcctcggcctcggccaaccaggaccagcttactgagacgggcacgcctgggtgaagcctcagattcagagctggcagatgctgataaggctagcgtggcgagtgaggtgagcactacatcctctacctccaagcccccaactggcaggcgtaatatctcaaggatcgacttactcgcccaaccgagacgtaccaggcttggctccctgagtgccagatccgacagcgaggcaacgatttcacgctcaagtgcctcaagtcggacagctgaggccatcatacggagcggagcacggctggttccaagcgacaaattctccccacgaattcgcgctaacagtattagtagactgtctgacagcaaggttaagtccatgacctctgcacacggttctgcatcggtgaattcaagatggaggcggttccccactgactacgcctctacctctgaggacgaatttggctcgaataggaactccccgaagcatacgaggctaaggactagccccgcactgaagactactagactgcagtccgccggatcagcaatgcccaccagtagcagctttaagcaccggattaaagaacaagaggactacattcgcgactggactgctcaccgagaggaaattgccagaatcagccaggacttagccctgattgcgcgtgagataaacgacgtggcaggagagatcgactctgtgaccagctctggcaccgcgccatcaactacagttagtaccgctgctaccactccgggatctgccattgatactagagaggaacttgttgacagggtttttgatgaatctctgaattttcgtaagataccccctctggtccactccaaaacgccagagggaaacaatggccgaagcggtgatccacgaccccaggccgctgaacctcctgaccacctgactatcacacgtagaagaacatggtccagggacgaggttatgggcgataacctactcttaagtagcgttttccagttctcaaagaaaatccggcagtccatcgataaaacagctggcaaaatccggatccttttcaaggataaggatcgtaattgggacgacatcgaaagcaaactgcgcgctgagtccgaggtgccaatcgtaaaaactagcagcatggagatcagcagcattttgcaagaactgaagagagtagagaaacagctccaggcaatcaacgccatgatagatcctgacggaacgttggaggctctgaacaacatgggctttcccagcgcaatgttaccgagtccaccgaagcagaaatcatcgcccgtgaacaaccaccactctccagggcagactccaactcttggtcagccagaggctagggccctccaccctgctgctgtcagtgcagcagccgaattcgagaacgcagagtctgaagctgatttttctattcacttcaaccgctttaatcccgatggcgaagaagaggatgtcaccgtacaggaatag

SEQ ID NO: 217858 - DNA, 4383 bp, synthetic construct
  misc_feature 1..4383: note = Description of Artificial Sequence: Synthetic coding sequence
  source 1..4383: mol_type = other DNA
atgtccctgacctcctggttccttgtgtcctctggcggtacaaggcaccgtctgccacgggagatgattttcgtgggtcgcgatgattgcgagctcatgcttcaaagtcgctcagtggacaagcagcatgcagtcattaattacgatgcatccaccgacgagcatctggttaaggacctcggaagcctcaatggaaccttcgtgaatgacgtgagaatcccggagcagacctacataactttgaaactcgaagacaagttgcggttcggctacgatactaatcttttcactgtcgtgcagggagagatgagggtgcccgaagaggctctcaagcatgaaaaattcaccatacaattacaattgtcccagaaatcatccgagagtgaattgagtaagtcggcgagtgcaaagtccattgatagtaaagttgctgatgctgccacagaggtacaacacaagacaacggaagcccttaagagtgaagaaaaggcaatggacatttccgcaatgccccgaggaactcctttgtacgggcaaccgtcctggtggggagacgacgaagtggatgaaaaacgggcattcaaaaccaatggtaaacccgaagagaaaaaccacgaagctggcacgtcaggctgtggcatcgacgccaaacaggtggaagagcaaagcgccgctgcaaatgaggaagtcctctttcctttctgcagggaaccctcgtactttgagattcccacaaaagaatttcaacagccatcacaaatcacggagagcacaatacacgaaatcccaacaaaagacaccccatcctctcatatcaccggagccggacacgcatcattcacgattgaatttgacgactcgacgccaggtaaagtgaccatcagagaccacgtgactaagttcaccagcgaccaacgacacaagtctaaaaagagctcgcctggaacacaggacctcctcgggatccaaacaggcatgatggcgcctgaaaataaggtagcagactggctggcgcaaaacaatcctccccagatgctctgggagaggacagaagaggactctaaatctataaagtccgacgtgccagtctacctaaagagactgaagggcaacaaacatgacgatggtactcagtctgactccgagaatgcgggtgcccatcgtcgctgctccaagcgtgcgaccttggaagagcacttacgaagacaccattctgaacacaagaaactgcagaaagtgcaggccactgaaaaacaccaggatcaggctgtggttttcggcgttgacgataaccaggattacaatcggccagtaattaatgaaaagcataaagacctgatcaaagattgggctctctcatcggcggctgcagtcatggaggaacgaaagcctctcaccacttctggcttccatcattcagaggaggggacctcttcatcgggatcaaagcgctgggtgtcacagtgggcaagtctcgctgccaaccacacacgccacgaccaggaagagcgcatcatggaattttctgcgccactcccattagagaatgaaaccgaaatctctgagagcggcatgaccgttcgaagcactgggagcgccacctcactagcctctcagggtgagcgtaggcgaaggactctacctcagctgccgaatgaggagaagtccctggagtctcacagagcaaaggtagtcacacagcggtccgaaatcggcgagaagcaggacacggaactgcaggaaaaggagacgccaacgcaagtgtaccagaaagataagcaggatgctgataggcccctgtcgaagatgaatcgggctgtaaatggcgagactctcaaaacaggaggcgacaacaaaaccttattgcacttgggatcctccgccccaggtaaggaaaagtcagaaacagataaagagacctccttggtgaagcagacgttggcgaagctccagcaacaagagcagagggaggaggcacagtggacccccactaaactgtccagcaaaaatgtcagtggacagaccgataagtgtcgagaggaaactttcaaacaggagagccagcctcccgagaaaaatagcgggcactccacttctaagggcgaccgggtggcccagagcgaatctaagaggcgcaaggctgaggagattctcaagtctcagacccccaagggcggagacaaaaaggaaagttctaagagccttgttagacaagggtccttcacaatagagaaaccaagtcccaacatcccaatcgaactgatcccccacatcaataagcagacctcatccacccccagttcactggcgttaacttccgcctctagaatcagagagagatcagagtctctagaccccgactcatccatggacaccaccctcatacttaaagacaccgaggccgtcatggctttcctcgaagcgaaattacgagaagataacaagaccgatgaaggccctgacactccctcctataatcgtgacaatagtatatcacccgaatccgatgttgatactgcctctactatttctctggtaaccggcgagaccgagcggaaatctacacagaaaaggaaaagttttacttctctgtataaagatcggtgtagcacaggctcaccgtcaaaggacgtgacaaagtcaagcagctcaggcgcaagggaaaaaatggaaaagaagaccaaatccaggagtaccgatgttggctcgagggcagacggtaggaaatttgtccagtcctctggaaggatacggcagcctagtgtggacctgacggatgacgatcagacatcaagtgtccctcacagtgcaatctccgatataatgtctagcgaccaggaaacttatagctgcaagccgcatgggaggacaccactcacctccgctgacgagcacgtgcatagcaagctggaggggtcaaaggtcacaaagtcaaaaacctccccagtagtaagcggatctagttcaaagtctaccacattgccccgacccaggcctacccgcacctccctgctcagacgggctagactcggagaggcctcagactccgagctagcagatgcagataaggcctctgtggcaagcgaggtatccactacaagtagcacatccaagcccccaactggcaggagaaatatctcacgcatcgatctcctagctcaaccgaggaggacaaggctgggaagcttgtccgctcggtccgactctgaagccacaatttctaggtctagcgcttctagcaggaccgctgaggcaatcattcgctcaggagcgagattagttcctagcgacaaattctcccccaggatccgggcaaattctatcagcaggctctccgatagcaaagtgaaatccatgacttcagcccatggatccgctagcgctctgaaaaccacaagactccagagcgctggcagtgccatgccgacctcctcctcttttaaacacaggataaaggagcaggaagactatatccgggattggaccgcccatagggaggagattgcaagaatctcacaggatctggctctgatagcccgagaaatcaatgatgtcgccggagagatagactcagtcacttcaagcggcactgccccttccaccacagtgagcactgcggctactactccaggctctgcgatcgatacgcgcgaggaggtgggagacctccacggcgagatgcataagctagttgatagggtcttcgatgagtctctcaattttcggaaaattccacccctggttcacagcaagacaccggagggtaataacgggaggtcaggggacccacgccctcaagcggctgaacctcctgatcacctgacaatcacacggaggaggacatggagcagagacgaagtcatgggcgataacctgctactttctagtgtcttccagttttctaagaaaatccgtcagagcattgataaaaccgccggaaagatccggatcttatttaaggataaagataggaactgggacgacattgagagtaaactaagagccgagtcggaggtgccgatcgtgaagaccagttcaatggagattagctccattctccaggagcttaaacgagtagagaagcagttacaggcgatcaacgccatgattgacccggatgggacactcgaggcgctgaataatatgggcttcccttcagccatgctgccatcaccaccaaaacagaagagcagtcccgtgaataatcaccatagccccggacagactcccacccttggccagcccgaagccagggccctccaccccgctgccgtgtctgccgctgctgagttcgagaacgcggagtcagaggcagacttcagcatacactttaatagatttaacccagacggcgaagaggaggacgtgacagtgcaagagtag

SEQ ID NO: 217859 - DNA, 4461 bp, synthetic construct
  misc_feature 1..4461: note = Description of Artificial Sequence: Synthetic coding sequence
  source 1..4461: mol_type = other DNA
atgtccctgacaagctggtttctggtatccagtggcggaactagacacagattaccacgggagatgatttttgttggcagagacgactgcgagttgatgcttcagagtcgctctgtggacaaacagcatgctgtcatcaactatgacgcttctaccgatgagcacttggtgaaggacctcggctccctgaatgggacattcgtcaacgacgtgcgtatccctgagcaaacgtatattacactgaagttggaggacaagctgcgttttgggtacgatactaatctgtttactgtggttcaaggggagatgcgggttcctgaggaggccctgaaacatgagaagttcaccattcagctgcagttatctcagaaatcgtcagaaagcgaacttagtaagtcagcctccgccaaaagcattgatagcaaggtcgcagacgccgctaccgaagtgcagcacaaaacaaccgaggccctgaagtccgaagagaaggccatggatatttctgccatgcctagaggtacacctctctatggccagcccagctggtggggcgacgacgaggttgacgaaaagagagcctttaaaactaacggaaagcccgaggaaaaaaaccacgaggcgggtacttccggatgtggaatagacgctaagcaagtggaagaacaatctgctgctgctaatgaggaggtcctcttcccattctgcagagagccctcttactttgaaatacctactaaagagtttcagcaaccctcccaaataactgaaagcacaatccacgagattcccaccaaagatacccccagcagtcacatcactggcgcaggacacgcatcttttacaattgagtttgacgactccaccccaggcaaggtgaccatacgagatcatgtgaccaaatttacaagtgaccagagacacaaatccaagaagagctcccctggtactcaggacctgcttgggattcagactggtatgatggctcctgaaaataaagtggctgactggctggcccagaacaaccctccacagatgttatgggaaaggacagaagaggatagcaagtctatcaagtccgatgtgcccgtgtatctgaaaaggctgaaaggcaataagcacgatgacggcacgcagagcgactctgagaatgcaggcgctcatagaaggtgtagcaagcgcgctactctcgaagagcatcttcgcaggcaccacagcgagcacaaaaaactccagaaggtgcaagctaccgaaaaacaccaagatcaagcagtggtgtttggcgtggatgacaatcaggactataaccgacctgtgatcaacgaaaaacacaaggaccttattaaggactgggcactctcctccgcggctgcagtgatggaggagagaaagcccttaacaacctccggcttccaccactcggaagagggcacctcttcctccggaagtaagagatgggtgtcacagtgggcatcgctggccgcaaatcatacgcggcacgatcaagaagagagaattatggagttcagtgccccacttcctctagagaacgagaccgagatatctgagagtgggatgacagtgcggtccacgggaagcgccacaagtctggcatcccagggcgaacgacggcgacggacgttgcctcagctacctaacgaggagaaatccctggaatcccacagggctaaagtcgtgacacaaaggtccgaaattggggaaaaacaggataccgagctgcaggagaaagaaacccccacccaagtctatcagaaggataagcaagatgcagacagacccctttcaaagatgaatcgggctgtgaatggagagacccttaagacaggaggggacaataagacactgctgcatctgggcagctctgcacctggaaaggagaaatccgagacagacaaggagaccagtctcgtgaagcagacactcgcgaaactgcagcagcaggagcaacgcgaggaagcccagtggacccccaccaagttatctagcaagaatgtcagtggacagacagacaagtgtcgcgaggaaacatttaagcaagagtctcaaccaccggagaaaaatagcggccattcaacaagtaagggggaccgggtggcccagtccgaaagcaaacgcaggaaagctgaagagattttaaaaagccagacccccaaaggcggagataaaaaggaaagttctaagagcctggttaggcagggcagttttactatagaaaagcctagcccaaacatccccatcgagcttattcctcacatcaacaagcagacatcctcgacaccatccagcctggctctaacgagtgcctcacggatcagggagaggagcgagagcctggacccggattccagcatggatacaactcttattcttaaggatacagaggccgtcatggcctttcttgaggccaaattgcgcgaggacaacaaaacagacgagggacctgacacgcctagttacaaccgggacaactcaatctctcccgaatcggacgtggacacggcatctacaatctctctggtcacaggcgagactgagagaaaatcgactcagaagagaaagagttttaccagcctgtataaggacaggtgcagtactggatcgccatccaaagacgtgacaaagtcctcctcatccggagcacgcgaaaaaatggaaaagaaaaccaaaagtcggtcaactgatgtgggttcacgcgcagacggcaggaaatttgtgcagtcctctggccgaattcggcagccgagcgttgatctgactgacgacgatcagacttctagcgtcccccatagtgccatttctgatattatgtcgagtgaccaggaaacctactcatgcaagccacatggcagaactcctctgacaagtgctgacgagcacgtccacagtaagctcgaagggagtaaggtgactaagtccaaaactagccctgtggtcagtggttcttcatctaaaagtactactctgccgagaccgcgtccgaccagaacttccctgttgcggagagctcggcttggcgaggctagcgattctgagctggcagacgccgataaggcaagcgtggcctcagaagtctcgactacctcatcaaccagtaaacctccgaccggaaggagaaacatcagcagaattgaccttctggctcaaccaagaaggacacgacttggttctctgtcggctcggagcgatagtgaggcaaccataagccgctcgtcagcaagctccagaacagccgaagccataatccgctctggggcaaggctggtcccaagtgacaagttcagtcccagaatcagagcgaattcaatctcaaggctttcagattctaaggtgaagtcgatgacaagtgcgcacggttccgccagtgttaactccagatggcgtcgattccccacagattacgctagcacaagtgaagatgagtttggatctaatcgcaactccccaaagcatactagactgagaacaagccctgctctgaaaactaccaggttacaaagtgctgggtcagccatgcctacctcctcctcatttaaacatcgtattaaggagcaagaagactacatcagagactggacagcacaccgggaggaaattgctaggatcagtcaggatctggccctgatcgccagggagataaacgacgtggccggtgagattgactcagtcacctcctcgggcacagcaccctccactaccgttagcacggcagcaacgactccaggtagcgccatcgatacccgcgaggaacttgtcgaccgtgtttttgacgagagtctgaattttcggaagattccccctctagtgcacagtaagacaccggagggcaataatgggaggtcaggagacccgcgacctcaggccgctgagccccctgaccaccttaccattacccggagacgcacatggtctagggacgaggtgatgggagataacctccttctgagttccgtatttcagtttagtaagaaaatccgccagtccatcgacaagacagccggaaagataagaatactcttcaaagacaaagacagaaactgggacgatattgagagtaaactgagggccgaatcagaggtacccatagttaagacttcctcgatggagatttcttctatcctccaggagctaaaacgcgttgagaaacaactgcaagcgatcaacgccatgattgacccagatggcactctggaggctttaaataatatgggttttccttctgctatgctcccttctcctcctaagcagaagtcaagccctgtgaataaccatcacagcccaggccagacacctactcttgggcagcctgaggccagagcgctgcatccagcagctgtctctgccgcagctgagtttgaaaatgctgaatctgaagctgacttttccatccactttaaccgttttaatccagatggggaggaggaggacgtgacggtgcaggagtag

SEQ ID NO: 217860 - DNA, 1239 bp, synthetic construct
  misc_feature 1..1239: note = Description of Artificial Sequence: Synthetic coding sequence
  source 1..1239: mol_type = other DNA
atgcgagtgcccgaggaggccctgaaacatgagaaatttacgatccaactgcaactgtcgcagaaatccagcgagtccgaactctctaagagtgcttctgcgaaaagcatcgactccaaggtcgcagatgctgccaccgaagttcagcataagacaaccgaggccttgaaatccgaagaaaaagccatggatatcagtgcgatgccaaggggcactcccctctatggacaaccttcctggtggggtgatgatgaggtggacgaaaaaagggccttcaaaactaacggtaagccagaagaaaagaaccacgaggcaggtacaagtgggtgtggtatcgacgccaagcaagttgaggaacagtcggccgctgctaacgaggaagtactgtttcccttctgccgcgagccttcctactttgaaatcccaactaaggagtttcagcaacctagccagataactgagtcaacaattcatgagattcctaccaaagacactccctcttctcatatcacgggagctggccatgccagtttcacaattgagtttgacgactctacccccggaaaggtgactatacgagaccatgtcacgaaattcacctccgaccagcgacacaagagcaaaaaatcatcacctggaacccaggacttactcgggatacagacaggcatgatggctcctgagaataaagttgctgattggctagctcagaacaatccaccccaaatgctgtgggagcggactgaggaagattccaagagcatcaagtcagacgtgccagtttacttgaagcgcctgaaagggaacaaacatgatgatggcacccagtccgactcagagaatgccggagctcacaggaggtgcagtaagcgggcaactctggaggagcatctcagacggcatcacagtgagcataagaaacttcaaaaagtccaggccacggaaaaacaccaagaccaggccgtgacttccagtgcacaccacaggggaggacacggggttccccacgggaaactgcttaaacaaaagtcagaagagccctctgtgtccatcccttttctgcagactgcccttctccggtcaagtggctctctcggccacagaccttcacaggagatggataagatgttgaaaaatcaggcagactgtggatctgtcgccttttgcgggtttatgatctttaagctgaatctcatgattactccctttccctttatcgatctgttctcattcttctag

SEQ ID NO: 217861 - DNA, 402 bp, synthetic construct
  misc_feature 1..402: note = Description of Artificial Sequence: Synthetic coding sequence
  source 1..402: mol_type = other DNA
atgtcacttacctcctggtttcttgtgtcctctggcggtacccggcatcggctgccacgcgagatgattttcgtgggtagggatgactgcgaattgatgctgcagagtcggtctgtcgataaacagcacgccgtgataaattacgacgccagcaccgatgagcatctcgtgaaggacctcggatccctgaatggcacttttgttaacgatgtccgcatccctgagcagacctacattacgctgaagttggaagacaagttgaggtttggctatgacacaaaccttttcacagtcgtgcagggcgaaatgagagtaccagaagaggccttaaaacacgaaaagtttacaattcagcttcaattgtctcagaagtccagtgaatctgagctcagcaagagctag

SEQ ID NO: 217862 - DNA, 267 bp, synthetic construct
  misc_feature 1..267: note = Description of Artificial Sequence: Synthetic coding sequence
  source 1..267: mol_type = other DNA
atgtctctcactagctggtttttggtcagctcagggggtacgaggcacaggctgccaagagagatgatctttgtggggagggacgactgtgaactaatgctgcaatcaagaagcgtggacaaacagcacgcagttatcaactacgacgctagcactgatgaacaccttgtcaaggacctcggttccctgaatggtaccttcgtcaacgacgttcgtatccccgagcagacctatattacacttaaactcgaggacaagctccgctag

SEQ ID NO: 217863 - DNA, 336 bp, synthetic construct
  misc_feature 1..336: note = Description of Artificial Sequence: Synthetic coding sequence
  source 1..336: mol_type = other DNA
atgagcctcacatcctggttcctcgtgagctcaggaggaacaagacaccgtcttcccagagaaatgattttcgtaggtagagatgactgcgaactgatgctgcagagccggtctgtggacaagcagcatgctgtgattaattacgatgcctcaaccgacgaacacctggtcaaggacctggggtcccttaatgggacttttgtcaacgacgtcagaattcctgagcaaacgtacataacattgaagctggaagataaactcagattcggatacgataccaacctgtttacagtggtccagggcgagatgagagttcccgaggaggccctaaaatag

SEQ ID NO: 217864 - DNA, 1407 bp, synthetic construct
  misc_feature 1..1407: note = Description of Artificial Sequence: Synthetic coding sequence
  source 1..1407: mol_type = other DNA
atgagctcggaccaggagacttatagttgtaaaccacacggcagaactccgcttacttcagctgatgagcacgtgcactcaaagctggaggggagcaaggtcacaaaatctaagacctcaccagtggtgagtggctctagttcaaaatctaccacccttcctagaccacgcccaacccgcactagtctgttaaggagagctcgccttggcgaggcttccgattctgaactcgcggatgctgacaaggcctcagtggcctctgaggtttccactacatcatcgacaagcaaacctccaaccggcaggcggaacatatcccgcattgacttgctcgctcagccaagaagaacacgactcgggtctctcagcgcccgttcagactctgaggccaccatttcaagaagctcagcctcttcccgcactgcggaagcaattatccgcagcggagctcgcctggtgccgtccgataagttctctcctcgcattcgggctaacagtatttcccgactctcagatagtaaggttaaaagtatgaccagcgcccacggcagcgctagcgctctcaagacaacgcgcctgcagagcgcagggtcagcaatgcctacctcatccagttttaaacacagaataaaagagcaggaggattatatccgtgattggaccgcccatcgagaggaaattgctcggatctcccaggatcttgcattaattgccagggaaatcaacgatgtcgccggagagattgactccgtcactagctctggcacggctcctagtactaccgtgtcgacggcagctaccactcccggtagcgccattgatactcgggaagaggtaggggatttgcacggggaaatgcataagctggtagaccgtgtctttgacgagtcgctcaactttcgcaagatcccccctctcgtgcactccaagacacctgagggcaataacggcaggtctggggaccctaggccacaggcagccgaaccccctgatcatcttacgatcacccgcagacgaacctggtcacgagatgaggttatgggggacaatctcctgctctcttcggtcttccagttcagtaaaaagatacgacagtcgatcgataagacagcagggaaaattagaattttgtttaaagataaagatcgtaactgggacgatatcgaatctaagttgcgcgcagaatcggaggtgcctattgttaagacctcatctatggagatcagctccatcctgcaggagctcaaacgtgtcgagaaacagctgcaggcaatcaacgcaatgattgaccccgacgggacccttgaagctctcaacaatatggggttccccagtgctatgctcccatctccccctaaacagaaatcctcccccgtgaataatcaccattcgcccgctatgctgtag

SEQ ID NO: 217865 - DNA, 7160 bp, synthetic construct
  misc_feature 1..7160: note = Description of Artificial Sequence: Synthetic coding sequence
  source 1..7160: mol_type = other DNA
atggagacccgttcccccggtctgaataatatgaagccgcagagcctgcagctcgtacttgaggaacaggtcctagcactccaacagcaaatggctgaaaaccaagcggctagctggcggaaactgaaaaacagtcaagaagcgcagcagcgccaagcaacactcgttcgaaaactgcaagccaaggtactacagtatcggagctggtgtcaggagctcgaaaaaagactggaggctacgggcggacctatcccacagcggtgggagaatgttgaagagccaaatctggatgagctcctggtccggctggaagaagaacagcagaggtgtgaaagcctggccgaggtgaacacccaacttcgactgcacatggagaaagctgatgtcgtgaataaggctctgcgcgaagatgtggaaaaattgacagtcgattggagtagggccagagacgagctcatgcggaaagagagccagtggcaaatggagcaggagttctttaagggatatctcaaaggggaacatggaagacttctctctttgtggagggaggttgtcacatttcggaggcactttctggaaatgaagtctgctacagatcgcgatctgatggaactgaaagcagaacacgtacggttgagcggaagcttgctgacctgttgcctgcggctcaccgtgggtgcccagtctcgcgaaccgaacggctcaggcagaatggacggccgagagcccgctcaattattgctcttactagccaagacccaggagctcgaaaaagaagcacatgagcgttctcaggaactgatccaactgaagtctcagggtgacctcgagaaggcggagctgcaggatagggttaccgagctctctgcgctgctgactcagagccagaagcagaatgaggactatgagaagatgatcaaggctcttcgcgaaacagtcgagatcctggagacaaaccacacagagctgatggagcacgaggcttctctctcccgaaatgcgcaggaagagaagctgtctctgcagcaggtaatcaaggacatcactcaggtcatggtcgaggaaggcgacaacatcgcccagggctccgggcatgaaaacagtctggagctggactcgtcgatcttttctcagttcgattaccaggacgccgacaaagcactcaccctggttcggagcgtgctgactcgcagaaggcaggctgtgcaagacctaagacaacagctggcagggtgtcaggaggctgttaatttgctgcagcagcagcacgatcagtgggaggaggagggaaaggcactgaggcaacgactccagaagcttaccggcgaaagggataccctagctggacagacggtggaccttcagggcgaggtggattcacttagcaaagagagagaactgctgcagaaagcaagagaggagctccggcaacagcttgaggtgctcgagcaagaagcatggaggctgcgtagagtgaacgtggaacttcagcttcaaggagacagcgcgcaggggcagaaagaggaacagcaagaggagctgcacctggccgtccgggaaagggaaagactgcaggagatgttgatgggactggaggcgaagcagagcgaatctttgagcgagctaataacactgcgagaggccttggagtcctcacatctggagggcgagctcctaagacaggagcagacggaggtgactgcggctctcgcgagggcggagcagtcgatcgccgagctgtcctctagtgaaaatacactgaaaactgaagtcgcagatcttcgggcagctgcagtgaagctctctgccctcaacgaagcactggctctcgacaaggtgggactgaaccaacagctgctgcagttagaagaggaaaaccagtcagtgtgttctcggatggaagctgccgagcaagctagaaatgcattacaggtagatctggcggaagccgagaaacgcagagaagctctctgggaaaagaacacccacttagaagcacagctccagaaggccgaggaggccggagccgaactccaagcagacctgcgggacatccaagaagagaaggaggagatacagaagaaattaagcgaatcaagacatcagcaggaagctgctaccacacaactagaacagctccaccaagaggcaaagcggcaggaggaggtcctggcacgggcagttcaggaaaaggaagccctggtcagagaaaaggcagccttggaagtcaggctgcaggctgtggagagggataggcaggacctggccgaacagcttcagggactcagctcggctaaggaactccttgagagttctctgtttgaagcccagcagcaaaactcggtcatcgaggttaccaagggccaattagaggtgcaaatccagaccgtcacccaagcaaaggaggttatccaaggcgaggtgagatgtctcaagctcgaactggatacagaaaggagtcaagcagaacaagagagagatgcagccgcacgccagttggcacaggccgagcaagaagggaaaacggcccttgagcaacagaaagctgctcacgagaaagaagtgaaccagctccgcgaaaagtggatgcaactcgaaacagagaaagagagggttagtctcctcgaaactctccttcagacccaaaaggagctggcggatgcgagccagcaacttgaacgcttgcgtcaggacatgaaggtgcagaaactgaaagagcaggaaactaccggaatcctgcagacccaactgcaggaggctcagagggaattgaaggaagccgcaagacagcatcgggacgacttggcagccctccaggaagagtctagctccctgcttcaggacaaaatggatctgcaaaagcaggtggaggacttaaaatctcagctggtggcccaggatgacagtcagagactggtcgagcaggaagtgcaggagaagctgcgagaaacacaagagtacaacagaattcaaaaggaactcgaacgcgagaaggccagtctcaccctgagtctcatggagaaggaacagcgcctgctagtgctccaggaagcggacagtatacgccagcaggaactctccgcgttacgtcaagacatgcaggaagcacagggggagcaaaaggagctcagtgctcagatggagctgctgaggcaagaagtgaaagaaaaagaagcagacttcttagctcaggaagcacagctgcttgaggagctggaggcgagccatattacggaacaacagctgagagcttcgttgtgggcccaggaggccaaggccgcacagctgcagctgaggttacggtctactgagagccaactcgaagctctcgctgctgaacagcaacccggaaatcaagctcaggctcaagctcagctggccagcctgtattctgctctgcaacaggcactgggttctgtgtgcgaaagtcggccagaattgtctggcggaggtgacagcgctccatctgtttggggcctggagccggaccagaatggcgctagatcgttgtttaaacgcggtccattgctgactgctctctccgcagaggcagttgccagcgcactccataagctgcatcaggatctctggaagacacaacagactcgtgatgtgctcagagaccaggttcagaagcttgaggaacggctcacggacaccgaggcagagaaatctcaggttcacaccgaactgcaagatctccaaagacagctgtcgcagaatcaagaggaaaaaagtaaatgggaaggaaagcagaactcactagagagtgaactgatggaactgcacgaaactatggcgtctctgcagagtcgccttcgcagagccgagcttcagcgaatggaagctcagggcgaacgtgaactcctccaggcagcaaaggagaacctgaccgcacaggtcgagcacctgcaagccgctgtagtggaagctagggctcaggccagcgccgcaggcatccttgaagaagacctcaggaccgctcggagtgcactgaaattgaagaacgaggaggtggaatcagaacgagagagggcccaggcactgcaggagcaaggtgagttaaaagtggcgcaggggaaagccctccaggaaaacctcgcacttctgacacagaccctagccgagagagaggaagaggtggagacactgagaggacagattcaagaacttgagaaacagcgggaaatgcaaaaagctgctctcgaactgctgtctctggatctgaagaagcggaaccaggaggtggacctgcaacaggaacagatccaggagctcgagaagtgcagaagtgttcttgagcacctccctatggcggtgcaagagcgggagcaaaagcttactgttcagagggaacagatcagggaattggagaaggatcgggagacccagcggaatgtcctcgagcaccaactgctggaactggagaaaaaggaccaaatgattgaatcacagcggggtcaggtgcaggacctgaaaaagcaactcgtcaccctcgagtgtctggccctggagctggaggagaaccatcataaaatggaatgtcagcaaaagctgataaaggaactcgagggccaaagggaaactcagcgcgtggctttgacacacctgacactcgatcttgaggagaggagccaggagttacaggcacagtcatctcagattcatgacctagaatcgcattctaccgtcctggcgagagagttgcaggaacgggatcaggaggtgaagtcccagagggaacagatagaagagctccagcggcaaaaggagcatcttacccaagacctcgaacggagagatcaggagcttatgctgcagaaagaacggattcaggtgttagaggatcagcgcacacggcagacaaagattcttgaagaggatctagagcaaattaagttgtccctgagggaacgcggtcgtgaattgactacacagaggcaactcatgcaggaacgagctgaagagggaaaaggccctagcaaggcacagcgcggttcccttgagcatatgaagctaattcttcgggacaaagagaaggaggttgagtgtcagcaggagcacatccatgaattgcaggaactcaaagatcagctcgagcagcagttgcagggactacaccgaaaggtgggcgagacaagcctgttgctcagccagagggaacaggaaattgtagtcctccagcagcaactgcaggaggctagagagcagggggagctcaaggagcagtctctgcagtcccagcttgatgaagcacagagagcactggcgcagagggaccaggaactggaggctcttcaacaggaacaacagcaagcccaagggcaggaagagagagttaaagagaaagcagatgccctacagggagctctcgaacaggcccacatgactcttaaggaacgccatggggagcttcaagatcataaagagcaggccaggaggctcgaggaagaactggctgtggaggggcgacgagtgcaggctctcgaggaggtcctaggtgacttgcgcgctgaaagtcgcgagcaagagaaagccctccttgctctgcagcagcaatgtgccgaacaggctcaggagcacgaggttgaaaccagagccctgcaggatagttggctgcaggcccaggctgtattgaaagagcgcgatcaagaactggaggccctacgggcagagtctcagtcgagccgccatcaggaagaagcagcacgggcaagggcagaggctctccaggaagccctgggaaaggcccacgcagctctgcagggcaaagagcagcacctcctggagcaggccgagctttcccgtagccttgaggccagtaccgctacattgcaggctagcttggatgcctgccaggcccattctagacagttagaagaggctctgcggattcaagagggagaaatccaagatcaggatctccgctatcaggaggatgttcaacagctgcagcaggccctcgcgcaaagagatgaggagttgcgacatcagcaggagcgggagcaactgttggaaaaatctttggctcagcgggttcaggaaaatatgattcaggaaaagcaaaacttgggccaggaaagagaggaggaagaaatccgtggcctgcatcagagcgtcagagaactccagctcaccctcgcgcagaaggaacaggaaatcctggagcttagagaaacgcaacaacggaataatttggaagccctgccgcactcccataagacttcacccatggaagagcagtcactgaagctcgactctttggagcctaggctgcagcgcgagcttgaacgtctacaggctgcactgcgccagacagaagctagggagattgaatggcgcgagaaagctcaggatctggctttatctcttgcccagaccaaagccagcgtctcatccctgcaggaagtggccatgttcctgcaggcttctgttctggagagagactctgagcagcaacggcttcaggatgagctcgagctcacgagaagagctttggagaaagaacgcttgcactctccaggcgctacatccactgccgaacttgggtcaaggggtgagcagggtgtacagctgggcgaggtctccggagtcgaggctgaaccttcccctgatggaatggagaagcagagctggagacagcgcctggaacacttgcaacaggctgttgcccgactggagatcgacaggtctaggctgcagagacacaacgtccagctccgtagcacactcgagcaagtggaacgggagaggcggaagttaaagagggaggctatgcgtgcagcccaagccggatcgttggaaatttcgaaagccactgcctcctctcccactcaacaagacggtcgaggacagaaaaatagcgatgccaaatgcgttgccgaactgcagaaggaggtggttcttttgcaggcccagttgacacttgaaaggaaacagaagcaggactatatcactagatccgctcaaacctcccgagagttggccggacttcaccactcgctgagccattcactactggccgttgcacaggccccagaggctaccgttctggaggccgaaacaaggcgattggacgaatcactgacgcagagtctgacttccccaggacccgtcttgctgcaccctagtccctcaaccacccaggctgcctctaggta

SEQ ID NO: 217866 - DNA, 1020 bp, synthetic construct
  misc_feature 1..1020: note = Description of Artificial Sequence: Synthetic coding sequence
  source 1..1020: mol_type = other DNA
atggagaccagaagcccgggactcaacaacatgaaaccccagagcttacagcttgtcctcgaggagcaggtcctagctctccagcagcaaatggccgagaatcaggctgccagttggagaaagctgaagaattcccaagaagcgcaacagcgccaggcgaccctggttaggaagctccaggctaaggtacttcagtaccgtagttggtgtcaggagctggagaaacggctggaagctactgggggaccaataccacagcggtgggaaaacgtggaggaacccaatctggatgagctgctggtccgattggaggaggagcagcagagatgtgaatctctggccgaggtgaacacgcagcttcggctgcatatggaaaaagccgatgtcgtgaataaggccctgagagaggatgtcgagaaacttacggtggactggtcccgcgcacgggacgaattaatgcggaaagaaagccaatggcagatggagcaagaatttttcaagggttatctcaaaggggaacacgggaggctgcttagtttatggcgcgaggtggtcactttccgaagacacttcctggaaatgaaaagtgccaccgaccgagatctgatggaattgaaggcagagcacgtgaggctgtcaggttcgctgcttacctgctgtctgcggttaaccgtgggtgcccagtcaagagaacctaacggatcaggacggatggacggccgagagcccgcacaactcctcttgctcctggcgaagacccaagagctagagaaagaggcccacgagcgcagccaggaactgatccagctgaaatcccagggtgatctggagaaagcagaactccaggacagagtgacagagctgtctgctttattgacccagtcacagaagcagaatgaagattacgagaaaatgattaaagccctcagggagacggttgagatcttggtccatgaccctctcctgtggaagggcgtcggccgaggactggtgggatccctttgtttcatggaccggtag

SEQ ID NO: 217867 - DNA, 7328 bp, synthetic construct
  misc_feature 1..7328: note = Description of Artificial Sequence: Synthetic coding sequence
  source 1..7328: mol_type = other DNA
atggaaaccagaagtcccggattgaacaacatgaaacctcagtcactgcaactggtgctcgaagagcaggtgttggccctgcagcaacagatggcagaaaaccaggccgcatcatggcgcaaactgaagaactcccaggaggcccagcagcgccaggctacgcttgtgcggaaattgcaggccaaagtgttgcaataccggagctggtgccaagagctggaaaagcgccttgaggcaacaggtgggcctataccccagcggtgggagaacgtggaagaacccaatttagacgaattactagtgagactggaagaggaacagcaaagatgtgaatcgctcgctgaagtgaatacgcagcttcgcttacacatggagaaggctgacgtcgtcaataaggcattgcgggaagatgttgaaaagctgactgtggactggtcccgagctcgggacgagctgatgcggaaagagagccagtggcaaatggagcaggagttttttaagggataccttaagggggagcatggaagactcttgtccctttggagagaagtggtgacctttcgtaggcactttctagagatgaaatctgcaaccgatcgagacctgatggaacttaaagcggaacacgttcggctgagcgggtctctcctcacttgttgcctgcgcctcactgtgggcgctcagtctagagaaccaaatggtagtggtcgtatggatgggcgagagcctgcccaacttctcttactcttagctaaaacacaggagctggagaaagaggcacatgagcgctcccaggagcttatccaattaaagagtcaaggagatctggaaaaggcggaacttcaagatagggtgacagagctatccgctttgctgactcagagccaaaagcagaacgaggattatgagaaaatgatcaaagcactccgggagactgtcgaaattctcgagacaaatcacactgagctcatggagcatgaggccagcttaagccggaatgcacaggaggaaaaactgagtctacaacaggtaatcaaggatatcacccaggtgatggtagaggaaggtgataacattgcacaagggagcggccatgagaactcacttgagttagattcatcaatcttttcgcaattcgattaccaggacgccgataaagccctgactttggtgagatctgtcctgacacggaggagacaggccgtccaggatttgaggcagcaattggctgggtgccaagaagccgttaacctgctccaacaacagcacgaccagtgggaggaagagggaaaagccctgaggcaacgcctccagaagcttacaggtgagcgggataccctggctggccagacagtggatttacaaggggaggtggatagtctctcaaaggagagagaattgttgcaaaaggccagggaagagctgcgccagcagctggaggtgctagagcaggaagcctggagattgcggagggtgaacgtggaattgcaactacaaggcgactcggcccaggggcagaaagaggagcagcaggaggagcttcatctggccgtgagggagcgcgagagactccaggagatgttgatggggctggaagcgaagcagtctgaaagtctttcggagttgattacactgcgagaggccctcgaatcgagtcatctggaaggagagctgctccggcaagaacagaccgaggtcacagctgccttggctagagccgaacagtccattgccgagttgtcttcttcagagaacacattgaaaactgaggtggccgatctgcgggcagcagctgtgaagctttctgcattaaacgaagctttggcattggacaaggttggtctcaaccagcaactgttacagctggaggaagagaatcagagcgtctgttctaggatggaagcggctgagcaagcacgtaatgccctccaggtcgacttagccgaagctgaaaagaggcgtgaagccttgtgggagaagaacacacacctagaggcacagctgcagaaggccgaggaagccggtgccgagctgcaggcagacctcagagacatccaggaggagaaggaagagattcaaaagaagctctccgagagccgccaccagcaagaagccgctacaacgcaattggaacaactccaccaggaggctaaacgacaggaagaggtactggctcgggcagtgcaagagaaagaagccctcgtgcgtgaaaaggctgccttggaagtaaggttacaggcagtggagagggatagacaggacctcgcagaacagttgcaaggactgtcttccgcaaaagaactcctcgagtctagcctgttcgaagcccaacagcagaactctgtcatcgaggtcactaaagggcaactcgaagtgcagattcagaccgtgacccaagccaaggaagttatacagggggaagttaggtgcttaaaacttgaattagatacagagcgcagccaggcggagcaggagcgggatgctgccgcacgccagctcgcccaggccgagcaggaaggaaagaccgccctggaacaacaaaaagccgcacacgagaaggaggtcaaccagttaagggagaaatgggagaaggagcggtcatggcaccagcaggaactggccaaggcgctcgagagccttgagagggaaaagatggagcttgaaatgagacttaaggagcaacagaccgagatggaggccatccaggctcagcgggaggaggagcgcactcaggccgaatccgccctgtgccagatgcagctggagactgaaaaggagcgagtgtcactgctcgagactcttttacagacccagaaggagctggcagatgcttctcagcagctcgagcgattacgccaagacatgaaagtccagaagcttaaagagcaggaaacgaccggcatcctacagacacagttgcaggaggcccagcgcgagctgaaagaggccgcacggcagcacagagatgacctcgcggctctgcaggaggaatcaagctctctcttacaggataagatggatctgcagaagcaggtggaggacttgaaaagccagcttgtggcacaggatgactcccagcgtctcgtcgagcaggaagtccaggagaaattacgcgaaacccaggaatacaacagaattcagaaggaactcgaacgcgagaaagcctctctaactttaagcctgatggaaaaagagcaaagacttctcgttctgcaggaggcagatagcatacggcaacaggagctgagcgcccttagacaggacatgcaggaggcgcagggtgaacagaaagagctgtctgctcagatggagctcctcaggcaggaagtgaaagaaaaggaagcggatttcctagcccaagaggcgcagctcctggaagaattggaggctagtcacataaccgagcagcagcttcgagctagcttgtgggcccaggaggcgaaagctgcacagctccagctgcgccttcggtcgaccgaatcccagcttgaagctttggctgctgagcagcagcccggaaatcaggcgcaggcacaggcgcagctggcatctctgtatagcgctcttcagcaggccctggggtcggtgtgcgagtcccggccagagctgagcggcggtggtgactcagctccttcggtgtggggcctcgaacccgatcaaaacggtgctcggtccctcttcaagcggggaccattactgaccgcattatctgccgaagccgtcgcctccgctctgcataaattacaccaggacctatggaagacacaacagaccagggacgtccttagggatcaagtgcagaaactggaagaaagattgacagatacggaggccgagaaatctcaggtgcacaccgagcttcaggatttacaaagacagctgagtcagaatcaggaggagaagagtaagtgggagggcaaacaaaacagtctggagtccgaactgatggagctgcacgagactatggcttcactccagagtcgcctccgaagggccgagcttcaacggatggaagctcagggagaacgtgagctcctccaggcagcaaaggaaaacctgactgctcaggtggagcacctacaggccgctgtggtcgaggctagagcacaagcatcggccgcaggcatcctggaggaagacctccgtaccgcacgttccgccctgaagctgaaaaacgaagaagttgaatccgagagagagagggcacaggcattacaggagcagggagaactaaaggtggcccaggggaaggccctgcaagagaacttggcactattgacgcagacactcgctgaacgcgaagaagaggtggagacgctgcgtggccagattcaagagctagagaaacagagggagatgcaaaaagccgctctggaactgctgtccttggacctcaaaaagcgtaaccaggaagtcgaccttcagcaggagcagatccaagaattggagaagtgcaggagcgtgttggagcacctgcctatggcagtacaagagcgagaacaaaaactgactgtgcagcgagagcagattagagagctggaaaaagaccgagaaactcagcgaaatgttctagaacatcagctgctggagttagaaaagaaagatcagatgatcgagagccagagggggcaggtccaggatctgaagaaacagctagtcacccttgaatgtcttgcattagaacttgaagagaatcatcacaaaatggagtgccagcaaaagcttatcaaggagctcgagggtcaacgcgaaacacaaagagtggctcttactcacctgacgctggatctagaggagcgtagtcaagagttacaggctcaatccagccagattcacgatctcgagtcccactctaccgtgctcgcacgtgagttgcaggaaagggaccaggaggttaaatcacagagggaacagattgaggagctgcagaggcagaaagagcatctcactcaggacctagaacggagggaccaagagctcatgctgcagaaagaaaggatacaggtcttggaagaccagaggactaggcaaacaaaaattctagaggaagatctagagcagatcaaactgtccctccgggaaagaggtcgggagctgacaacccagcggcagctgatgcaggaacgtgctgaggagggaaagggaccatcaaaagcacagcgaggttcgctggagcacatgaaattgattctgcgggacaaggaaaaggaggtagaatgtcagcaggagcatatccacgaactgcaggagttgaaggaccagctcgaacagcagttgcaggggctccaccggaaggtgggggaaactagcctattactcagccagagagagcaggaaatcgtggtccttcagcagcagctgcaagaggcacgagagcaaggcgagctcaaggaacagagcctccaatcgcagctggatgaagcacagagggctctggcccagcgtgaccaggaattagaggcactgcaacaagagcaacagcaggcccagggccaagaagaacgcgtgaaggaaaaagccgacgcactgcagggcgcactggagcaggcccatatgactcttaaggagcgccatggagaactccaggaccataaagaacaggccagaaggttggaagaggagctcgctgtggaaggtcggagggttcaagcccttgaagaggttctgggagacctacgcgcagagtcacgcgaacaggaaaaagctcttttggccctgcaacagcagtgcgctgaacaggctcaggagcatgaggtagagactcgggctctccaggactcctggctacaggctcaggccgtgttgaaagaaagagaccaggaactggaagccctgagagcagagtctcagagtagccggcatcaggaggaagccgcacgggctagggcagaggctctccaagaagctctgggaaaggcccacgccgcactccaggggaaggaacaacatctgctggagcaggcagaactgagccggagtctggaggcttctaccgccacactgcaggctagcctcgacgcctgtcaagctcacagccggcagctggaagaagcattacgcattcaggaaggtgaaatccaagatcaggatctccgctatcaggaagatgtccagcagttgcaacaggctctcgcgcagcgagatgaagagttaaggcaccagcaagaacgagaacaactgttagaaaagtccctcgcccagcgcgtgcaggagaacatgattcaagagaaacaaaacctcggccaggagcgggaggaagaggaaattcgaggcctccatcagagtgttcgggagctgcaactgacgcttgcccaaaaggaacaggagatccttgagctcagggagactcagcagcgtaataacctggaggccctgcctcactcccacaagacctctcctatggaagagcagtcgctgaagttggatagccttgagcccagactccagagagaattggaacggctacaggctgccctgaggcagacagaagccagggagatcgagtggagagagaaagcccaggaccttgccctatctctagcgcagactaaggcctcggtctcctcactccaggaagtagcaatgtttctacaggccagtgtgctcgagcgggattcagaacagcagcggctccaggatgagctggaactgacacggagagctctcgaaaaagaaaggttgcatagccctggtgcaacgtccaccgctgaactgggaagccggggagagcagggagtgcaattgggtgaagtttctggagtggaggctgagccgagccctgatggaatggaaaagcaatcatggagacagaggctggagcacctccagcaggctgtggcgaggctggagattgacagatccaggctgcagcggcataatgttcagttgcgctccaccctggaacaggtcgagcgcgagcgcaggaagttaaagagggaggccatgagggccgctcaggctggttctctggaaatttctaaagcaaccgcttctagtcccacccagcaggatggacggggacaaaaaaactcagatgctaaatgcgtggctgaactgcaaaaagaagtagtcctgttgcaggcacagctaactctcgagcgcaagcagaaacaagactacattactagaagcgcacaaacttccagagagcttgcaggtctgcaccactctctgtctcactctctgctagctgtagcacaagccccagaagctacagtcttggaggcggagaccaggcggctagatgagtctcttacgcagtccttgacatcacctggccctgtgttactgcacccgtcaccttccacaacgcaggcggcatcccgata

SEQ ID NO: 217868 - DNA, 345 bp, synthetic construct
  misc_feature 1..345: note = Description of Artificial Sequence: Synthetic coding sequence
  source 1..345: mol_type = other DNA
atggaaacgagatctcctggcctgaataacatgaaacctcagagcctccagctggtgctggaagaacaagttttggctcttcaacaacagatggcagagaaccaggccgctagttggagaaaattgaagaactcccaagaagcccagcagcggcaagccacactcgtgcgcaagctgcaggccaaggtcctgcagtaccggtcttggtgtcaggagctcgaaaagagattggaagccactgggggaccaatccctcaacggtgggagaatgtagaggagccaaacctcgatgaattgctggtgagattggaggaggagcaacagcgatgtgaaagcttagcgtag

SEQ ID NO: 217869 - DNA, 2055 bp, synthetic construct
  misc_feature 1..2055: note = Description of Artificial Sequence: Synthetic coding sequence
  source 1..2055: mol_type = other DNA
atggaaacccggtcccctggcctgaacaatatgaagccacagtcactgcagctggtcctggaggagcaggtgctagccctccagcagcaaatggccgagaaccaggcagccagctggagaaaactcaagaattcccaggaggcccagcaaagacaggcaaccctggtcaggaaacttcaagctaaggtgttgcagtatcggagctggtgtcaggagctggaaaagcggcttgaagcaacaggcggtcccataccacaaaggtgggaaaacgtggaggagcccaaccttgatgaactgctcgtgcgcttggaagaggaacaacagaggtgtgagtcacttgctgaagtaaacacgcaactcagactccatatggagaaagccgacgtagtcaacaaggcccttagagaggacgttgagaaactcaccgtagactggtcccgcgctagggatgagcttatgcgtaaggagtcacaatggcagatggagcaagaatttttcaagggctacctgaaaggggaacatggcaggctgcttagtttgtggagggaggtcgtcacgtttcgaaggcattttctcgagatgaaatcagcgaccgacagggacctcatggaactgaaggcagaacacgtgaggctttctgggtcattactgacttgctgtttgcggctcacagtcggagctcagagccgggagccaaacggctccggtcgcatggatggacgcgagccagctcagcttcttcttttactagcaaagacccaggaactcgagaaggaagcacatgaacgatcacaagagttgattcagctgaaaagccagggcgatctggagaaggccgaactccaggaccgtgtgaccgagttgtcagcactgttgacacaatctcaaaagcagaacgaggactatgagaagatgatcaaggcgcttcgggagacagttgagatccttaccaaccacaccgaattgatggagcacgaagcctccctgagccggaatgcccaagaagaaaagctctcactccagcaggtgattaaagacatcacccaggtgatggtagaggaaggcgataacattgcacaggggtccggacatgagaattccctggaactggattcctctatcttctcacagttcgactaccaggacgccgataaagctttaacactcgtacgttccgttctcacacggcgtcgacaagcagtccaagatctgcgccaacagctggcgggttgccaagaggctgttaatcttttgcagcaacaacatgaccagtgggaagaggaaggaaaagctctgaggcaaaggctgcaaaagctaacaggcgaacgtgacactctcgcgggtcagacagtcgatctgcagggagaagtggactctctgagtaaagaacgggagctgcttcaaaaagctcgcgaagagctgcgacagcaactcgaggtccttgaacaagaggcctggaggctgcggagggtgaatgtggagctgcaactgcagggcgacagcgctcagggccagaaagaggagcagcaagaggaacttcacttagcagtgcgcgagcgcgagaggctacaagaaatgctgatgggactcgaggcaaagcagagcgagtctttgtctgagcttatcaccctgcgcgaggctttagagtccagtcacctggagggcgagcttctgcgccaggagcagacagaggtcaccgcggcactcgccagggccgagcagagcatcgcagagctgtcatcctccgaaaacacgctcaaaacagaggtggccgacttgcgagcagcagctgtgaaattgtcagcccttaacgaggcactggcgctggataaagtcggactcaaccagcagctactgcaactggaagaagaaaatcagagcgtgtgttcccgaatggaggctgcagaacaggccagaaacgccctgcaggttgatctagcagaagcagaaaagagaagggaagctttatgggagaaaaatacacatctggaggcacaactgcaaaaggctgaggaggctggcgctgagcttcaagccgacctcagagacatctag

SEQ ID NO: 217870 - DNA, 495 bp, synthetic construct
  misc_feature 1..495: note = Description of Artificial Sequence: Synthetic coding sequence
  source 1..495: mol_type = other DNA
atggaaactcgatcacccggattgaataacatgaagccacagtcattgcaactcgtgctagaggagcaagtgctggcgctgcagcagcaaatggcggagaaccaggccgcaagctggaggaagctcaaaaactctcaagaagctcagcagaggcaggccacccttgtgcgcaagctccaggccaaggtcctgcagtataggagttggtgtcaagagcttgaaaaacgactcgaagctacagggggaccaatcccgcagcgatgggagaatgtggaggagccaaacctcgacgagctcctggttcggctagaggaagagcagcaaaggtgtgaatctttggcagaagtgaacacccagctgaggttacacatggaaaaggctgacgtagtaaacaaggcccttagggaggacgtcgaaaaactgaccgtggactggagcagggcgagggatgaactgatgagaaaagaaagccagtggcagatggaacaggaatag

SEQ ID NO: 217871 - DNA, 1617 bp, synthetic construct
  misc_feature 1..1617: note = Description of Artificial Sequence: Synthetic coding sequence
  source 1..1617: mol_type = other DNA
atggaaacacggagcccagggctcaacaacatgaaaccccaaagcctgcagctggtgctggaggaacaggttctcgccctacaacaacagatggccgagaaccaggccgcttcctggaggaaactcaagaactctcaagaggcccagcagcggcaggccaccctcgtgaggaagttgcaggcaaaagtcttacaataccgcagctggtgccaggagttggagaagaggctggaagcaaccggcggacctatcccacagcggtgggagaatgtggaggagcccaacctggatgagctactggtacgacttgaggaagagcaacagagatgcgagtccctggcagaagtgaacacccaacttagacttcacatggaaaaggccgacgttgttaacaaagctctcagggaggacgtcgagaagctcacagtcgattggagtcgtgccagagatgaactgatgcgcaaggagagtcagtggcaaatggaacaggaattttttaagggctacctcaagggggagcatgggcgtcttctgagcctttggcgggaggtcgtgacttttcgcagacatttcctggagatgaaatctgctacagatcgcgatctgatggaactcaaagcagagcatgtgagattgtcagggtctctgctgacctgctgcctgcgattaacagtgggcgctcaatcccgagaacctaacggctctggaagaatggatggtcgggagcctgcccagctgctgcttctgcttgctaagactcaagagttggagaaggaagctcatgagcgctcacaggagctcatccagctaaagtctcagggggatctggaaaaggccgagctccaggacagagtgactgagttgtcagcactgctgacacagtctcagaaacaaaatgaggactacgagaagatgatcaaagccctgagagaaaccgtggagatcttagagacgaatcacactgagctgatggagcatgaggccagcctttctcgcaatgcccaggaagaaaagctgagcttgcagcaagtgattaaagacattactcaggtgatggtcgaggagggcgacaacatcgcccagggatccggtcacgaaaattcccttgaattggacagcagtatcttctctcagttcgattaccaggatgctgataaggctctgaccctggtacgcagtgttctaactcgaagaaggcaagcagtccaggacctccgccaacagctggcaggctgtcaagaggctgtgaatctgttgcagcaacagcacgatcagtgggaagaagagggcaaggccctgaggcagcggctgcagaagttgactggcgaaagagatacactcgcaggacaaacagtggatctccagggcgaggtggacagtctttcgaaggaacgcgaactgctgcagaaggcccgagaagagttgcgacaacaactcgaagttcttgagcaggaggcatggcgtttgcgaagagtgaatgtggagcttcaactgcagggcgattccgctcagggacagaaggaggaacagcaggaggagctccacctggccgttagagagagggagaggctgcaatcgtcccagcttcagagctgccgagttttaaagaccccttag

SEQ ID NO: 217872 - DNA, 7445 bp, synthetic construct
  misc_feature 1..7445: note = Description of Artificial Sequence: Synthetic coding sequence
  source 1..7445: mol_type = other DNA
atgccgcctaatattaactggaaggagattatgaaggtggaccccgatgatctcccaagacaggaagaactcgccgataatttactcatctctctttcaaaagtggaggtgaatgaactcaaaagtgagaagcaggaaaatgtgatccatctatttagaattactcagtccttgatgaagatgaaggctcaagaagtggagttagcgctggaagaggttgaaaaggccggtgaggagcaggcaaagttcgagaaccagcttaaaaccaaagttatgaaacttgaaaatgaactggaaatggctcagcagtctgctggagggcgtgacacaagattcctgagaaatgagatctgccagctagagaaacaactcgagcaaaaagaccgggaattagaggacatggagaaggagctcgagaaagagaaaaaagtcaatgagcagctagccttacggaacgaggaagcagaaaatgaaaactccaagctgcgccgtgagaacaaacgactcaagaagaagaatgagcaactctgccaagacattattgactatcaaaagcagattgactcacagaaagaaaccttgctgtcacgcagaggtgaggatagtgactaccggtcacaactatcaaagaaaaactatgagctgatccagtacctggacgaaattcagacccttacggaggcaaacgagaagattgaagttcagaatcaggaaatgagaaaaaatctggaagagagtgtacaggagatggagaaaatgaccgatgagtacaacaggatgaaagctattgtgcaccaaactgataatgtgatcgatcagctaaagaaagagaatgaccactatcagctccaggtgcaggaactcacagacctacttaaatcaaagaacgaggaggacgatccgatcatggtggcagtgaatgcaaaagtcgaggagtggaaacttattctctcatcaaaagatgacgagattatcgagtatcaacagatgctgcacaatttaagggagaagctcaagaatgcccagctggatgccgataagtccaatgtgatggccttgcagcaggggattcaggaaagagactcccagattaagatgctaactgagcaggtcgaacagtacaccaaggagatggagaaaaacacctgcattatagaggacctgaaaaatgaactccagcgtaataagggcgcaagtaccttatcccagcagacccatatgaagatccagagtactctagacatcctgaaagagaagacaaaagaggccgaaagaaccgccgagctggctgaggctgacgcaagagagaaggacaaagagctggtcgaggccttgaaaaggctgaaggactatgagagcggtgtttacggcctggaggatgcagttgtggagataaagaactgtaagaaccaaatcaaaatcagagacagagaaattgagatcttgaccaaagagataaacaaactggaattgaaaatctccgacttcctggacgaaaacgaggccttgcgtgaaagagtgggattagagccaaagaccatgattgatctcaccgagttccggaacagtaaacatcttaagcagcaacagtaccgcgcagagaatcagattctgttgaaggaagcatcgatcgaaagtctagaggaggaacgcctcgacctaaagaaaaaaatccgacagatggctcaggaaaggggaaagagaagcgctacatcaggtttgaccacggaggacctaaacctgactgagaatatttcccaaggcgatagaatatctgaacggaagctagacctgctgtctttaaaaaacatgtctgaagctcagagcaagaatgaattcctgtcaagagaactcatcgagaaagagcgcgatttggaacgttccaggacagtgatcgccaagttccagaacaagcttaaagaactcgttgaggaaaataagcagctggaggagggtatgaaagagatcttacaggcaattaaggagatgcagaaggaccccgacgtcaagggcggagaaacatccttgataatccctagcttggagcggctcgtcaacgcgatcgagagcaagaacgcagagggcattttcgatgcttccctgcatctgaaagcgcaggtcgatcaactcactggacgcaatgaggaacttaggcaggaactgcgcgagagccggaaggaggctattaactacagccaacaacttgctaaagcgaacttgaagatcgaccatcttgaaaaagagacatctctgttgaggcagtcagaaggatcaaatgtggtgtttaaagggatcgatctgcccgacggaatcgccccaagcagcgcatctattataaacagtcaaaatgaatacttgatccacctccttcaggagctggagaacaaagagaagaagttaaagaatttggaggactctttggaggactataatcgaaagtttgccgttattcggcaccagcagagcctcctgtacaaggaatacttgtcagaaaaggagacctggaagaccgaatcaaagactataaaggaagaaaaacgcaagctggaggaccaggtgcagcaagatgccattaaggtcaaggagtacaataacctgctgaatgccttgcagatggattccgacgagatgaagaagatactggctgaaaactctcggaagattaccgtgctgcaagtcaatgagaagtctctaatccgacaatacaccaccctcgttgagctggagagacagttgcggaaggaaaacgagaaacagaagaacgagctcttatctatggaagctgaggtttgtgagaaaatcggttgtctgcaacggtttaaggagatggctatctttaagattgcagctttacaaaaggtggtggacaacagcgtgtcactatctgaactcgaacttgctaacaagcagtacaatgagctcactgccaaatatagagatattcttcagaaggataatatgctcgtgcagcggacgtctaaccttgagcatcttgaatgcgagaacatctctctaaaggagcaagtagaaagtatcaataaggaactggagatcaccaaagaaaagctccatacaattgaacaggcctgggagcaagaaaccaagctgggcaacgagagcagcatggataaggcaaaaaaatctattaccaactctgacattgtctccatctctaaaaagatcaccatgctagagatgaaagagctcaatgaacgacagagagctgaacattgtcaaaaaatgtacgaacacctgagaacaagtctcaaacagatggaagagagaaattttgaactggaaaccaaatttgccgagcttacaaagatcaacttggatgcgcagaaggttgaacagatgctccgtgacgaactggccgattccgtgtccaaagcagtgagcgatgccgatagacagagaatcctggagctggaaaaaaatgaaatggagctgaaggttgaggttagcaagctccgcgagatcagcgacattgccagacgtcaggttgagattttaaacgcacaacagcaatcacgtgataaggaggtcgaaagtctgcggatgcagttgttagactaccaggcgcagagtgatgagaaatcgcttattgcaaaactgcaccaacacaacgtcagcctgcagctgagtgaagcaacagctctggggaaactagaaagcataaccagtaagttgcagaagatggaggcatacaacctgagattagaacagaagctagacgagaaggaacaggccttgtattatgcacggcttgagggcagaaatagggcaaagcatctacgtcaaacgatccagtccctgcgccgacagtttagtggagctctgccccttgctcagcaggagaagttcagcaagaccatgatccaactgcagaatgacaaactgaagattatgcaggaaatgaaaaattcacagcaggagcaccgcaacatggaaaacaaaactcttgaaatggaattgaagctgaaggggctagaggaactgatctccactctgaaggataccaagggagctcagaaagtgattaactggcacatgaagatcgaggaactgaggctccaggaactgaaactcaatcgggagctcgtgaaagacaaggaggaaattaagtatcttaataacattatcagtgaatacgagcggaccattagctctctagaagaagaaatcgtgcagcagaataagtttcacgaggagaggcagatggcctgggatcagcgcgaggtagatttagagcggcaactggatatttttgacagacaacagaacgagatactcaacgccgcacaaaagttcgaggaagccaccggatcgatcccagatccctctctgccacttcctaaccagttggagattgccctccgcaagattaaagagaatatccggatcatattggaaacacgggctacttgtaaatcactggaagagaaactcaaggagaaagagagtgctctgcgattagccgagcaaaacattctatctcgcgacaaagtgataaatgaactgagactaagactgccggcaactgccgagcgcgaaaagctaattgccgagttgggcagaaaggaaatggaaccaaaaagccaccataccctcaaaatcgcccaccaaacaatcgccaacatgcaggcacgccttaatcagaaggaggaggttctcaaaaagtatcaacggctgctggaaaaggcaagggaggaacagcgcgaaattgtgaaaaaacatgaggaggaccttcacattctgcatcaccggctggagcttcaggctgacagttccctcaataaatttaaacagaccgcgtgggaccttatgaaacaaagccctacgcctgtgcccaccaataagcacttcatcaggctggctgaaatggagcagaccgtggccgaacaggacgattcgctcagcagcttgttagtaaaattaaagaaagtttcccaggatctggagcgacagagagagatcaccgagcttaaagtgaaggaattcgagaacattaagctccagctgcaggaaaaccatgaggatgaggtgaaaaaggtgaaagctgaagtcgaggatctaaaatatttattagaccaatcccagaaggaatctcagtgtctgaaaagcgagctgcaggctcaaaaagaggctaactctagggccccaactacaactatgcgcaatctggtggagcggctgaagtctcaactcgcgttgaaagagaagcagcagaaggcattgagcagggcgctgctcgagctgagagcagagatgacagcggctgccgaagaacggatcatctcagctacctcccagaaggaagcacacctgaatgttcagcaaatagtcgatcgccataccagagaacttaagacacaggtagaggatcttaacgagaacctactcaaactcaaagaggctttaaagacatcaaagaatcgcgagaatagtctcaccgataacctcaacgacctgaataatgaactgcagaaaaagcagaaagcttacaataaaatcttgcgggaaaaagaggagatcgatcaggagaacgatgaactgaaacgccagatcaagcgcctgacttccggactgcaggggaaaccacttacagacaacaaacaaagcttgatagaggaattgcaaagaaaagtcaaaaagttagaaaatcagttagaagggaaagtcgaggaggtggatttgaagccgatgaaagagaagaacgcaaaggaggagcttatcagatgggaagaagggaagaaatggcaggccaaaatcgaaggaatccgtaacaagctgaaggaaaaagaaggcgaggtttttacactcacgaaacagctcaataccttgaaagacctctttgctaaagccgacaaggaaaaactaacattgcagaggaaactcaagacaactgggatgacagtggatcaggtgcttggcatccgggctctcgagtctgagaaggaacttgaagagctcaaaaaacgcaatctcgacctggagaatgacatcctctacatgagggcccatcaagcactgcccagagattctgtcgtagaggatctccatttgcaaaaccggtacttacaggaaaaactgcatgccttggagaagcagttctcaaaggatacgtattccaaaccctctatctcaggaatagaatcagacgatcattgtcagagagagcaggaactccaaaaggaaaacctgaagctctcatcagaaaacatagaactgaagttccagctggagcaggccaataaggatctgcccagactgaaaaaccaggttagggacctcaaagaaatgtgtgagtttctaaagaaggaaaaagccgaagtccagcgcaagctgggacatgtgcgtggcagcgggagatcagggaagaccattcctgagctggagaaaactatagggcttatgaagaaggttgttgagaaggtacaacgggagaacgaacagctcaagaaagcttctggcatacttacatctgaaaagatggctaacatcgaacaggaaaacgaaaagctgaaggctgagctggagaagctcaaggcgcatttgggccatcagcttagtatgcactacgaatcaaagacaaagggcaccgagaagatcattgccgagaatgaaagactgcgaaaagagctgaaaaaagaaacagatgctgcagaaaagctgagaattgcaaaaaacaacttagaaattcttaatgagaaaatgacagtacagcttgaagagacaggcaagcgtctgcagttcgctgaatcacggggtccccagctggagggcgctgacagcaaaagctggaaatcgatagtcgtcaccagaatgtacgagaccaaattgaaggaactggaaaccgacatcgcgaaaaaaaatcagtcaataactgatctaaaacagttggttaaagaagctacggagcgagagcagaaggtgaacaagtacaatgaggacctggagcagcagataaagattctgaagcacgtccccgaaggggctgagactgaacagggtctgaagagagagttgcaagtgctgcggttggctaaccatcaattggataaagaaaaagctgagttaattcatcagattgaagctaacaaagaccagtcaggcgctgagagcacaatcccagacgctgatcagctcaaggaaaagattaaagatctggagactcagttgaaaatgtccgatttggagaagcagcacctaaaggaggaaattaaaaaattgaagaaagagcttgaaaattttgaccccagcttcttcgaggagattgaagacctcaaatacaactacaaggaggaggtgaagaaaaacattttgttagaggaaaaggtcaaaaagttgtccgagcagttgggagtcgagctcacaagccccgtggcagcaagcgaggagttcgaagacgaagaagagagtcccgtgaactttcctatctacta

SEQ ID NO: 217873 - DNA, 4620 bp, synthetic construct
  misc_feature 1..4620: note = Description of Artificial Sequence: Synthetic coding sequence
  source 1..4620: mol_type = other DNA
atggccatctttaagatcgctgccctgcagaaagtcgtggacaactcagtgtctctttccgagctggaactcgccaacaagcagtacaatgagctgactgctaagtatagggacatcctccagaaggataacatgctggtgcagcgtacatcaaatttggaacacctggaatgtgaaaacatctcactcaaagagcaagtggagtcgattaacaaggagctagagatcaccaaggagaaactgcatactattgaacaagcttgggagcaggagaccaaattagggaacgaatcttctatggacaaagcaaagaaaagcattaccaattctgatattgttagcatttctaaaaaaattaccatgctggagatgaaagaactgaacgagcgtcagagagcagagcattgtcagaaaatgtatgagcacttgagaacgtcactgaagcaaatggaagagagaaatttcgagctggaaaccaagttcgccgagctgacaaaaatcaatcttgacgcacaaaaggtggaacagatgctgcgggatgagctggccgactctgtcagtaaggctgtttcagatgccgaccgccagagaatcctggagttggagaaaaatgaaatggaactcaaggtggaagtgtccaaacttagggagataagcgacatcgcgcgtaggcaggtggaaatcctgaacgcccaacagcagagccgggataaagaggtggagtccctccggatgcagctcctggactatcaagcacagtcagatgaaaaatccctgatagccaagttacaccagcataatgtgagtcttcagctatccgaggcaactgcgctgggaaagctcgagagtataaccagtaagctgcaaaaaatggaagcttacaacctacgcttggaacagaagctcgacgaaaaggaacaggccctttattacgctagactggaaggtcggaacagggccaagcacctgaggcaaaccattcagtccctgcgcaggcaattctcaggcgctcttccccttgcccagcaggaaaagttctccaagactatgattcaactgcagaacgacaagctgaagatcatgcaggaaatgaagaattcacagcaggaacacagaaatatggaaaacaagaccctggaaatggagctgaagctcaaggggttggaggaacttattagcacactcaaagataccaaaggcgctcagaaggtgatcaactggcatatgaagatagaggagctgcggctccaggaattaaagctgaatagggagctggtgaaggacaaagaagagatcaaatacctaaacaatatcatctcagaatatgaaagaaccatatcctcattagaagaggagattgttcagcaaaataaatttcacgaggaaaggcagatggcctgggaccagcgggaggtggatctggaaaggcaactggacatttttgatcgacaacagaatgaaatcctgaacgcagcccaaaaattcgaggaggccaccggtagcatcccagatcccagtctgcccttacccaatcaactcgagattgcacttcgtaagatcaaggaaaatattcgcattatcctggagacccgtgctacatgcaagtctctggaggaaaaactaaaagaaaaggagtcagcattgaggttggctgaacagaatatcttgtcaagggacaaggttattaacgaactgagactgcgcctcccagccacagcggaacgcgaaaaactgatcgctgagttaggaaggaaggagatggaacccaagtcacatcacacacttaagatcgctcatcagactatagccaacatgcaggcacgcctgaaccagaaggaggaagtgctgaaaaagtatcagcggctcctggagaaagcgagagaggagcagagggaaatcgtgaagaaacacgaggaggatcttcacatactccaccatcgactcgagctacaggccgatagctcactcaacaagtttaagcaaactgcctgggacctcatgaagcaaagcccaactccagtgccgacgaataagcacttcatccggctggctgaaatggagcagaccgtcgccgagcaggatgactctctgagcagcttgctagtgaaactgaaaaaggtttcccaggacctagagcgacagagagagatcactgaactcaaggtgaaagagtttgaaaacatcaaactgcaacttcaggaaaatcacgaggacgaggttaagaaggttaaggcagaggtggaggacttgaaatacctgttggatcaaagccagaaggaaagtcagtgcctcaaatccgaattacaggctcagaaggaagcaaactcaagagcccctaccaccactatgagaaacctcgtggaaagacttaaaagtcagttagccttaaaggagaagcagcagaaagcattaagtagggctctcctggaattgcgcgcagagatgacagccgctgccgaggaaaggataatctctgccactagtcaaaaggaagcccatctaaacgtgcagcagatagtggaccggcatactcgggaactgaagacacaggtcgaggatttgaatgaaaacctgttgaaactgaaggaggcattaaagacttcaaaaaacagggagaattctctgaccgacaacttgaatgacttgaacaacgaattacaaaagaagcagaaagcttacaataagatcctgagagagaaggaagagattgaccaagaaaacgatgagctgaaaagacagattaaacgcctcacatccggcctccagggcaaacccctgaccgacaataagcaaagcttgatcgaggagctccagcggaaggtgaaaaagctcgagaatcaactggagggtaaggtggaggaggtcgatctgaaaccaatgaaagaaaaaaatgcaaaagaagagctcatccgttgggaagagggaaagaaatggcaggccaagattgaaggaatcagaaacaaactaaaagaaaaggagggcgaggtgttcaccctcaccaaacaacttaacacccttaaagatctgtttgcaaaagccgacaaggaaaaactgacactgcagcgcaaactgaagaccacagggatgaccgtggaccaggttctaggaattcgcgctttggaaagcgaaaaagaactcgaggagttgaaaaaacggaacttggaccttgagaacgacatattgtatatgagagcacatcaggccctcccacgcgactcagtcgttgaggaccttcacctccagaacaggtacctgcaggaaaagctgcacgctttggaaaagcagttttcaaaggacacatactctaaaccatccataagcggcatcgaatccgacgatcactgccagcgcgaacaagaactgcagaaagaaaatctgaaactatcatctgagaatatcgagttgaaatttcaacttgagcaggccaacaaagacttacctcggcttaagaaccaagtgcgcgacctcaaagagatgtgcgaattccttaaaaaggagaaggccgaagtgcagagaaagctagggcacgtccggggttcaggaaggagtggcaaaactatacccgaacttgagaagacaataggcctcatgaaaaaggtcgtcgagaaggttcagagggagaatgagcagctaaaaaaagcatccggaattttgaccagtgaaaaaatggctaacattgagcaggagaacgagaagctcaaggctgagctggaaaagctgaaggctcacctgggacatcagttgtctatgcactacgagagtaagactaaagggacggaaaagatcatcgcagagaacgaacggttgaggaaagaactgaagaaagagacggatgctgcagaaaaactgcgcattgccaagaacaatctggaaatcctaaacgaaaagatgacggtgcagttggaagagacaggaaagcgtctgcagtttgcagaatccagagggcctcaactggaaggggctgatagtaaaagctggaaatctattgtggttaccaggatgtacgagaccaaactgaaggaactggaaacagacattgccaagaagaatcaatcaattactgatttgaagcagctcgttaaggaagcaaccgagcgtgagcaaaaggtgaacaagtataacgaagatctggagcagcagattaagatcctgaaacacgtgcccgaaggggctgaaactgagcagggcctgaaacgggagcttcaggttctccgacttgccaaccatcagctcgataaagagaaggcagagttgatacaccagatcgaggcgaataaagaccagtctggagcagagtccacgatccccgatgccgaccagctcaaagagaagataaaggacctcgaaactcagctgaagatgagcgacctagagaagcaacacctgaaagaggaaattaagaagctgaaaaaagaattagaaaacttcgatccctcatttttcgaggagattgaagatttaaagtacaattataaggaggaggttaaaaaaaacatccttctggaggaaaaggtaaagaagttgagcgagcagctgggagttgagttaacatctcccgtggccgcatcagaagaatttgaagatgaagaggagtctcctgtcaatttccccatctattag

SEQ ID NO: 217874 - DNA, 2415 bp, synthetic construct
  misc_feature 1..2415: note = Description of Artificial Sequence: Synthetic coding sequence
  source 1..2415: mol_type = other DNA
atgcctcccaatataaactggaaagagatcatgaaagtggaccctgacgaccttcccaggcaagaagagttggccgacaatctgcttatttccctctccaaggttgaggtgaatgaactcaagtccgagaagcaagaaaacgtgattcacctcttccgcattactcaaagcctgatgaaaatgaaggcacaggaagtggaattggcgctggaggaagttgagaaagcgggtgaagagcaggctaaatttgaaaatcagctgaagacaaaggttatgaaactggaaaatgagctggaaatggctcaacagagcgcaggcggacgagacaccagatttctccgcaacgaaatctgccagcttgagaagcagctagaacagaaggaccgggaactggaagatatggaaaaagaactcgaaaaagaaaaaaaagttaacgaacagctggctctcagaaacgaagaggccgaaaatgagaactccaagcttagaagggaaaataaaaggctgaagaagaagaacgaacagctctgtcaggacattattgattatcagaaacagatcgattctcagaaggaaactttgctctcaagaagaggcgaagatagcgattacaggtcccaactgagcaagaaaaactacgaactgattcagtacttagacgagatccaaacattaacagaggctaacgagaagatagaggtccagaaccaggagatgagaaaaaacctggaagagtcagtgcaagagatggaaaagatgactgacgagtataacagaatgaaggctatcgtccatcagacagataatgttatcgatcagttgaaaaaggaaaatgaccattatcagttgcaggtgcaagagctcacagacctgctaaaatcgaagaacgaagaagacgatccgatcatggttgctgtcaatgccaaggtggaggagtggaagttgatcctcagctccaaagacgacgaaattattgagtatcaacagatgcttcacaacctgagagaaaaactgaagaatgctcagctcgacgcggataagagtaatgtgatggcactgcagcaaggtatacaggaacgggacagtcagatcaaaatgctcacagagcaggtggagcaatatacgaaagaaatggaaaaaaacacctgtatcatcgaagacttaaaaaacgagctccagcgtaacaaaggagccagtactctctcacaacagactcatatgaagattcagagtaccctcgacattctcaaggagaagacaaaggaggcagagagaaccgccgaactggcagaggctgatgccagagagaaagacaaagagttggttgaagctctgaagagactaaaggactacgaatctggtgtctacggactggaggatgccgtggtagaaattaagaattgtaaaaaccaaattaaaatcagggaccgggagattgaaatcctgactaaggagatcaacaagctagagctgaaaattagcgacttcctggacgagaacgaggccctgagggagcgtgtgggcctagaacccaaaacaatgatcgatctgaccgagtttaggaacagcaaacatctgaaacagcagcaatacagggccgagaatcagatcctcctgaaggagattgaaagtctggaggaggagaggctcgatcttaagaaaaaaattcgacagatggcccaagaacgaggaaaacggtccgcaacaagcggacttacaaccgaagacctcaacctaacagagaacatttcacaaggggacagaatctcagaacggaaactggaccttctctcgctcaaaaacatgtccgaagctcaaagcaagaatgagttcctgagccgtgagctaattgagaaggaacgagatctggaacgcagtcgcacagtaatcgccaaattccagaacaagctgaaagaactcgtagaggaaaataaacagctggaggagggaatgaaagagatcctgcaggctattaaagaaatgcagaaggaccccgatgtaaagggcggagaaacctcacttatcattcctagcctcgaaagattagtgaatgcaatcgagtccaagaacgcagagggaatctttgacgccagcctgcacctcaaagcacaggtggaccagctgacaggccgtaacgaggagctaagacaggaactgagggaatcccgcaaagaggcgataaactattctcagcagctggcgaaagcgaacctgaagattgatcatttggaaaaagaaacctccctgctgaggcaatctgaaggatccaacgtggtatttaagggaatcgacctgcctgatggtattgcgccttcaagcgccagtatcattaactcccagaatgagtatcttattcacctgctgcaggaactggaaaacaaagagaaagtcaaggaattcaggcgcttctcctag

SEQ ID NO: 217875 - DNA, 1650 bp, synthetic construct
  misc_feature 1..1650: note = Description of Artificial Sequence: Synthetic coding sequence
  source 1..1650: mol_type = other DNA
aagatggctcaacaatctgccggtggcagagacactcggttccttaggaacgaaatatgtcagctggaaaaacagctggagcagaaggacagagagttggaggatatggagaaagaactggagaaggagaagaaggtaaacgagcagctagcgttgcgcaatgaagaggcggaaaatgaaaactctaagctgcggagggagaataagagattgaagaagaagaacgagcagctctgtcaggacatcatcgactatcagaagcagattgactcacagaaagagaccctgctgagtagaaggggcgaagactcagattatcggagccagctctctaagaagaattacgagttgatccagtacttagatgagattcagactcttacggaagcgaatgaaaagatcgaggttcagaatcaagaaatgagaaagaacttggaggagagtgtacaggagatggaaaagatgactgatgaatataaccggatgaaggcaatagtgcaccaaacagacaatgttatcgatcagctcaaaaaggaaaacgaccattatcagttgcaggtacaggagcttaccgacctgcttaagagcaagaacgaagaagatgacccgattatggtggccgtgaacgccaaggtggaagaatggaagcttatactgagctctaaggatgacgagataattgagtaccagcagatgctccacaacctcagggaaaagctgaagaatgcacagctggacgccgacaaaagcaatgtgatggccctccagcagggcatccaggaacgtgactcccagattaagatgctgacagagcaggtcgagcaatataccaaagaaatggaaaaaaatacgtgtattatagaagatttgaaaaacgagctccagcgtaataagggagcctccaccctcagccaacagactcacatgaagattcagagcaccctggacatcctaaaagagaagacaaaagaggcggagcgcactgcagagctcgctgaagctgacgctcgtgagaaggacaaagagctcgtcgaggcactaaagagactgaaggactatgaatctggggtgtacggccttgaggatgcggtcgtggagattaaaaactgtaaaaaccaaatcaagatcagagacagggagatcgagatcctgacaaaggaaattaacaaactggaactaaagatatcagattttctcgatgagaatgaagctctgagggaaagagttggacttgaacccaagaccatgattgatcttaccgagttccgaaattccaagcacctgaaacagcagcagtatcgtgcagagaatcagatcctgctcaaggagatcgagtccctggaggaagaaaggctggacctgaaaaagaagatacgacagatggcacaggagaggggcaaacgttcggcgacttccgggctcaccacggaggatcttaacctcacagaaaatatttcccagggagatcggatttccgaaagaaagctggacttgctgagcctaaagaacatgtcggaggcacagagtaaaaacgaattcctctcacgcgaattgattgagaaggagagggatctggagcggtctcgcaccgtgatcgccaagttccagaataaatgctaccgaataaaggaatgtaggcgaaacctctag

SEQ ID NO: 217876 - DNA, 4620 bp, synthetic construct
  misc_feature 1..4620: note = Description of Artificial Sequence: Synthetic coding sequence
  source 1..4620: mol_type = other DNA
atggcaatctttaaaatcgccgctctccaaaaggttgtggacaactctgtatctctctctgagctggagttggctaataagcagtacaacgaactcaccgcgaagtaccgggatattctacagaaagataatatgctagtgcaacggacaagtaatctcgagcatcttgagtgtgagaatatctccttgaaggaacaagtggagtccataaataaggagctcgagatcacaaaagagaagctgcacactatcgagcaggcttgggagcaggagacaaaattgggcaacgagtccagtatggataaggctaagaagagcattactaactcagacatcgtgagcatatcaaagaagattaccatgctcgagatgaaagagctgaacgagcgccagcgagcagaacactgccagaagatgtacgagcatctccgcacctccctgaaacaaatggaggagcgaaatttcgaactggaaacaaagttcgcagagttgaccaagatcaacctagatgcccagaaggtggaacagatgctgagggatgagctcgccgactctgtgtccaaagccgtttccgatgccgatcggcagcggattttagagctggagaaaaatgagatggagctgaaagtggaggtttccaagttgcgtgaaatttctgacatagctaggaggcaagtagaaattctgaacgcccaacaacagagtcgcgataaggaagtggaatctctgcggatgcagcttcttgattatcaggcacagagcgacgagaaatccctcattgccaagctacaccagcataatgtatccttgcagctgtccgaagctactgcactcgggaagttagaaagtatcacgtccaaacttcagaagatggaagcttataatctaaggcttgaacaaaagctggacgagaaggagcaggccctgtattatgcaagactggaaggtagaaatcgggcaaagcacctcagacaaacaattcagtccctaagaaggcagttcagcggcgcactaccacttgcccagcaagagaaattcagcaaaaccatgatccaattgcagaacgacaaactgaaaatcatgcaagaaatgaagaactcccagcaagagcatcgtaacatggaaaataagactctcgagatggagctcaagctgaaagggttggaggaactcatctcaactttgaaagataccaaaggagctcagaaagtcattaactggcatatgaagatagaggagctgagattgcaggagttgaagctgaatcgggaattggtgaaagacaaggaggagataaaatacctcaacaacatcattagcgagtacgagagaacgattagcagtcttgaggaggaaatcgttcagcagaataagtttcacgaggagcggcagatggcttgggaccagagagaggttgacctcgagcggcagctggacatctttgacagacagcagaacgagatccttaatgctgcccagaagtttgaagaggctacagggagcattcctgacccttctctgcctttgcctaaccagcttgaaattgccctgagaaagataaaagagaatattcggattatcctggagacccgggcaacttgtaaaagcctcgaagaaaagctcaaggagaaggagtctgctctgcgtctggctgagcagaacatcctgtcgcgggacaaagtgattaacgagttgcgactgcggctcccggctaccgccgagagagaaaagctgatcgccgaactcggcaggaaggagatggagcccaagtcccatcatactctgaaaattgcccaccagactatcgctaacatgcaggcaaggctcaaccagaaagaggaagtgcttaaaaagtatcagaggctcctcgaaaaagcacgggaagagcagcgcgaaattgtgaagaaacatgaggaagatttgcacatcctacaccatcgacttgagctccaggctgactcttcccttaacaagttcaagcaaaccgcttgggatctgatgaaacaatcgcctacccctgtacctacaaacaaacattttatccgactcgccgaaatggagcagaccgtggctgaacaggacgacagcctgtcctctttgttagtgaaactgaagaaggtttcacaagacctggaacggcagagggagatcacggagctgaaagtcaaagagtttgaaaatatcaaattgcagctgcaagagaaccatgaagatgaggttaagaaggtgaaggctgaagtggaagatctgaaatacctgttagatcaaagccaaaaggaatcacagtgtctgaagtccgaactacaggcacaaaaggaggcaaacagccgcgctccaacaacaacaatgagaaacctggtggagcggctgaagtcccagctagctctcaaggagaagcagcagaaagctctgtctcgcgctcttctggagctgcgggcagaaatgacagcggcagctgaagaaaggatcatctccgcaactagtcaaaaggaagcacatcttaatgtgcagcagatcgtggataggcataccagagagcttaaaacgcaggttgaggacctgaacgagaacctgctcaagcttaaagaggccctgaagacgtctaagaatagagaaaacagccttactgacaacttgaacgacctaaacaacgagctgcagaaaaaacagaaggcttacaataagattctgcgggagaaggaagaaattgatcaggaaaatgacgaactgaagcggcagatcaagagactgacctccgggctgcagggtaagcctctgaccgacaacaaacagagtctgatagaagagctacagcggaaggtgaagaaactggaaaatcagctggagggcaaggtggaagaagtggacctgaagccgatgaaggaaaagaatgccaaggaggagctgatacgatgggaagaaggcaagaagtggcaagccaagattgagggcatacgcaacaaactcaaagagaaggaaggagaagtattcacccttaccaagcagctgaacactctcaaagacctttttgctaaagcggataaagaaaaactgacccttcagcggaagttaaaaactaccgggatgactgtagatcaggtattaggcattcgtgccctggaaagtgagaaggagctcgaagaactgaaaaagaggaatctggatctggagaacgatatattgtatatgagggcccatcaagccctgcctagagactccgtcgtcgaggatctccatttgcaaaacaggtatcttcaggagaaattgcatgccctcgaaaagcagttttccaaagacacgtacagcaaaccatctatatcaggtattgaatcagacgaccactgccagagggagcaggaactgcagaaggaaaatcttaaactctctagcgagaatattgaactgaaattccagttagagcaggcgaacaaagatttacccaggctaaagaatcaagttcgagacctgaaggaaatgtgcgagttccttaagaaggagaaggcggaagttcagagaaaattaggccacgtgcgtggctctggcaggtcagggaaaaccattccggagctggaaaaaacgattggcctgatgaagaaggtggttgagaaggttcagcgcgaaaacgaacagctaaaaaaggcctcgggcattctgactagtgaaaaaatggctaatatcgagcaggaaaacgaaaaactgaaggcggagctggaaaaactcaaggcacaccttggccatcaactcagtatgcattacgagtccaagactaagggcaccgagaagatcatcgccgagaacgagagactgagaaaggaacttaaaaaagaaacagatgccgctgaaaaactgagaatcgctaagaacaatctagaaattctcaacgagaagatgaccgttcaactggaggaaacgggcaagcgactgcaattcgccgaaagtcggggtccccagctcgagggcgctgatagcaaatcctggaaatcaatagtagtgaccaggatgtatgagactaagctgaaagaattggaaactgacatcgcgaagaagaaccagagtataaccgatttgaagcaattagtaaaggaggcaactgaaagagagcaaaaggtgaataagtataacgaggatttagagcagcaaattaagattctaaagcacgtcccggagggtgccgagacggaacaggggttgaaacgcgagctgcaagttctccggctggctaaccaccaattggataaagaaaaggccgagctgattcatcagatcgaggccaacaaggaccagagcggcgcagagtctaccatcccggatgctgaccaactcaaggagaaaattaaagacctggaaacacagttaaaaatgtcagatcttgagaaacaacacctgaaggaggagattaaaaagcttaagaaagaactggagaattttgacccttcattctttgaggaaatcgaagaccttaagtataactataaagaagaggttaaaaaaaacatcttgttggaagaaaaagtaaaaaaactgtccgaacaactcggggtggaactgacttctcctgtcgcggcaagtgaagaattcgaagatgaggaagagtccccggttaactttccaatctactag

SEQ ID NO: 217877 - DNA, 7439 bp, synthetic construct
  misc_feature 1..7439: note = Description of Artificial Sequence: Synthetic coding sequence
  source 1..7439: mol_type = other DNA
atgccgcctaacattaactggaaagagattatgaaggtcgatccggacgacctgcctagacaggaggagctggccgataacttgcttatctctctctccaaggtggaggtcaacgagctcaaaagcgaaaagcaggaaaacgtgattcacttgttccggatcacacaaagccttatgaaaatgaaggcccaagaagttgagctcgccttggaagaagtggagaaagcgggtgaagagcaggctaaattcgaaaaccaactcaagactaaagttatgaaactcgaaaatgaactggaaatggctcaacaatctgccggaggaagggatacccggttcttacgtaatgagatatgccagttggagaagcagctcgagcagaaggatcgtgaactcgaagatatggaaaaagagttggaaaaggaaaaaaaggttaacgaacaattagcgttacgtaatgaggaggccgagaatgagaactcaaaactgagaagagaaaacaagcgcttgaaaaagaaaaatgagcagctctgtcaggatattatagactaccagaaacagatcgatagtcagaaggaaaccctgttaagccggagaggcgaagatagcgactatcgatcacagctgtcaaaaaaaaattatgagttaatccaatatctcgacgagatccagacattgacagaagccaatgaaaagatagaggtgcagaatcaagagatgaggaaaaatctcgaggagagtgttcaggaaatggagaagatgaccgacgagtataataggatgaaggcaattgtccaccagaccgataatgtaatcgaccaactcaaaaaggaaaacgatcattatcagctccaagtccaggagctgaccgaccttctgaagtcaaagaatgaagaggacgaccccattatggtggccgtgaacgctaaggttgaagagtggaagctcatactttcaagtaaagatgatgaaataattgaataccagcagatgctccataatctgcgagagaagttgaaaaacgcacagctagatgcagataagagcaacgtcatggctctgcagcaggggattcaagaaagagactcccagataaaaatgctaacagagcaggtcgaacaatacaccaaggaaatggaaaaaaatacatgtattattgaggatttaaaaaatgagctgcaacgcaacaaaggagcctctaccttaagtcagcagacacatatgaaaattcagagcactttagatatcctcaaagagaagaccaaagaggcagagaggacagccgagctcgccgaagctgacgctagggaaaaagataaggagcttgtggaggccttaaaaagattaaaagactacgaatcaggggtgtatgggctggaggacgcagtggtcgagattaagaactgcaaaaaccagataaagatacgtgaccgggagatagaaattctcactaaagaaataaataaactggagttgaaaatctctgatttcctggatgagaatgaagccttacgcgaaagagtgggcctcgagccaaagaccatgattgatctgaccgaatttagaaacagcaaacatctcaagcaacagcagtatcgtgcagagaaccaaattcttttaaaagagattgagagtctcgaggaagagcgattggatctcaaaaaaaagattagacagatggcccaagagcgcggtaaacggtccgccacaagcggcctcaccactgaggacctcaacctgacagaaaacatcagtcaaggggacagaatttctgagcgtaagttagacctgctctccctgaaaaatatgtccgaagcccagtcaaagaacgagttccttagtcgtgaactgattgaaaaggaacgagacctcgaaaggtcgcgtaccgtgattgccaaatttcagaataagctcaaagagctcgtggaagagaacaagcagctggaagagggtatgaaagagattctgcaagcaatcaaggagatgcagaaagacccagacgtgaaagggggtgaaacttcactcatcatcccgagtcttgaacgtctcgttaacgcaattgagtccaaaaatgcggagggtatcttcgacgcctcgttgcacttgaaggctcaggtagatcaactcacgggcagaaatgaggaactgcgccaggagctgagagaaagcaggaaggaggccataaattatagtcaacaactggccaaagcaaatttgaagatcgaccatttagaaaaggagacatctctactgcgtcaatctgaaggttcgaacgtggtctttaaggggatagacctccccgatggaatcgccccatcttcagcctcaatcatcaacagtcagaatgaatatcttatccacctgctacaggagctggagaacaaggagaaaaaactaaagaatctcgaggactctttagaagattacaaccgcaaattcgccgtcatcaggcaccaacagtccttactgtataaggaatatctgtctgagaaagagacgtggaaaacagaaagcaaaaccattaaggaggagaaaaggaaacttgaagatcaggtccagcaggacgcaatcaaggtgaaggagtacaacaacctcctcaatgcactgcaaatggactcggacgagatgaagaaaatcctcgccgagaactctcggaaaatcactgtgcttcaagtaaacgagaaatctcttatccggcagtacaccacactggttgagctcgagcgtcaacttagaaaggaaaacgagaaacagaagaacgagctgttgagcatggaggctgaggtatgcgagaaaatcggttgtctccagaggtttaaagagatggcaatctttaaaattgccgcattgcaaaaagtggtggataattccgtgagtctttcggagctggaactggctaacaaacaatataatgagcttaccgcgaaataccgggatatcctacagaaggataacatgcttgtccagcgcacgagcaatttggagcatctcgagtgtgagaacattagtctgaaagaacaggtcgagtcaattaataaagaactcgaaataacaaaagaaaaactgcacaccattgagcaagcatgggaacaggagacgaaattggggaatgaatcaagtatggataaagccaagaaatctataacaaactccgacatcgtgtcaatttccaagaaaatcacgatgctggagatgaaggaactgaacgagaggcaaagggcagaacactgccaaaagatgtacgaacacctgcggacttcgctgaaacagatggaagagcggaacttcgaacttgaaactaaattcgctgagctcacaaaaatcaacttggatgcccaaaaagtggagcagatgctgcgtgacgagttggcggactctgtctctaaagccgtgagcgacgccgatcgacagaggattctagagctggagaaaaacgagatggaactgaaagtggaggtatcaaagctgagagagatctctgatatagccaggcggcaggtggaaatcttaaacgcacagcagcagagtcgggacaaagaggtcgagagcctgcgcatgcagctactggattatcaggctcagtccgacgaaaaatcgcttatagcaaagctgcaccagcacaatgtgagccttcaactaagtgaggccacagccctcggaaagcttgagtccattacaagcaagttgcagaagatggaggcatacaacctgcgcctggagcagaaacttgatgagaaagagcaggctctgtactatgcaaggcttgaggggagaaatagagccaaacatctccggcagaccatccaaagtctaaggaggcaattctctggagccttaccacttgctcagcaagaaaagttttccaagactatgatccagctacagaatgataaactgaagatcatgcaggaaatgaaaaacagtcagcaggaacatagaaacatggaaaacaagacgttggagatggagcttaagctcaagggacttgaagagcttatctccaccttgaaggataccaaaggtgcacagaaggtaattaattggcatatgaaaatcgaggagctcagattgcaagaactgaaattgaaccgggagctcgtgaaagacaaggaagaaataaaatacctgaacaacattatctctgaatacgaacgcactattagtagcctggaagaagagatcgtacagcagaacaaattccatgaggaacggcagatggcctgggatcaacgcgaagtagacctggaaagacagttggatatctttgaccggcaacaaaatgagatcctaaacgccgctcaaaagtttgaggaggccacagggagtatacccgacccgtctctaccactgcccaatcagctggaaatcgccctccggaaaattaaggagaacatccggattatcctggagactagagcaacctgtaaatctctggaggagaaattgaaggaaaaggaaagcgccctgcgcctcgccgaacagaacatcttgagccgggacaaagtcattaacgagctccgcttgcggctgcccgcaaccgctgagcgtgagaagctcatagccgaactcggacgtaaggagatggagcctaagtcccatcataccctcaagattgcacaccagacaatcgctaacatgcaggcgaggttaaatcaaaaggaggaagtacttaaaaagtatcaacggctgttggaaaaggccagagaggagcagagggagatagtcaaaaagcacgaggaggacctacacatcctgcatcatcgtttagaacttcaggccgactcctcactcaataagtttaaacaaactgcatgggatctgatgaagcaatcccccacccccgtaccaaccaacaagcatttcattagactcgcggaaatggaacaaacagtcgccgagcaggacgacagtctgtcatcccttttggtgaaactcaagaaagtgagtcaggatctagagcgtcagagagagatcactgagcttaaggttaaggaatttgagaacatcaaactgcagctgcaagagaatcatgaagacgaggtcaaaaaggttaaagctgaggtggaagacttgaagtaccttctggatcaaagtcagaaggagtcacagtgtttaaagagtgaactacaagcgcagaaggaggccaatagcagagctccgacaacaaccatgcgtaacctggttgagaggctgaagtcacaacttgctttaaaagagaagcagcaaaaagccctcagcagggccctgctggaattgcgcgcagaaatgaccgccgctgccgaggaacggataatttctgccacttcgcagaaagaggcacacttaaatgtgcagcaaatagttgaccggcacacccgtgaattgaaaactcaagtagaggatctcaatgagaacctgctcaagctgaaggaggccctgaagaccagcaaaaacagggagaatagcctgaccgacaatctgaatgacctgaataacgaactacagaagaaacaaaaagcctacaacaagattttaagagagaaagaggagatcgaccaggagaacgacgagcttaagagacagattaaacgcctgacttcgggcctgcagggtaaacctcttaccgataacaagcaaagcctgattgaagaactccagcgcaaagtaaaaaaacttgagaatcagctggagggaaaggttgaagaagtggatcttaagccaatgaaagagaaaaacgccaaggaggagctgatacggtgggaggaaggaaaaaaatggcaggccaagattgagggtatccgtaataaactgaaagagaaagagggggaggtctttacactgactaagcaacttaataccctcaaagacctgttcgccaaggcagataaggagaagctgacccttcagcggaagctgaaaaccacaggtatgacagtcgaccaagttctgggcattcgagccctggagagcgagaaagaacttgaggaattgaaaaagaggaacctggacctcgagaacgacatcctgtacatgcgggctcatcaagccctgcccagggactccgttgtggaggacctgcatctgcagaaccgttatcttcaggaaaaactccacgcacttgagaaacagtttagcaaagatacttactctaagccgtccatcagcggaatagaatccgatgaccattgtcagagagagcaagaactgcagaaggagaacctgaagctcagctcagaaaacatagaactcaagtttcagctggagcaggcaaataaagatctgcccaggctgaaaaaccaggtgcgggaccttaaggagatgtgcgaatttctcaagaaagagaaagcagaagtccagcggaaattgggccacgtacgcggttccggccgaagtggtaagaccataccagaactggagaagacgatcggactgatgaagaaagtggtggagaaggtgcagcgggagaacgagcagttgaagaaggcgagcgggattctgaccagcgagaaaatggccaatattgagcaggaaaacgagaaactgaaagctgagctggagaaattgaaggcccatctgggccatcagctgtccatgcactacgaatctaagactaagggaacggagaagatcatcgccgagaacgaacggctaagaaaagagctgaagaaggaaaccgacgctgcagaaaaactgaggatagcaaagaacaatctcgagatcttgaatgagaaaatgaccgtacaactggaggagacaggcaaacgccttcagttcgccgaatcccgaggacctcaactggaaggtgcggacagtaagtcctggaaaagcatagttgtgacccgcatgtacgaaaccaagctcaaggaactcgaaacagatatcgcaaagaaaaaccagagcattactgacctcaaacagctggtgaaagaggctactgagagggagcagaaagtgaacaagtataacgaggacttagagcagcagatcaaaatcctgaagcatgtcccggaaggagcagagaccgagcagggcttgaaaagggagctgcaggtcctgaggttggccaaccaccagcttgataaggagaaagctgagctgattcaccaaattgaggccaacaaggaccagtctggggcagagtcaactattcctgacgcagaccagcttaaagaaaagatcaaagatttggaaacacagctaaagatgagcgacttggaaaagcaacaccttaaagaggaaataaaaaagctgaagaaggaactggagaatttcgatcctagcttctttgaggaaatcgaggacttgaaatataattataaggaagaggtgaagaagaacattctgctcgaggagaaggtcaagaagctcagcgagcaactaggggtcgagctaaccagccccgtggcagccagtgaggaatttgaagacgaagaggagtctcccgtaaatttcccaatatacta

SEQ ID NO: 217878 - DNA, 1512 bp, synthetic construct
  misc_feature 1..1512: note = Description of Artificial Sequence: Synthetic coding sequence
  source 1..1512: mol_type = other DNA
atggaggaacatggggtgacacaaacagagcacatggcaacgatagaggcacatgctgtggctcagcaggttcagcaggtgcacgttgctacctatacggaacacagcatgctgagtgcggacgaggatagcccttcctcaccagaagataccagctacgacgactccgacatccttaattccacagctgcagacgaggtcactgcacatctggctgctgcagggccagtggggatggccgcagctgccgctgttgccaccggcaagaaaaggaaaagacctcatgtattcgagtccaatccctccatcaggaaaaggcagcagacccgcctgctacgcaaactaagagccactctcgatgagtacactacacgggtgggacagcaggccattgtgctgtgtatctcccctagcaagcccaacccggttttcaaggtgttcggcgctgccccactggaaaacgttgttagaaagtacaaatcgatgattcttgaggatttggagtctgccctcgccgagcacgcaccagcccctcaggaagtgaacagtgaattaccacccctgactatcgacggcattccagtgagtgtagacaaaatgacccaagcacagctaagagccttcatccccgagatgctgaagtacagtactggcaggggaaagcctggctggggaaaggagagttgcaaacctatatggtggcccgaggacatcccttgggccaacgttcgatctgacgtgcgtactgaagaacagaaacagcgggtgtcgtggacccaggcacttagaaccattgtaaaaaactgctacaaacagcatgggagagaagacctgctgtacgcgtttgaagaccagcaaactcagacgcaggccacagcgactcactcgatcgcccatcttgtgcccagccaaaccgtggttcaaacgttttcaaatccagacggaaccgtctccctgattcaggtgggtaccggggctacagtggcaacccttgccgatgcctcagaactaccaactacagtaacagtggctcaggtcaattattcagctgtggcagacggtgaggttgagcaaaactgggccaccctgcaggggggagaaatgaccatccagacaacacaggcaagtgaagctactcaggccgtcgccagcttagccgaggcagctgtggccgcttcccaagaaatgcagcagggggcaaccgtgactatggccctcaactctgaggccgcagcccatgccgttgccactctcgcagaagctactctccagggcggtgggcaaatagtgttgagcggagagactgcagcagcagtcggagcgcttactggagtccaagacgcgaacggcctagtgcagatcccggttagcatgtatcaaacagtcgtgaccagccttgcccaaggcaatggtcctgtgcaagtggcaatggctcccgttacaacccgcatttccgactccgccgtgaccatggatggccaggctgttgaggtggtaacattggagcagtag

SEQ ID NO: 217879 - DNA, 906 bp, synthetic construct
  misc_feature 1..906: note = Description of Artificial Sequence: Synthetic coding sequence
  source 1..906: mol_type = other DNA
atgagcctccgtcggcacatcggaaacccggagtacctgatgaaacggatcccgcagaatccccgataccagcatataaaaagtcggctcgataccggtaatagcatgacaaaatatactgagaagctggaggagataaaaaaaaattatcgctataaaaaagatgagctgtttaaacgcctcaaggtcacaacttttgcccagcttatcatccaagtggcgtctctttccgatcaaaccctcgaggtgactgccgaggaaattcagagactggaggacaatgattcagccgcatctgatccggacgctgagaccactgcgaggactaatgggaaaggaaaccccggtgagcaaagcccaagcccagaacaatttatcaacaatgccggtgccggtgactctagtcgctctactctccagagtgttatctccggtgtgggtgaattggacctggacaaaggacccgtgaagaaggccgaaccacacacgaaagacaaaccttaccccgattgtcctttcctattgcttgacgtccgggatagagactcataccagcagtgccacatcgtgggcgcatattcctaccctattgccactctgtcccgtaccatgaatccatactctaacgatatcctggaatacaaaaatgcccacggtaagattatcatactgtacgacgatgacgaacgcttagccagccaggcagctaccaccatgtgtgagcgcggtttcgagaacctcttcatgctctccgggggtaggctgaatcaggccaacagtagcggcagggagtcaaaggtgcccggagccagatctgctcagaacctgccaggaggcggacccgcatcgcattcgaacccgaggagtctctcatcagggcacctacagggaaaaccatggaaatag

SEQ ID NO: 217880 - DNA, 165 bp, synthetic construct
  misc_feature 1..165: note = Description of Artificial Sequence: Synthetic coding sequence
  source 1..165: mol_type = other DNA
atgagtctccggcgacatattggcaaccccgagtatctcatgaagcggatacctcagaaccctaggtaccaacacatcaaaagcaggttggacactggggcttgtgtgtaccttacatcttctcctgctttgcccgattgtgcaatgaatggcttgtgcttctag

SEQ ID NO: 217881 - DNA, 858 bp, synthetic construct
  misc_feature 1..858: note = Description of Artificial Sequence: Synthetic coding sequence
  source 1..858: mol_type = other DNA
atgagcctaagacgacacatcgggaacccagagtaccttatgaagagaatacctcaaaaccccagatatcagcacattaagtcccgcctggacactgattaccgatacaagaaggatgaattgttcaagagacttaaggttacgacctttgcgcagttaatcattcaggtggcctctctgagcgaccaaaccttagaggtcacagccgaggagattcagcgcctggaagacaatgacagtgcggcaagcgaccccgatgctgagacaaccgcgcgaacaaacgggaaagggaaccccggagagcagtccccgtctcctgagcagttcatcaacaacgcaggcgctggcgattcatcccgaagcacactgcagtctgtgatttcaggggtgggtgagctggacctcgacaagggccctgtgaaaaaggctgaaccacacaccaaggacaagccataccctgattgcccattcctgctccttgacgtgcgggacagagactcctaccaacaatgtcacattgttggagcctactcttatccaattgctacccttagccgcacaatgaacccgtacagcaatgacattcttgaatacaaaaacgctcatggaaaaatcattatcctctacgatgacgatgaacggcttgccagccaggctgctaccaccatgtgcgagagagggtttgaaaacctgtttatgcttagcggtggcaggctcaaccaagccaactcttcaggcagggaatccaaggtacctggagctcgttctgcacagaaccttcctggcggtggacctgccagccactcaaacccaaggtctctgtcttctggacacctgcaaggtaagccatggaagtag

SEQ ID NO: 217882 - DNA, 1200 bp, synthetic construct
  misc_feature 1..1200: note = Description of Artificial Sequence: Synthetic coding sequence
  source 1..1200: mol_type = other DNA
atgtcctccaggagcactaaagacctgataaagtccaagtggggcagcaagccatctaattccaaaagtgagactaccctggagaagctgaagggggagatcgctcacctgaagactagcgtagatgagatcacttcgggaaagggcaaactgaccgataaagagcgtcacaggttgctggagaagatcagggtgctggaagctgaaaaggagaagaatgcataccagctgacagagaaagataaggagattcagaggctgcgtgatcagctgaaggctcggtattctactacaaccctgctggaacagctcgaggagactaccagggagggcgaacggagagaacaggtccttaaggcactgagtgaagagaaggacgtgctgaaacagcaacttagcgcggcaaccagcaggatcgccgaactggaaagcaaaactaacaccctgcgcctgtcacagactgttgcccctaactgttttaattccagcatcaataacatacacgagatggaaattcagctgaaggatgcgttggaaaagaaccaacaatggctcgtctacgatcaacagagggaggtttacgtgaaagggttactagccaagatttttgaactggagaagaagactgaaacagccgcacatagcctcccacagcagacaaagaaaccggagtctgaaggatacctccaagaggaaaagcaaaagtgttataatgacctgctggcatccgcaaagaaggatctagaagtggagagacagaccattactcagctctctttcgagctttcagaattccgcaggaagtatgaagagacacagaaggaggtgcataacctgaatcagttgctctactctcaacgtcgcgcagacgtccagcatctcgaggatgacaggcacaagactgagaagatccaaaagttgagggaagagaacgatattgctcgcggtaagctggaagaggaaaagaaacggagcgaagagctgttgagtcaggttcaattcctgtacaccagcctgctcaagcaacaagaggaacaaactcgagtggccctgctggaacagcagatgcaagcctgtaccctggattttgaaaacgagaagctcgaccgtcagcacgtgcagcatcagctgcacgtgattctgaaggaactgaggaaggccaggaataatactgtcgggatactggataccaagagttag

SEQ ID NO: 217883 - DNA, 1395 bp, synthetic construct
  misc_feature 1..1395: note = Description of Artificial Sequence: Synthetic coding sequence
  source 1..1395: mol_type = other DNA
atgagtagtcgatccactaaagatctgattaagtctaaatggggatcgaagccttcaaattcaaagtctgaaactactttggagaagttaaaaggcgagattgctcacctgaagacatccgtggacgaaatcacatctggcaagggaaagttaaccgataaagagaggcatcgtcttctggaaaagatccgggttctcgaagccgaaaaagagaagaatgcctaccagttaactgaaaaagacaaagagattcaacggctgcgggaccagcttaaggcccgatactcaacaaccacactgctggaacagttggaggagactactcgggaaggcgaacggagagagcaagtcctaaaggccctcagcgaggaaaaagacgtgctgaaacagcaactgtcagccgctacctccaggattgccgaactagagagtaaaaccaacactctacgccttagccagactgtagcccctaactgcttcaacagtagtatcaacaacattcacgagatggaaatccagctgaaagacgccctggagaaaaaccagcagtggctagtctacgatcagcagagggaggtgtacgtgaaggggttgttggccaagatattcgaactggaaaagaagactgagaccgccgctcacagcctcccccagcagactaaaaagccagagagcgagggatacctgcaggaggaaaagcagaagtgctacaacgatcttctagcctcggccaaaaaagacctggaggtcgaacgccagaccataactcagctatcttttgaactctccgagttccgcaggaagtacgaagagacgcagaaggaagtgcataaccttaatcaactgctctacagccagcgcagagccgatgtccaacacctggaggacgaccgacacaaaaccgaaaagatccagaagctaagagaagagaacgacattgccagaggcaaacttgaagaggagaagaaaagaagcgaagagctattaagccaggtccaattcctctatacaagcctcctgaaacagcaggaagagcaaacacgggtcgctctactggagcagcagatgcaggcctgtactttggacttcgagaatgagaaactagaccgacaacatgtgcagcaccagctgcatgtgattctcaaggagctgcggaaagcaaggaatcagattacacagttagagtctctcaaacagcttcacgaatttgcaataacagagccactggtgaccttccagggagaaactgagaacagagagaaagttgccgcttcaccgaagagccctaccgccgcacttaatgaatcgctagtcgagtgtcctaagtgcaatatccaataccctgcgactgagcacagggatttgttggttcacgtcgagtactgttccaaatag

SEQ ID NO: 217884 - DNA, 627 bp, synthetic construct
  misc_feature 1..627: note = Description of Artificial Sequence: Synthetic coding sequence
  source 1..627: mol_type = other DNA
taatcttctatcaataatatccacgagatggagattcagttgaaagacgcccttgaaaagaaccagcagtggctggtctacgatcagcagagggaggtgtacgttaaggggctgctggccaaaatctttgagctggagaagaaaactgagacggctgcccacagtcttccccagcagaccaagaagccagaaagcgagggttacctgcaagaagagaaacagaaatgctacaacgacctgctcgcctccgcgaagaaagacctggaggtcgaacgtcagactatcacacaactcagctttgaacttagcgaattccggagaaagtatgaagagacccaaaaagaagtgcataacttgaatcagctactttatagccagcgaagagcagatgtccaacacctagaagacgatcgacataagacagaaaagatacaaaagctcagggaggaaaacgatatcgcccgtggaaaactggaggaggaaaagaagcggtccgaagagctgctgtctcaagtgcagttcctgtatacctctctgctgaagcagcaggaggagcagactcgagtggcacttcttgaacagcaagtgctgatcagagtggcctcgaagtttaacagcgcatgttag

SEQ ID NO: 217885 - DNA, 1425 bp, synthetic construct
  misc_feature 1..1425: note = Description of Artificial Sequence: Synthetic coding sequence
  source 1..1425: mol_type = other DNA
atggcggctgcttcggtgtccgccgcttccggtagtcacctgtcgaactcgttcgcagagcctagcagaagcaacggttctatggtgagacacagttcctccccctacgtagtgtatcctagtgataagccatttctgaattcagatctccgtcgcagccctagcaagcctactctcgcttacccagagtctaatagccgagcaattttcagtgccttgaaaaacttgcaagataagattaggcgcctggagctcgagcgcatccaggccgaggagtcagtgaaaaccctgagcagagaaactatcgagtataagaaagtgctggatgaacagattcaggagcgtgagaactctaagaatgaagaatccaaacataaccaggagctgacctcgcaactcttagcggctgaaaataagtgcaacctgctcgaaaagcagctggaatatatgcgcaatatgattaaacatgccgaaatggagcgaaccagtgtgcttgagaaacaagtttcactcgagagagagcgtcagcatgaccagacacacgttcaaagccaactggagaaactcgaccttttggaacaggaatacaacaagctcactacaatgcaggctctggccgaaaagaagatgcaggagctggaggcgaagctccacgaagaagaacaggagcgcaagcgaatgcaggcaaaagccgcagagctccagaccggactggaaacgaatcgcctaatttttgaagataaagccaccccctgcgtacctaatgccagaaggataaagaagaaaaaaagcaagccacccgaaaaatctacctctccctcccatgcagtagttgcaaacgtgcagttagttcttcacctgatgaagcagcacagtaaggccctctgcaatgaccgggtaataaatagcataccactggctaagcaagtgtcatcaagaggcggaaaaagtaaaaaactctccgtcaccccacctagttcaaacgggatcaacgaagaactgtccgaggttttgcaaacactgcaagacgaatttgggcagatgtcctttgaccatcagcagttagcaaaactcatccaggagtcccccacagtggaactgaaggataagctggagtgcgagctggaagccctagttggcaggatggaagccaaggccaatcagattaccaaggtgcggaaatatcaggcccagttggagaaacagaaacttgaaaaacagaaaaaagagctaaaggctactaagaagacactggacgaggagcggaatagctcctccaggtccggtatcactgggactacaaataagaaggattttatgaagttacgacctggcgagaagaggagaaaaaatcttcagctactgaaggatatgcagagtatacagaatagccttcagtcttcatcgctctgttgggattactag

SEQ ID NO: 217886 - DNA, 1503 bp, synthetic construct
  misc_feature 1..1503: note = Description of Artificial Sequence: Synthetic coding sequence
  source 1..1503: mol_type = other DNA
atggctgccgcatcagtgagcgccgcaagtggctctcacctcagcaactcatttgccgagccgagtcgctcaaacggaagcatggtcaggcattcaagctctccctacgtggtgtacccgtcagataaacctttcctcaacagcgatttacgacgctccccctccaagcccacactggcatatccagagtctaatagtcgcgcaatcttttctgcccttaaaaacctgcaagacaagattaggcgccttgagttagaaagaatccaagccgaggaatcggtcaaaacgcttagtcgcgagactatcgaatataaaaaggtcttggacgaacagatccaggaacgggaaaacagcaagaatgaggaatcaaaacacaatcaggagctgacatcgcaactgctggcagccgagaacaagtgtaacttgctcgaaaagcaactcgaatacatgcgtaacatgatcaaacatgctgagatggaacggactagcgtgctcgagaagcaggtttccctcgaacgtgagagacagcatgaccagacgcacgtgcagtcacagttggagaaactcgatttgctggaacaagaatacaataagctcacaactatgcaggcactggccgaaaaaaagatgcaggagctggaagctaaactgcatgaagaggaacaggaaaggaagcgcatgcaagctaaggcggcagaactgcagaccggccttgagaccaacaggctgattttcgaggacaaggctacaccctgcgtcccaaacgccaggcggattaagaaaaagaagtccaaaccccctgagaaaaaaagctctcggaactactttggagcacaacctcattacaggctgtgccttggcgacatgccctttgtcgccggaaagtccacttcacctagccacgcagtggtggccaatgtgcagttagtcttgcacttaatgaaacagcactcgaaagctctctgtaacgatagggttatcaactccatacctctggcaaagcaggtgtcaagtaggggcggtaaaagcaagaagctctctgtgaccccccctagctccaacgggattaacgaggagctgtctgaggtgctgcagaccttgcaggatgaattcggtcagatgtcattcgaccatcaacaattggccaagcttatacaggagagtccaaccgttgagctaaaagataaactagaatgcgagttagaggccctggtcggacgcatggaggctaaagcaaaccagatcaccaaagtcaggaagtaccaggcgcagctggaaaagcagaagctcgagaagcagaagaaagaactgaaagcaactaaaaagaccctggatgaggagaggaactctagttccaggagcgggattaccggcactacaaacaaaaaagactttatgaaactgcggcctggggagaagcgcaggaagaacctgcagcttctgaaggatatgcagtcaatccaaaatagtctgcagagttcctccttgtgctgggattattag

SEQ ID NO: 217887 - DNA, 813 bp, synthetic construct
  misc_feature 1..813: note = Description of Artificial Sequence: Synthetic coding sequence
  source 1..813: mol_type = other DNA
atggccgctgcgagcgtctcggcagcgtccggtagtcatctgtctaattctttcgccgagccttcccgaagcaacggcagcatggtgcgtcattcatcgtccccatacgtagtttacccttcagacaaaccattcttgaatagcgatctgcgcagatctccctctaaacccaccttggcataccctgagagcaactccagagcgatcttcagcgcactcaagaacttacaagataagatccgaaggttagagctggagcgaatccaggccgaggaaagtgtgaagaccctgtccagagaaacaattgaatataagaaagtgctcgatgagcagatccaagaaagggagaatagtaagaacgaagaatctaaacataaccaagagttgacatctcagctacttgcggctgagaacaagtgtaacctcctagaaaagcaattggagtacatgcggaacatgatcaaacacgccgagatggaacgaacatcggtgctggaaaaacaggtctccctggaacgggaaagacagcatgatcagactcacgtgcagagccagctggagaaactcgacctgcttgagcaagagtacaataagctgactaccatgcaggcattggccgaaaaaaaaatgcaagaactggaagccaagcttcatgaagaagagcaggagcgaaagcgcatgcaggcaaaggccgctgaactgcaaacgggactcgaaaccaatagactgatctttgaagataaggctactccctgtgtgcctaatgctaggaggattaaaaagaagaaatcaaagccgcctgagaaggtttag

SEQ ID NO: 217888 - DNA, 1476 bp, synthetic construct
  misc_feature 1..1476: note = Description of Artificial Sequence: Synthetic coding sequence
  source 1..1476: mol_type = other DNA
atgttaacccgtatcgacaattcgttcgctgagccctcgcggtctaacggctctatggtccgacactcttcttctccctatgtggtttacccctccgataagccttttctcaacagcgacctaagacgaagcccgtcaaagcccacactggcctatcccgagtctaactctagggcaatctttagcgcgcttaagaacctgcaagacaagatccggaggctggaactggaacgcatccaggcagaggaatctgtgaagactttatcacgagagaccattgagtacaagaaggtgcttgacgaacaaatccaggagagagaaaattccaaaaacgaggagtccaaacataatcaagaactgaccagccagctgcttgctgccgagaataaatgtaacctccttgagaaacaactcgaatatatgcgtaacatgataaagcatgccgagatggagcgaacctccgtactggaaaaacaagtgtctctagagagggaacggcagcacgaccaaacccatgtacagtcacagttagaaaaactggacctgttggagcaggaatacaataagctgacaacaatgcaggccctagccgagaagaagatgcaggagctggaagcaaagcttcatgaagaggagcaggagagaaagcgcatgcaagccaaagccgctgaactccagaccggcctcgaaactaacagactaatctttgaagacaaagcaacgccgtgtgtgcccaacgcaagacgcataaaaaagaagaaaagcaagccgccagaaaagaagagtagcaggaattattttggagcccaaccccattaccgcctgtgcctcggcgacatgccattcgtggccggtaagtccacatctccaagccatgcagtggtcgctaacgtgcaactggtactgcatctgatgaaacaacatagcaaagctctctgtaacgaccgcgtgattaattccatacctctggctaagcaagtgtcgtcccggggtggaaagagtaaaaagttgtccgtgacacccccaagtagcaatggaattaacgaggaattgtcggaggtgctgcagaccctgcaagacgaatttggtcaaatgtctttcgaccatcagcagttggccaaactcatccaagagagtcccaccgtcgaactcaaagacaagctggaatgtgaactggaagcgcttgtagggaggatggaggccaaagcgaatcagatcacgaaggtgaggaagtaccaagcacagttggaaaaacagaaactagaaaagcagaaaaaagagttgaaagccaccaagaagacactggatgaagagcgcaacagcagcagtcggagtggtatcaccggaactactaacaagaaggatttcatgaaactccgaccaggggagaagaggcgcaagaatctgcagctgttgaaagatatgcagtcgatccagaatagcctgcagtcgagctcactctgctgggattattag

SEQ ID NO: 217889 - DNA, 1794 bp, synthetic construct
  misc_feature 1..1794: note = Description of Artificial Sequence: Synthetic coding sequence
  source 1..1794: mol_type = other DNA
atgtttcccgtggcccctaagcctcaggattctagccaacctagtgaccgtctgatgaccgagaagcagcaagaggaggcagagtgggaatccatcaatgtcctccttatgatgcatggacttaaacccctgagtctggtgaagcgaacagacctgaaggatcttattatctttgacaaacagagttcccagcgaatgaggcagaacctcaagctgttggtggaagagacctcgtgccagcaaaacatgatccaggaactgattgagaccaaccagcagctgagaaatgagctgcagttagaacagtctagagccgctaaccaggagcagagagccaacgacctggagcagatcatggaatcagtgaagtcaaagataggagagctggaagatgagagccttagccgagcctgccaccaacagaacaagatcaaggaccttcagaaggagcagaagactctccaggtcaaatgtcagcactacaagaagaagagaactgaacaggaagagaccattgcttccctccagatggaagtatgtcggctgaagaaggaggaggaggatcggattgttacccaaaaccgcgtttttgcttacctctgtaagcgcgttccacacaccgtgctggatcgtcagctgctgtgcctgatagactactatgaatccaagattcggaagattcatacacagagacagtacaaagaggacgaatctcagtcagaggaggagaatgattacaggaatctcgacgcaagccccacatataagggactgctgatgtccctccagaaccagttgaaggaaagtaaaagcaaaatagatgcattgtctagtgaaaagcttaatctccagaaggacctcgagacacggcctactcagcatgaattgcgtttgtacaagcagcaggtgaaaaagctggaaaaagctctcaaaaaaaacgtcaagcttcaggaattaatcaaccacaaaaaggcagaggatacagagaaaaaagacgagccctccaagtacaaccagcagcaggctctaatagatcagcggtactttcaggtgctctgttctatcaactccattatccataaccctcgggcacctgtgataatctacaaacagaccaagggaggagtccaaaattttaataaagaccttgtccaggattgtggtttcgagcatcttgtgcctgttattgagatgtgggccgaccaactcacgtccttaaaagacctatataagtccctcaaaacactgagcgcggaactcgtaccatggctgaacctcaagaagcaagacgagaatgaggggataaaggtcgaggatttgctgttcatcgttgacacaatgctagaggaggtcgaaaataaagagaaagatagcaacatgccacatttccagaccctgcaggcaattgtgagtcattttcagaagctattcgatgtcccatctctcaacggcgtgtaccccagaatgaacgaggtttataccaggcttggcgagatgaataatgccgtgaggaacctgcaggagctgttagagttggactccagtagtagcctctgcgtccttgtctccaccgtcggcaagctgtgccggctgatcaatgaggacgtaaacgagcaggtgatgcaggtgctgggccctgaagacctgcagtccattatatataagctcgaagagcacgaagagttcttccctgccttccaagcgtttaccaatgacctgctcgagattcttgagatcgatgatctggatgcaattgtgcctgccgttaaaaagctgaaagtcttgtcttactag

SEQ ID NO: 217890 - DNA, 639 bp, synthetic construct
  misc_feature 1..639: note = Description of Artificial Sequence: Synthetic coding sequence
  source 1..639: mol_type = other DNA
atgttccccgtggcgccaaagccacaagacagcagccaaccttcggatcgtctgatgaccgagaagcaacaggaggaggccgaatgggagagtatcaatgtgctgcttatgatgcatggcctgaaacccttgtccctggtgaaaaggactgatctcaaggatctgatcatctttgataagcagtctagccaaaggatgagacaaaatctaaagctgctggttgaggaaacaagctgccagcagaatatgatccaggagttgatcgaaacgaaccagcaactaaggaatgagctgcagttggagcagagtagagctgccaaccaagagcagcgcgcaaacgacctcgaacagatcatggaatctgtcaagagcaagatcggagagttggaggatgagtcccttagtcgagcgtgtcatcaacaaaacaagattaaggacttacaaaaggaacagaagacccttcaggtgaagtgtcagcactacaagaaaaagaggaccgagcaagaggagactatagcctcgctgcaaatggaggtctgcagactcaaaaaggaggaggaggaccgaatcgtcacgcagaatcgagtgttcgcatacctctgcaagcgagttccgcatacagtccttgataggcaatag

SEQ ID NO: 217891 - DNA, 351 bp, synthetic construct
  misc_feature 1..351: note = Description of Artificial Sequence: Synthetic coding sequence
  source 1..351: mol_type = other DNA
atgttccctgtggcccctaagccccaagacagctcgcagccatctgataggttgatgaccgagaaacagcaggaagaagccgaatgggagagcatcaatgtgcttctaatgatgcacggattgaaaccactgagcctggtcaagcgcaccgatctgaaagatttgattattttcgacaaacagtccagccagagaatgcgccagaacctcaaactgctggtggaagaaacaagttgtcagcagaacatgatccaagaactgattgaaaccaatcagcaactgcgtaacgagctgcaactggagcaatcacgcgctgcaaaccaggagcagagagcgaatgacctggaatag

SEQ ID NO: 217892 - DNA, 1665 bp, synthetic construct
  misc_feature 1..1665: note = Description of Artificial Sequence: Synthetic coding sequence
  source 1..1665: mol_type = other DNA
atgtttcccgtggcaccaaagcctcaagattcaagtcaacctagcgacagactcatgaccgagaaacagcaggaagaggctgaatgggagtctatcaacgtgttactcatgatgcatgggttgaagccactatcactagtcaaacgtaccgacttgaaagacctgatcatcttcgataaacaaagcagccagaggatgcggcagaacctaaaactactggttgaagaaacatcatgccagcagaatatgatacaggagcttatcgagacaaatcagcagctccggaacgagctgcagctagagcagtctagagcagccaaccaggagcagcgcgcaaatgatttagaacaaatcatggaatccgtgaaaagcaaaataggggagttggaagatgagtcattgagtcgagcatgccaccagcagaacaagataaaagacctccaaaaagagcaaaagaccttacaagttaagtgtcagcactataagaagaagagaacagaacaggaggaaacaattgctagcctgcaaatggaggtctgccggctgaagaaggaagaagaggataggatcgtgacccaaaaccgcgtcttcgcatacttgtgtaaacgggtgccccacaccgtcctggaccgacagctgctctgtctgattgattactacgagtccaaaatcaggaagattcacacacagcgtcagtacaaagaggatgagtcccagtctgaggaagagaacgattatcgcaatcttgacgcatcgccaacatataaaggtctgctgatgagtctgcagaatcagctgaaggagtccaagtccaaaattgatgccttatcatcagagaagctgaacctgcagaaagatttggaaacacgtccaacacagcacgagcttcgtctgtacaagcagcaggttaagaagcttgaaaaagctcttaagaaaaacgttaagttgcaggaactgatcaaccacaagaaggccgaggacactgagaagaaagatgaacctagcaaatataatcagcagcaggccctcatcgaccagcggtattttcaagtgttgtgttctattaactctattattcacaaccctcgagctccagtcataatctacaagcaaacgaaaggtggcgttcaaaattttaacaaggacttggtccaagactgcggcttcgagcacctagtccctgtaattgagatgtgggccgaccagctgacgtcgttaaaagatttgtacaagtctcttaagactcttagcgctgagcttgttccttggttgaatctgaagaagcaagatgagaacgagggcattaaagtcgaagacctccttttcatcgttgatactatgctggaggaggtggaaaacaaggaaaaagactcaaatatgccccactttcagacgctgcaagccatcgtgtcccacttccaaaaactgttcgatgtgccttcactgaacggcgtgtacccacgaatgaacgaggtctacactagacttggtgaaatgaataacgctgttcggaacctgcaagagctgctcgaactggactcttcaagtagtctgtgtgtcttggttagtacagtcggaaagctctgccggttaatcaacgaggacgttaatgaacaggtgatgcaggtcttgggcccagaagatctccagaggtatctgttctag

SEQ ID NO: 217893 - DNA, 1794 bp, synthetic construct
  misc_feature 1..1794: note = Description of Artificial Sequence: Synthetic coding sequence
  source 1..1794: mol_type = other DNA
atgtttccagtggcccctaaacctcaggatagcagtcagccatccgataggctcatgacagaaaagcaacaagaagaagccgaatgggaaagtatcaatgtgcttctgatgatgcacggcttgaaaccgctgtccctcgttaagaggacagacctgaaggatctcataattttcgataagcagagctcccaaagaatgcgccagaatcttaagttgctcgtcgaggaaactagttgccaacagaacatgattcaggagctaatcgaaaccaaccaacaacttcgtaatgaactgcagctagagcagtcgcgggctgccaaccaggaacagcgcgcaaacgacttagagcaaattatggagtccgtaaaatccaagattggcgaattggaagatgaaagcctgtcacgggcttgccaccagcagaacaagatcaaagacctgcagaaagagcagaagaccctccaggtgaagtgtcagcattataaaaagaaacggacggagcaggaagagactatcgccagtctgcaaatggaggtctgtaggctgaaaaaggaagaggaggataggattgtcactcagaacagagttttcgcttacctgtgcaaacgagttccccatactgtgttggaccggcagctgctttgtctgattgactactatgagagtaaaatccggaagattcacacacagcgccagtacaaagaagatgagtctcagtcagaagaggaaaatgactaccgtaacctggatgccagcccaacctataaaggactgctgatgagcctgcagaaccagctgaaggaaagcaaaagcaagattgacgccctgtctagtgagaaattgaatctccagaaagatcttgagacacggccaacacagcatgagctgaggctgtataaacagcaggtgaagaaactcgaaaaagcactgaaaaagaatgtgaagctgcaggagctgataaatcataaaaaagccgaggacaccgagaagaaagacgaaccttcaaaatataaccaacagcaggccctcattgatcaacgctattttcaggtgctttgttcaataaacagcatcattcataacccccgagccccagtcattatttataagcagactaagggcggtgtgcagaacttcaataaggatctcgttcaagactgcgggttcgagcacctggtgcctgtcatcgagatgtgggccgatcagcttaccagcctcaaagatctctacaagagccttaaaactctttcagccgagttggtaccttggcttaacttaaagaaacaggacgaaaatgagggcatcaaggtggaggatctactctttatcgtcgacacgatgctagaagaagtggaaaacaaggagaaagattccaacatgcctcactttcagactctccaagcaatcgtctcccacttccagaagctgttcgatgtgccatctctgaatggtgtgtacccccgaatgaacgaggtgtatacgcgactgggggaaatgaacaacgcagtgcgtaatctgcaggagcttttggaactcgactcctccagctcattgtgcgtgttagtttccaccgtgggaaagctgtgcagactgatcaatgaggacgtgaacgagcaggtgatgcaggtactgggtcctgaggaccttcagtcaataatttacaaactcgaagagcacgaagagttcttcccggcttttcaggcctttacaaacgacttgctagaaattttagaaatcgacgacctcgacgctattgtgcccgctgtgaagaagctaaaagttctcagctattag

SEQ ID NO: 217894 - DNA, 72 bp, synthetic construct
  misc_feature 1..72: note = Description of Artificial Sequence: Synthetic coding sequence
  source 1..72: mol_type = other DNA
atgttcccagtcgctcccaaaccacaggatagtagccagccatcggaccgccttatgacggaaaaacagtag

SEQ ID NO: 217895 - DNA, 1734 bp, synthetic construct
  misc_feature 1..1734: note = Description of Artificial Sequence: Synthetic coding sequence
  source 1..1734: mol_type = other DNA
atgactgagcaggaggaagcggaatgggaatccattaacgtgcttctaatgatgcatggattgaagccactatccctagtgaaaaggacagacctgaaggatctgatcatctttgataagcagagctctcagagaatgcgccagaatctgaaattattggtggaagagactagctgtcaacagaacatgattcaggaactcattgagacgaatcagcaactcaggaatgagcttcagctagagcaatctcgcgcagctaaccaggagcagcgggcaaatgacctcgagcagattatggaaagcgtgaagtcaaagatcggtgaactcgaggacgagagcctgtctagagcatgtcaccagcaaaacaaaattaaggatctgcagaaggagcagaagaccctccaggttaagtgtcaacactacaagaaaaaaaggaccgagcaagaggaaacaatcgccagcctgcaaatggaggtgtgccgccttaagaaagaggaggaggacagaatcgtaacccaaaatagagtttttgcatatctgtgcaagagagtccctcataccgttttggatagacagctactgtgcttgattgactattacgagtcgaagattaggaagatccacacccagaggcaatacaaggaagatgagtctcagagcgaagaagagaatgattatcgaaacttagacgcctcaccaacgtacaagggactgctcatgagcctacagaaccaattgaaggagtctaagtccaagatcgacgccctttcctctgagaagctcaatctgcagaaggatctggaaaccagacccacccaacatgaacttaggttgtataagcagcaggtgaaaaaactggaaaaagcgctaaaaaaaaatgttaagctacaagagttgatcaaccataaaaaggccgaggatacagagaagaaggatgagccttcaaaatacaatcaacagcaagccctgatagatcagcggtatttccaggtgctttgctcaattaattctatcatccataatcccagagctccagtcataatctataagcaaacaaaaggcggagtgcagaactttaacaaggaccttgttcaggattgcggcttcgagcatctcgtgcctgttatagaaatgtgggcggaccaactgactagtttaaaagacttgtacaagagcctgaagacactgtctgctgagctggtgccttggctcaacctcaaaaagcaagatgagaatgagggaatcaaggtcgaagatttactgttcattgtggatactatgcttgaggaggtcgagaacaaagaaaaagattccaacatgccccatttccagaccctgcaagccatcgtaagccactttcagaagctgtttgacgtgcctagtctgaatggagtgtatccgcgtatgaacgaagtttatacgcgcctgggagagatgaacaacgccgtgcgcaatctgcaagagctactcgagctcgactcatcgagtagcttatgcgttctggtgtctaccgtgggtaagttatgcaggctgattaatgaggacgtgaatgaacaagtgatgcaagtactcgggccagaggacctgcagtctatcatctacaaattggaagagcacgaagagtttttccctgcttttcaagcctttacaaacgatttactcgaaattctagagattgatgacctcgacgccatcgtgcctgcagtgaagaagctgaaggtactgtcatactag

SEQ ID NO: 217896 - DNA, 3666 bp, synthetic construct
  misc_feature 1..3666: note = Description of Artificial Sequence: Synthetic coding sequence
  source 1..3666: mol_type = other DNA
atgctttttccactgcaagttgccgctgtgaccagctcagttcgggacgaccccttagaacattgcgtgagccccaggactagagccaggtcccctgagatctgcaagatggccgacaatctggacgagtttatcgaggagcagaaggcccgactagcggaagataaggcagagctggaaagcgatccaccctacatggagatgaaaggcaagctgtctgctaagctcagtgaaaacagcaaaatcttaatatctatggctaaggagaatataccgccaaacagtcagcagactcggggaagtctagggattgactacggcttgagtctccctctgggagaagactatgagcgcaagaagcacaaactgaaagaggagctgcgccaggactacagacggtatttgacccaggagcggctgaaacttgagcggaacaaagagtacaatcaatttttgcgtgggaaagaagaaagcagtgaaaaattccgacaggttgaaaagtccacggagcccaagagccagcgtaacaagaagccaattggccaggtaaagcccgacctgacctcacaaatccagacctcatgcgaaaatagcgaggggccacgcaaagacgtactgaccccatcggaggcgtatgaagaactgcttaaccagcggaggctcgaggaagaccgttatcgccaactcgacgatgagatcgaattgcgcaataggcggattatcaagaaggctaacgaggaggtgggtatcagcaatttgaaacatcagcggttcgcgtctaaggccggtatccccgaccgaagatttcaccggtttaacgaggacagagtgttcgaccgcaggtatcaccggccagatcaggaccccgaggtgtcggaggaaatggatgagcgcttcaggtatgagtccgactttgataggagactctctagagtgtacactaacgatagaatgcataggaataagagggggaatatgccacctatggagcatgacggggatgttatcgaacagtctaacattcgcattagttccgccgagaataaatctgctcccgataatgagactagcaaaagtgccaatcaagatacttgttctccattcgctggcatgttgtttggtggggaggaccgcgaattaattcagcgtcggaaggagaagtataggctcgagctgctggagcagatggcagaacagcagagaaataagcggagagagaaggacctggaacttagagtggccgcttccggagctcaggacccagagaaaagcccagaccgtttgaaacaattcagcgtggcgcctcgacattttgaggaaatgataccccctgagcgcccacggattgctttccaaactcccctgccacccctctccgctccctccgtgcctccaattccctctgtccacccagtaccatcacagaacgaagaccttagaagtggtttaagcagcgctcttggcgagatggttagccctagaattgctcccctgccccctcctccattgcttcctccgctcgctaccaactatcgcactccttacgacgatgcttattacttctacgggtcacggaacacatttgacccgtccctggcgtactatggttctggtatgatgggggttcagcctgctgcttacgtgtctgctcctgttactcaccagttggcacaacccgtagtgaatactgttggtcagaatgagttaaaaattacatccgatcaggtaatcaactcggggcttatcttcgaagacaaacccaagccttcaaagcagtcactccagtcttatcaggaagcgctgcaacagcagattcgggagcgggaagaacgaaggaagaaggagcgagaggaaaaagaggaatatgaagcaaagcttgaggcagagatgcgcacctataacccttggggaaagggcggagggggagccccactgcgggatgctaaagggaacctcattacagatctcaaccgaatgcataggcagaatattgatgcctaccataatcctgacgccaggacttatgaggataaaagggctgttgttagtttggacccgaatctggccacttcgaatgccgaaaacctggaggacgctgctaacaagagctcagggcatatgcagacacaatcatcacctttcgcacggggtaacgtgttcggcgaaccccctacagagcttcagatcaagcaacaggagctgtataaaaatttcctgagattccagatcgaagagaaaaagcagcgggaagaggcagagcgggaacgacttagaatcgctgaagagaaggaagagcgcagactggcagagcagcgggctcgtattcagcaggaatatgaggaagaacaggaaaaaaaacgagagaaggaggaagagcaacgtttaaaaaacgaagaacatattagactagcagaagagcgtcaaaaggaggccgagcgcaagaagaaagaagaggaagagaagtacaacttacagttgcagcattattgcgagcgcgataacctcattggggaggaaacgaaacacatgagacagccatcccccattgttccggcattgcagaataaaattgcttcaaagcttcagaggccaccgtcagtggattctatcatcagatccttcatccacgagagcagtatgagtcgggcacagtctcccccagtaccggctagaaaaaatcagctgcgcgcagaagaggagaaaaaaaacgtcatcatggagctgtctgaaatgcgcaagcagctgaggtcggaggagagacggttgcaagaacgccttttgcatatggactccgatgacgaaatccccattaggaagaaagagcgcaatccgatggacatttttgatatggccaggcatcggcttcaggcaccagtccgcaggcagagtcccaaaggcctggacgctgctacgttccagaacgtgcacgatttcaatgaattgaaggatcgggactcagagacccgagtggatctgaaattcatgtatctcgatcccccaagagatcatcataccctggaaatccagcagcaggccctcctgcgagagcagcagaagcgcctgaaccgtattaagatgcaagagggcgcaaaggtggacttggacgccatcccaagcgccaaggtgagagaacagcgcatgccaagagacgacacctctgacttcctgaagaatagcctactggagtccgactccgctttcattggggcatacggcgagacttacccggctatagaagacgacgtgctcccaccgccttctcaactcccttcagccagagagaggcgtcgtaacaaatggaagggactagatatagatagctctcgtccaaacgtcgccccagatggattgtccctcaagagcatttccagcgtcaacgttgatgagctgcgcgtcaggaacgaggaacggatgagaaggcttaacgagtttcacaacaagccgattaataccgatgacgagagctccctcgtggatcccgacgatattatgaagcatatcggagatgatggcagcaactcggtggcaacagagccctggctaagacctggtacctccgaaactctcaagcgctttatggctgagcagttgaaccaagagcaacaacagattcccggtaagcctggcacctttacatggcagggcctcagtactgcccatggctag

SEQ ID NO: 217897 - DNA, 3771 bp, synthetic construct
  misc_feature 1..3771: note = Description of Artificial Sequence: Synthetic coding sequence
  source 1..3771: mol_type = other DNA
atgctcttcccacttcaggtggccgcagttacctcttctgtgcgcgacgacccgctagaacactgtgtcagccccaggacccgcgctagaagccccgagatttgcaagatggccgataacctggatgaattcattgaagaacaaaaagctcggcttgccgaggataaagccgagctcgaatctgacccaccctatatggagatgaagggtaagctgtccgccaaactgagtgagaatagtaaaatccttatctccatggccaaagagaacatcccaccaaattcccaacaaaccagaggcagcctgggcattgattacggactgtccctgcccctaggggaggactatgaaaggaaaaaacacaaactgaaggaagagctgagacaggactacagaagatatctgacacaaaaagtatttagcggaacgtcgaaaaagaattttctaagcaccagtgagaccgatccgtccacgctcggcgttagcttacctattggagagcgcctgagcgcgaaggagcgcctcaaacttgagcgaaacaaggaatacaaccagtttctgcgcggtaaggaggagtcctctgagaagtttcgtcaagtcgaaaagtctaccgagcccaaatctcaacggaataagaagcccataggacaagtgaagccagatctcacatcacaaatacaaacctcctgcgagaatagtgaaggtccacggaaggacgtgctgacaccaagcgaagcttacgaggagctgctgaaccagcggagactggaggaagaccgctacagacaactggatgatgaaatagaactacgaaatagacgaattatcaaaaaagcaaacgaagaagtcggaattagtaaccttaaacatcagcgcttcgccagcaaggccggtattcccgatcgacgctttcacagattcaatgaagaccgtgtctttgaccggaggtaccacaggcccgatcaagaccctgaggtgtctgaggaaatggatgaaaggtttcgctatgagagtgatttcgacaggcggctctcacgtgtgtacacaaacgaccgcatgcatcgcaataagaggggaaacatgcctcctatggagcatgacggcgacgtcatagaacagtccaatatacgcatcagctcagcagaaaacaaatccgcaccagacaatgaaacctccaagtcagctaatcaggatacgtgtagcccgtttgctgggatgttgtttggcggagaggatcgtgaactcattcagcggagaaaggagaagtatcgcttggaattactcgaacagatggcagagcagcagcgcaataagcgcagagaaaaagatctagagttgcgcgtcgccgcaagtggggctcaggaccctgagaaaagcccagacaggttgaaacagttcagcgtggccccacgccacttcgaggaaatgattcctcccgagcggcctagaatcgcttttcagacaccactgccacccctgagcgccccttctgtgccccctattcccagtgtgcatcccgtcccttctcagaacgaggacctgcggagtggactttccagcgctctcggggaaatggtgtctccccgtatagctccccttccccctcctcccctgttaccaccactggccactaactaccgcaccccgtatgacgacgcttactacttttacggtagccgcaatacctttgacccctcactggcgtactatggctccggtatgatgggtgtgcagcctgccgcttacgtatccgctccagtaacacatcaactggctcaacctgtcgttaacaccgtgggacagaacgagctcaagattacgagcgatcaggtgatcaactctggcctgatctttgaagacaagccaaagccaagtaagcagagtctccagagttaccaggaggccctgcagcagcagattcgcgagcgcgaggagcgaaggaaaaaagagcgcgaggagaaggaggagtatgaagctaagttggaagccgaaatgcgaacatacaacccttggggcaaaggtgggggaggcgcacctctaagggatgcaaaagggaacctcatcactgacctgaatcgaatgcaccggcagaatattgacgcgtaccataatcctgatgcaagaacctacgaagataaaagggcagtcgtgagtttggacccaaatctggccacctccaatgccgagaacctggaggacgccgctaacaaaagcagtgggcacatgcaaacgcagtcctctccatttgcacgtgggaatgtcttcggcgaaccacccaccgagctgcagattaaacagcaagaactctacaagaactttctaaggttccagatcgaggaaaaaaaacaaagagaggaggccgaaagagagagactaaggatcgctgaagagaaggaggagcgtaggctggcagaacagcgggcacgaatacagcaagaatatgaagaggagcaggaaaaaaaacgcgagaaagaggaagagcagcgcttgaagaacgaagagcacattagactggccgaagagcggcagaaagaggcagagcggaaaaagaaagaagaagaggagaagtataatctgcaactgcaacattattgtgagagagacaacctgattggcgaagaaaccaaacacatgcgacaaccctctccaattgtgccagctctgcagaacaaaatcgcttctaaattacagcgtccaccctctgttgactccatcatccgttccttcattcatgagagctctatgagtagggcgcaatcacccccagtccctgctcgcaagaaccagctgcgggcagaggaggaaaagaaaaatgttatcatggaactgtctgagatgcgaaaacagcttcgctctgaagagcggagacttcaggaacgtctgttgcatatggatagtgacgatgagattccaatcaggaaaaaggaaagaaatccaatggatatctttgacatggcaaggcatcggctccaggctccagtccgaagacagagtccaaagggcctagatgccgcaaccttccagaatgttcacgattttaacgagctgaaagacagggacagcgaaacccgggtggacctaaagtttatgtaccttgacccgccacgagatcaccacacactcgagatacagcaacaggcgctgctgcgcgaacagcagaagcggttaaatcggatcaaaatgcaagaaggggcaaaagtggatctcgacgcaatcccttcagctaaggtgagagagcaaagaatgccgagggatgacacttccgactttctgaagaacagtctgctggaatccgactctgcattcatcggcgcttatggagagacttatccggctatcgaggacgatgtgctgccaccaccatcccagttgccctcagctcgcgaaagaaggcgaaacaagtggaaaggcctcgatatcgatagcagcaggcctaacgtcgccccagatgggttgagcctgaagagcattagttccgtgaacgtggacgaactgcgcgtgcgtaacgaagaaagaatgagaaggttgaatgagttccataataagcctattaacacggatgatgagtcctcccttgtggaccccgacgacatcatgaagcatattggcgatgatggttcaaacagcgtagctaccgaaccctggttgcggcctggcacctctgaaaccctgaagaggttcatggctgagcagttaaatcaggagcaacagcaaatccccggaaagccgggaacttttacttggcagggactctctaccgctcatggatag

SEQ ID NO: 217898 - DNA, 2631 bp, synthetic construct
  misc_feature 1..2631: note = Description of Artificial Sequence: Synthetic coding sequence
  source 1..2631: mol_type = other DNA
atggacgaacgttttcggtatgagagtgattttgaccgtagactgagtagagtctacacgaacgatcgcatgcatagaaataagcgcggaaatatgccaccgatggaacatgacggcgacgtaatcgaacaaagcaatatacgcatcagctccgctgagaacaagtccgccccagataacgagaccagcaaaagcgccaatcaggacacctgtagcccttttgctggaatgcttttcggaggcgaggacagggaactgattcagcgcagaaaagaaaaatacaggctggagctgctggaacagatggccgagcagcagcggaataaaaggagagagaaggacctcgaattacgggttgccgcttccggggctcaagaccctgagaagtcccccgaccgactcaaacagttcagtgtcgctcccaggcattttgaagagatgatcccccctgaacggcctagaattgctttccaaaccccactgcctcccctctctgccccaagcgttccacctattccttccgtccatcccgtgccatctcagaacgaagatctccggtccggattatcctctgccctgggggagatggtgtctcctcggatcgctccccttcccccaccacccctcctaccccctctggctacaaactaccgaaccccttatgacgatgcctattacttctacggctccaggaatacttttgacccatctcttgcatattatggtagcggaatgatgggagtgcagccggctgcctatgtgtcagcaccagtcacgcaccagctggctcaaccagttgtgaatactgtcggccagaatgaactgaagatcacttccgatcaggtgataaacagcggtctcatttttgaagacaaacccaagcccagcaagcaatcccttcagtcatatcaggaagccttgcagcagcagatcagagagcgggaagagcgcaggaagaaggagcgggaggaaaaggaggaatacgaggcgaagttagaagccgaaatgagaacctataatccctggggtaaaggaggaggcggagctccgctgagagatgcgaaaggtaacctgatttctcacatgcagacacagtcatccccttttgccagagggaatgtcttcggcgaaccccctactgagctgcaaattaagcagcaggaactatacaagaactttctgaggttccagattgaggaaaaaaagcagcgagaagaagccgagagagaacggttaaggatcgctgaagaaaaagaagaaaggaggcttgcggagcagcgcgctcggattcagcaggagtatgaggaagaacaggagaagaagcgcgagaaggaggaagagcagaggcttaaaaacgaagagcacatacgtctggcagaggagcggcaaaaagaggcagagaggaaaaagaaagaagaggaagagaagtacaaccttcaactgcagcactattgcgagcgagacaacttaattggtgaggaaaccaaacatatgcgacagccatccccaattgtccccgctctccagaacaaaatcgcctctaaactccaacgcccacctagtgttgatagcatcataagatcattcatccatgaaagctctatgtccagagctcagtctcctcccgttccagcccgaaagaatcagttgcgggcagaggaagagaaaaaaaacgtgattatggagttatcagaaatgaggaagcagcttcggtctgaggaacgaaggcttcaggaacgtctgctacatatggattcagacgatgagatccctatccggaaaaaagaacgtaatcctatggacattttcgatatggccaggcaccgcttgcaggcacccgtccgtaggcaatctcctaaaggactagacgctgccacttttcagaatgtgcacgatttcaatgaactgaaggatcgggatagcgagacacgggttgatttaaaatttatgtacctggatccaccacgagatcaccacactctcgagattcaacaacaggccctgctgagggaacaacagaagcgcctgaaccgaattaaaatgcaggaaggtgccaaggtcgatctggacgctataccctcagcgaaggtgagggagcagcgcatgccgcgagacgatactagcgatttcctgaagaacagcttgcttgagtcagactctgcctttataggagcctacggggagacataccctgccatcgaggacgatgtactgccgcctcccagccagctcccatcagccagagagcgtagaagaaacaaatggaaggggttagatatagactccagcaggccaaatgtggcgccagatgggctgtcgctgaagtctatcagttcagtgaacgtggacgaactgcgggtcaggaacgaggaaagaatgagacgactgaatgagttccataataaacccataaataccgatgacgagtcttccctggtcgatcccgacgatattatgaagcatatcggcgacgacgggagcaatagtgtggccactgaaccgtggctgaggccaggcacatctgagacactgaagagatttatggcagagcaactcaaccaggaacagcagcagattccaggtaagccgggtacattcacgtggcagggattatccacggcacacgggtag

SEQ ID NO: 217899 - DNA, 2631 bp, synthetic construct
  misc_feature 1..2631: note = Description of Artificial Sequence: Synthetic coding sequence
  source 1..2631: mol_type = other DNA
atggacgagcgattccgctatgagagcgacttcgatcgccgattgtctcgggtgtacacaaatgacagaatgcaccgcaacaagcgagggaacatgcctcccatggagcacgatggcgacgtgatcgaacagtccaatatacgtatcagcagcgccgagaacaagtccgctcccgacaatgaaacgtcaaagagtgccaaccaggacacatgctccccattcgcaggcatgttgtttgggggagaggaccgggagctcatacaacgccgtaaggagaagtaccggctcgagttgctggagcaaatggcagaacagcagaggaacaagcgccgtgagaaggatctggagcttagggtggcagcgagcggcgctcaggaccctgaaaagtcccctgatcggttaaagcaattttccgtggcccctcggcattttgaagaaatgatccctccagagcgccctcgcatcgcatttcagactcctctgccgcctctgtcagccccatctgtccccccaattccttccgtgcaccctgtgccaagccaaaatgaggacctgcgtagtggcctgagctcagcactgggcgaaatggtgagccctcgcatcgcgccactcccaccccctcctttgttacctcctctggccactaactatcgaacgccctacgatgatgcatactatttttacggtagcaggaacacattcgatccaagcttagcttactatggctccggaatgatgggagttcaacccgctgcctatgttagcgctcctgtgacccaccaattagcacaaccagtcgttaacactgttggacaaaacgaactgaaaataactagtgaccaggtgattaatagtgggctgattttcgaggacaagcctaaaccatccaaacaatcccttcagagctaccaagaggctctgcaacagcagatccgagaaagggaagaacggcgaaaaaaagaaagagaggaaaaagaggaatacgaagctaagttagaggctgaaatgagaacttataatccttggggaaaagggggaggcggagcgccactgcgggacgctaaaggtaacttaataagtcacatgcagacacagagcagcccttttgccagagggaatgttttcggagaaccaccaacagagctccaaatcaaacagcaggaactctacaaaaatttcctccgttttcagatcgaggaaaagaagcaaagagaggaggctgagcgcgagcgtctccgcatcgccgaggaaaaagaggagagaagacttgccgagcaacgcgctcgtattcaacaggagtacgaagaggagcaggagaaaaaaagagagaaggaggaggagcaacgcttgaaaaacgaggaacacataagactggcggaggagcggcaaaaggaagccgagaggaagaagaaagaggaggaagagaaatataatcttcagctgcagcactattgcgagagagacaatctcatcggagaggagacaaagcatatgagacagccttccccaatcgtgccagccctgcagaacaaaattgccagcaaactacagcgtccaccttccgtggatagcatcattagatcgtttattcatgaaagctctatgagcagggcgcaatctcccccagtccctgctcgcaaaaatcagctgcgggcagaggaggagaaaaagaatgttataatggaactatccgaaatgcgcaaacaactccggtctgaggaacggcgtctgcaggagcgtctccttcatatggatagcgatgatgagatccctataaggaaaaaggaacgcaatcccatggatatttttgacatggcacgccacaggttgcaggccccagttaggcgtcagagcccaaaagggctcgatgcagccacattccagaatgtgcatgacttcaatgagctgaaggatcgtgattctgaaacacgtgtcgatcttaagttcatgtacctcgacccgccacgtgaccaccacacactggagattcagcagcaggcactcctacgggaacagcagaaacgcttgaacagaatcaaaatgcaagagggcgctaaggtggatttggacgccatcccctccgctaaagtgagggaacaacgcatgcctcgggacgatacttcagattttctgaagaactctcttttagaatcggacagtgccttcatcggggcttatggcgaaacgtatccagcgattgaggacgacgtgttacccccacccagtcagctccctagcgcccgagagagacggcgaaacaagtggaaggggctggacattgactcttccaggcctaatgtggctccagacggcctatccctaaaatccatcagctctgtgaacgtcgatgaactccgcgtcaggaacgaggagaggatgcggagactgaatgagtttcataataaaccaattaataccgatgatgaatcctccctagttgaccccgacgacatcatgaagcatattggagacgacggcagtaatagtgtcgctactgagccttggctaaggccaggcaccagcgaaactctcaaacgctttatggcagagcagctcaaccaagagcagcagcagatccctggaaaaccaggtaccttcacctggcagggcctgtctacggcgcacggctag

SEQ ID NO: 217900 - DNA, 1677 bp, synthetic construct
  misc_feature 1..1677: note = Description of Artificial Sequence: Synthetic coding sequence
  source 1..1677: mol_type = other DNA
atgccgtggaggcgtcgcaggaaccgggtgtctgcactggagggaggaagggaagaggaagctccaccagaagccgctgcggtccctcctgccctgttgaccagtcctcagcagaccgaagcagctgccgaacgaatcttgctccgaggaatattcgagattggcagagattcatgtgacgtcgtattgtccgagcgggctctccgatggcgaccgattcagcccgagcggcctgccggtgactcaaaatacgatctcctgtgtaaagaggaattcatagagctgaaggatatcttctctgtgaaacttaagaggcggtgcagcgtcaagcagcagcgttctggcaccctgcttgggattactttgtttatttgcctcaagaaggaacagaataagctgaaaaattccacgttagacctcatcaacctgtccgaggatcattgtgatatctggtttcgacagtttaagaaaattcttgccggttttcctaaccggccaaaatcactgaagattcttttgaacccacaaagtcataaaaaagaggctacacaggtgtactacgaaaaagtggaaccattacttaaacttgccggtataaaaaccgacgtcactattatggaatatgagggtcacgccctgtctttgctgaaggagtgcgagttacagggcttcgatggtgggcaccgcaaaccacttttcgctattcactggagcgtccagcgtcttttcacaggtatgcaaactctcgaaccttctgtcgtctgcgttggcggtgatggatctgcatcagaggtggcccacgcattactcctcagagcccagaaaaacgcgggaatggaaacagatcgcattctcactccagttcgagcccaactccccctgggcctgataccagccggatctactaacgtgttagcacacagcttgcacggggtgccacacgtcattaccgccacgctgcacatcattatgggccacgtccagctggtcgacgtctgcaccttctcgactgcgggaaaactcctgaggttcggttttagtgcaatgttcggctttggtgggagaactctcgcactggcagagaaataccgctggatgagtcccaatcagcggagagattttgccgtggtcaaagctctagccaaattgaaagcggaagactgtgagatttcattcttgccattcaatagtagtgacgacgtacaggagcgaagagcccagggctctcctaagtccgattgtaatgaccagtggcagatgatccagggccaattcctcaatgtgtcaataatggcgattccgtgtctttgctctgtcgcaccgagggggttggcccctaataccagacttaataacggatcaatggccctgattatcgctagaaatacctcccgccctgaatttatcaagcatctgaaacgttatgcatccgtcaagaatcagtttaactttccgtttgtcgagacttatactgtagaagaggtgaaagtgcacccaaggaacaatacaggtggctataatcctgaagaggaagaggacgagacagcatcggagaactgtttcccatggaacgtcgatggagacctaatggaagttgccagcgaagttcacattagactccaccctagactcatctccctctatggcggaagcatggaggaaatgatcccgaaatag

SEQ ID NO: 217901 - DNA, 1260 bp, synthetic construct
  misc_feature 1..1260: note = Description of Artificial Sequence: Synthetic coding sequence
  source 1..1260: mol_type = other DNA
atgccttggcgacggcgacgaaatagggtttcagccttggaggggggacgcgaggaagaggcacctcccgaggccgcagctgtccctccggctttgctcacatccccgcagcaaaccgaggccgcagccgagcggattctccttcgcggtatcttcgagatcggcagggactcatgtgacgtagtgctgtcagaacgggctctgcgctggcgaccaatccagcctgaacggccagccggtgactcaaaatatgacctgctgtgcaaagaagaattcatcgaactgaaagatatctttagtgtgaaattaaagcgcaggtgcagtgtgaagcagcagcggtcaggtacactgctcggtattacgttgttcatctgcctcaagaaggaacagaataaactgaagaactctacactagatctcatcaatttgagcgaagatcactgtgacatttggttccgtcagttcaagaagatactggccggatccacaaacgtgctcgcacacagtcttcacggcgtcccacacgtgatcacggccaccctgcacataataatggggcacgtgcaattggtcgacgtttgcaccttttccaccgccggtaagctgctgcgcttcggattctctgccatgttcggttttggagggagaacactggcccttgcggaaaagtaccggtggatgagtccaaaccaacgtcgggattttgccgtggtgaaagctcttgcaaagcttaaagctgaagactgcgagatttccttcctgccttttaattctagcgacgatgtgcaggagcgccgagcacagggcagccctaaatctgattgtaacgatcagtggcagatgatccagggtcagttcttgaacgtgtcaattatggccattccttgtctctgtagcgtggcccctcggggtctggcccctaatacaaggttaaacaacggctcaatggccctcatcattgcccgaaacactagcaggcccgaattcataaagcacctgaagcgctacgctagcgttaagaaccagttcaatttcccctttgtagagacgtacacagttgaggaagtaaaagtgcaccctcgcaataacactgggggatataaccccgaagaagaggaggatgagacagcaagcgaaaactgcttcccttggaacgtggacggtgatctaatggaagtcgcttctgaagtgcatattcgtttacaccctcggctgatttccctatacggcggatcaatggaagaaatgatacccaaatag

SEQ ID NO: 217902 - DNA, 1392 bp, synthetic construct
  misc_feature 1..1392: note = Description of Artificial Sequence: Synthetic coding sequence
  source 1..1392: mol_type = other DNA
atgccatggcgcagaagacgcaatagagtgagcgcgctggaaggagggagggaggaggaggcccctcccgaagctgctgctgtcccacccgcactccttactagtccccaacagaccgaagctgcggctgagaggatcttgctccgaggcatttttgaaattggacgggactcctgtgatgttgttctctccgaaagagcactgcgctggcgcccaatccagccggaacggcctgctggtgactctaagtacgacttgctgtgtaaagaggagttcatcgagctcaaggacattttcagcgtgaagctgaagagacgctgtagcgtaaagcagcagagaagcggaaccctgctcggaattacactgttcatatgtctcaagaaggagcaaaacaagttgaagaattccaccctggacctgataaacctgtccgaagatcactgtgacatttggttcaggcagtttaaaaagatcctagccggattcccaaatcgtcccaagtctctcaagatcttgctgaatccgcaaagccacaaaaaggaagccactcaggtttactatgagaaagtggaacctctgttgaaactcgctggcattaaaaccgatgtaactagaagcacaaatgtgcttgcacatagcctgcacggcgttccccatgtcatcaccgccacattgcacatcattatgggacacgtgcaattggtagacgtctgcacattctcaacggccggaaagttactgagattcggcttcagcgctatgtttggcttcggtggccgaactctggcccttgcagagaaatataggtggatgagcccgaaccaaaggcgggattttgctgttgtgaaggcactcgcaaagctgaaagcagaagattgcgagatctccttcctaccatttaatagtagtgatgacgttcaggaacggagagcccaagggtcccccaagtctgactgcaatgaccagtggcaaatgatacaggggcaattcctgaacgtgtccattatggctatcccctgtctgtgctctgtcgcccctcgcggacttgcccctaacacccgattgaataatggctccatggcgcttatcattgcaagaaatacttcacgccctgagtttatcaagcatctcaaacgctatgcttctgtgaagaatcagttcaattttcccttcgttgagacttatactgtggaagaagtcaaggttcatcccagaaataataccggaggatacaatcctgaggaagaagaagatgagaccgcgtcagagaactgctttccttggaacgttgatggagatctcatggaggtggcatctgaagtccacattcgtctgcaccccagattgatatcgctgtatggaggtagcatggaagagatgatacccaagtag

SEQ ID NO: 217903 - DNA, 1599 bp, synthetic construct
  misc_feature 1..1599: note = Description of Artificial Sequence: Synthetic coding sequence
  source 1..1599: mol_type = other DNA
atgccgtggcgtcgcaggaggaaccgcgtgtccgctctggagggagggagggaggaggaagctcccccagaggcagccgcagtgccccctgccctcctgacttccccccagcaaaccgaggctgctgccgagcggatcctcctgagaggcatcttcgaaatcggtcgcgattcttgtgacgtagtcctgtccgagagggctctcagatggcgtcccattcagcctgagcggccagccggagactcaaagtatgatctcttgtgcaaggaggagttcatcgaacttaaagacattttcagcgtaaagctgaaaaggcgctgtagtgtaaagcaacagcgcagcggaactctactcgggatcactttgttcatttgcctgaagaaagagcaaaataagctaaagaactccacgttggacttaatcaacctgtctgaggatcactgcgatatttggttcaggcagtttaagaagatcctcgccggattcccaaaccgcccaaaaagcctaaaaatcctactgaatccccagagtcacaaaaaagaagccactcaggtttactacgaaaaagttgaaccactgttgaagctcgccggaattaagactgatgtcaccattatggagtatgagggccacgctctcagtctactcaaagaatgcgaactgcaggggtttgacggcgtggtctgtgtaggaggcgacggttctgccagtgaagtggcccacgccctcctgttaagagctcagaagaacgccggtatggagacagatcgcatcctgaccccggtacgggcacaactacctctcggcctgattccggctggatccacaaatgtgcttgcccactcactccatggcgtacctcacgtgatcacagccaccctgcatataatcatgggccacgtgcagttggtggatgtgtgcacgttcagcacggcagggaagctgcttaggtttggcttcagtgcaatgtttggattcgggggtcggactctggcgctggctgagaaatatagatggatgagccccaaccagagacgagactttgctgttgttaaggcactggccaagctgaaagcggaggattgcgagatctcctttttacccttcaactcctccgatgacgtccaggagcgcagggcccagggttctcccaagtccgactgtaatgaccagtggcagatgatccagggtcagtttctcaacgtgagtattatggccataccctgtttatgtagcgtggccccacgtggccttgcccctaatacacgcttaaataacgggtctatggccctcataattgcccgaaatacttctcgacccgagtttataaaacatctcaaaagatacgccagtgtcaaaaatcagttcaacttcccctttgtggaaacctacacagttgaggaagtgaaggtgcaccctcggaataacacaggaggatataacccggaggaggaggaggatgaaaccgcttctgaaaactgctttccttggaacgttgatggtgacttgatggaagtggcctctgaagttcacatacgtctgcaccccaggctgatttctctatacggaggctccatggaggaaatgattccaaaatag

SEQ ID NO: 217904 - DNA, 1545 bp, synthetic construct
  misc_feature 1..1545: note = Description of Artificial Sequence: Synthetic coding sequence
  source 1..1545: mol_type = other DNA
atgccttggcgccgtagacggaatcgggtaagtgctctcgagggcggacgcgaggaggaggcccctcccgaggctgccgcagtgcctcccgctctgcttaccagtcctcagcagactgaagctgccgcagagcggatcctgctgaggggcatatttgaaatagggagggactcatgcgacgtggtgctgtccgagagggctctgcggtggcgccctatccagcccgaacggcctgcaggggatagcaagtacgatctactgtgtaaagaagagttcatcgagctgaaggacattttctcagtgaaacttaaaagacgttgttctgtgaaacagcagagatctggcaccttgctcggaataacactatttatatgcctaaagaaggaacagaacaagcttaaaaacagcacgcttgatctcattaatctatcagaggaccactgtgatatctggtttaggcagttcaaaaagattctggcagtaatggagtacgagggccatgctctctctctcctgaaggaatgtgaactgcaggggttcgatggcggacatcgaaagccactgttcgcaatccactggtctgtccagagactgttcaccggaatgcaaactctggagcccagcgtggtctgtgtaggaggagacgggtctgctagcgaagtggcgcacgccctcctgctgcgtgcacagaaaaacgccggtatggagaccgatagaatcctgacacccgtgagagctcagctgccactggggttgatccctgccggatctacaaatgtgctggcccactcactgcacggagttccccatgtaatcacggcaacacttcatatcattatgggccatgtgcagttggtggacgtgtgcaccttctcaaccgccggtaaattactgagattcggattctctgccatgttcggcttcgggggaaggacactagccctggctgaaaagtaccggtggatgtcccccaatcagcgcagagatttcgccgtggtgaaagcactggcaaagcttaaggccgaagattgcgagatcagtttcttgccattcaatagttcggacgacgttcaggaacgcagggcccaggggagtcctaagagcgattgcaacgatcagtggcagatgatacagggacagttcttaaatgtctctatcatggcaatcccttgtctatgtagcgtcgcacctagggggctggcaccaaataccagattaaacaacggctccatggcactgattatcgcccgaaatactagccgcccagaatttattaaacacctcaagcggtacgcatcagtaaagaaccagttcaattttcccttcgttgaaacttacacagttgaagaagtgaaagtgcacccaaggaacaacactggcggatacaacccagaagaggaggaagatgagaccgcctcagagaattgtttcccgtggaacgtagacggagatctaatggaagtcgccagtgaagttcatataagactgcacccgagacttatttcgctgtacggagggagtatggaggaaatgataccaaagtag

SEQ ID NO: 217905 - DNA, 804 bp, synthetic construct
  misc_feature 1..804: note = Description of Artificial Sequence: Synthetic coding sequence
  source 1..804: mol_type = other DNA
atgcatctactgcttttccagctactcgtcttattgcccttgggcaaaacaacacggcaccaggacggccgacagaaccagtcgtctttatctccggtgctgttaccccgtaatcagcgagaacttcctacggggaaccatgaggaagccgaagaaaaaccagatctgttcgtagcagtcccccaccttgtggctacatcgcctgcaggcgaagggcagcggcagagagagaagatgctgtcaaggtttggacggttctggaagaagcctgagagggaaatgcacccaagtagagattcagactccgagccatttcctccagggacacagagcctaattcagcctattgatggcatgaagatggaaaagtccccactgcgggaagaagctaagaagttctggcatcactttatgttcaggaaaacacctgccagccagggcgtgatcctgccgatcaaaagccacgaggtgcattgggaaacctgtagaacggttccattctcacagaccatcacacacgaaggctgcgaaaaagtggtcgtccagaataatctgtgcttcggcaaatgcgggagtgtgcatttcccgggagctgcccagcacagtcacaccagctgttcgcattgcttacccgctaaattcaccaccatgcacctcccattgaactgcaccgaactgagctctgttattaaggttgtgatgctagtggaggaatgtcaatgtaaggtgaaaacagaacatgaggacggacacatcctgcacgcaggatcccaggattcctttattcccggagttagcgcatag

SEQ ID NO: 217906 - DNA, 789 bp, synthetic construct
  misc_feature 1..789: note = Description of Artificial Sequence: Synthetic coding sequence
  source 1..789: mol_type = other DNA
atggcatggttggaagatgtggacttcttagaggacgtgcccctgttggaggacattccattgttagaagatgtccctttgctggaggacgtgccactcctagaagatacttccaggctcgaagacattaacctgatggaggacatggcgttactggaggacgtggatctgctggaagataccgactttctggaggacctcgacttctctgaagccatggacttgcgcgaagataaagacttcctggaagatatggacagcctagaggatatggccctgctggaagatgtcgatctactggaagacacagactttttggaggatcccgatttcttggaagctatcgatctgcgggaggacaaggacttccttgaggatatggatagcctcgaggacttggaggcaatagggaggtgtggtttttccggcaggcacgggttttttggcaggcgcaggttctcaggccgacctaaactttcaggtagactgggccttcttgggcgacggggattttccgggagattaggaggttactggaaaacatggattttctggaagacctggattttctggaaaacttggatcttccggaagacttacatcgggtggaagacctggatattttccgggcgatgcgggcttactggaaggccaggattcggaggtcgaagaaggtttttctggaaaactctgacagactggaagacttggatcagtttctggaaaactctcattgactggaaaacttggatctcattttggaagactctgattgactggaagatctag

SEQ ID NO: 217907 - DNA, 1365 bp, synthetic construct
  misc_feature 1..1365: note = Description of Artificial Sequence: Synthetic coding sequence
  source 1..1365: mol_type = other DNA
atgctcgctgaaaatttagtggaggagtttgaaatgaaggaagacgaaccgtggtacgaccaccaggatttacagcaagatctgcagcttgctgctgagctcgggaagaccctgctggatagaaatacagaattagaagacagtgtgcaacagatgtacaccacgaaccaggagcagctgcaggaaatcgaatatctaaccaaacaggtagagctgcttcgacagatgaatgagcagcacgcaaaagtgtatgagcagttggacgtgactgcaagagaactcgaggaaaccaatcaaaagctcgtggccgatagcaaagcttctcaacagaaaatcctctctcttacagaaactattgaatgcttacagactaacatcgatcatctgcagtcacaagtagaggaactgaaatcgtcgggacaggggcgaaggtcccccggaaagtgtgatcaggagaaaccagccccttcttttgcttgtttgaaagagctgtacgacttgcgccagcactttgtgtacgatcacgtctttgcagaaaaaatcaccagcctacagggacagccctccccagacgaggaagaaaatgaacacttgaagaaaactgttacaatgctgcaggcccaactctccctggaaaggcagaagagggtgacaatggaagaagagtatggcctggttctgaaggagaattctgagctcgaacagcagctgggcgcaactggcgcttatagagcgagggcactggagcttgaagctgaagtggcagagatgcgccagatgctgcaaagcgaacaccctttcgtgaacggtgtcgaaaagttagtgcctgacagcctatacgtcccgttcaaagagccaagccagtctctcctcgaagaaatgttcctgacagttcctgagagccatcggaagccccttaaacgatcctcctcggagacgattctcagtagcctggccggtagcgacatagtcaagggccatgaggagacgtgtatccggagggccaaagctgtcaaacagagagggatcagtctgctccacgaggtggacacacagtattctgccttgaaagtgaagtatgaggagcttttgaaaaagtgccaggaagagcaggattcattgtctcacaaggctgtgcagacatcgcgcgctgccgctaaggatctgaccggggtgaacgcgcaatctgaacctgttgcttcgggctgggagttggcctccgtgaacccagaacccgtgtcttcccccactaccccaccggaatacaaggctctgtttaaagaaatcttttcatgtatcaaaaaaactaagcaagagatcgatgagcagcgaaccaaatatcggtctctctcatcacattcttag

SEQ ID NO: 217908 - DNA, 618 bp, synthetic construct
  misc_feature 1..618: note = Description of Artificial Sequence: Synthetic coding sequence
  source 1..618: mol_type = other DNA
atgctcggtgcaaaaccacactggcttcccggtccgctgcactcccccggactcccactcgtactcgtgcttttggccctcggagccggatgggctcaggagggctctgaacctgtactgctggaaggggagtgtctcgtggtgtgcgaacccggaagggcagcagccggtggccctggcggagctgctctgggagaggccccaccaggcagagtcgcattcgccgcagtcaggtcacaccatcacgagcctgccggagagaccggcaatggaaccagcggggctatatattttgatcaggtactggtgaacgaaggcggtgggtttgacagagcaagtggctccttcgtagcccctgtgcgcggtgtctacagttttcgattccatgttgtcaaggtatacaaccgccagaccgtccaggtgagcttgatgctaaatacctggcccgtgatctccgcctttgcaaacgaccctgacgtgacaagagaggctgccacctccagcgtgctgctaccacttgaccccggagatcgcgtatctcttcgcttgaggaggggaaatctgctcggaggctggaaatactcaagcttctccgggttccttatcttccccctgtag

SEQ ID NO: 217909 - DNA, 990 bp, synthetic construct
  misc_feature 1..990: note = Description of Artificial Sequence: Synthetic coding sequence
  source 1..990: mol_type = other DNA
atgattctgatgaagatgggcttctctggtattgtcgtgcaccaagagtcagtctgcgcgacttacgggagtgggttaagctccacatgtatcgtagacgtgggcgatcagaagaccagcgtgtgctgcgtggaagacggcgtgtcgcaccgtaacacgaggatcttctcttggaatcaggacatctctgggctgcaggaccatgagtttcagattcgccaccccgattctcctgccctgttgtaccagttcaggttgggagatgagaagctgcaggcccctatggcactcttctatcccgcaacattcggtatcgtgggccagaagatgaccactctccaacatcgaagtcaaggcgatcctgaagatccacacgatgagcattacctgctggccacacagtctaaacaagaacaatctgcaaaggcaacagctgatcgcaagagtgccagcaaacccattgggtttgagggcgatctcagaggtcaatccagcgatctgccagaacgccttcactcacaagaagtggacctgggctctgcacagggagacggactgatggctgggaacgatagcgaggaggcacttactgcattgatgtcaaggaaaacagcgatctcactgttcgaaggcaaagcattgggcctggataaagctatactgcactcaattgactgttgtagcagtgacgatacaaagaagaaaatgtatagcagcattctcgtggttggaggagggctcatgtttcataaagctcaggaattcctgcagcatcgcattttgaacaaaatgccacccagctttcgtagaattattgagaatgttgatgttatcaccaggccaaaagatatggatcccagactgatagcttggaagggaggtgccgttctggcctgccttgataccacacaggaactctggatttatcagcgcgagtggcagcgcttcggcgtccggatgctgcgcgagagagccgctttcgtatggtag

SEQ ID NO: 217910 - DNA, 1131 bp, synthetic construct
  misc_feature 1..1131: note = Description of Artificial Sequence: Synthetic coding sequence
  source 1..1131: mol_type = other DNA
atggaggaatttcatgggcgtaccctccacgacgacgacagttgtcaggtcataccagtcctgccacaagtgatgatgatcttgatcccgggacaaactctgcctttgcaactgttccatccgcaggaagtgtccatggtcagaaacctcatacaaaaggacagaacattcgctgtgctcgcttacagcaacgtccaagaacgggaagcacaatttggcaccacagcagaaatctatgcgtatcgtgaggaacaggatttcggaatcgagattgtgaaggtcaaagctattggcaggcagcgattcaaggttctagaactgcgaactcagtccgatggtattcaacaggccaaggtgcagatcttgcccgaatgtgtactcccctcaacaatgtcggctgtgcagcttgaatcgctgaataaatgccagattttcccatctaagcctgtgagtcgtgaggaccaatgttcttataagtggtggcaaaagtaccaaaaacggaaattccactgtgcgaacctgacatcctggcccaggtggctttattccctgtatgatgccgaaacgctgatggacagaataaagaagcaactgcgtgagtgggatgaaaacctgaaagatgatagtcttcccagcaatttctcctatagagtggctgcttgcctgcctatcgatgacgtgcttagaattcagctccttaaaattggtagcgcgatccagagactccgatgcgagcttgatatcatgaacaaatgtacctcactctgctgcaagcaatgccaggagactgaaattaccacaaagaatgagatcttcagtctctctctctgtggaccaatggcagcgtatgtgaacccacatgggtacgttcatgagacgctaactgtgtacaaagcttgcaacctgaacctgataggtaggcctagcacggagcacagctggttccccggttacgcttggacagtggctcaatgtaaaatttgtgcctcacacatcggatggaagtttactgccactaaaaaggatatgtccccacagaaattctggggcttgactagaagcgccctgcttcctacaatcccagacactgaagatgagatcagtccggataaggtcatcctgtgcctctag

SEQ ID NO: 217911 - DNA, 1326 bp, synthetic construct
  misc_feature 1..1326: note = Description of Artificial Sequence: Synthetic coding sequence
  source 1..1326: mol_type = other DNA
atggccggagaaggcgaccaacaggacgccgctcataatatgggcaatcatctaccactgctgcccgagtccgaagaggaagacgagatggaggtcgaagaccaggactcaaaggaggcaaagaagccaaacattatcaattttgatacttcactgcccaccagccatacatatctgggagctgacatggaggagttccacggcagaaccctccacgacgatgatagctgtcaggtaatacccgtgctcccacaggtgatgatgatcctgatacccggtcagactctgccactgcagctgtttcacccccaggaagtttccatggtccgcaacctgatccagaaggaccgcacttttgccgtactggcatattccaacgtccaggaaagagaagctcaattcggcactacggcagaaatctatgcttatagggaagaacaggattttggcatcgaaatcgttaaggtgaaggcgatcggacgtcagcgattcaaggtgctcgaactcagaacccagtccgatggcattcagcaggcaaaggtgcaaattctgccagaatgcgtgcttccctcaaccatgtctgctgtgcagctcgagtcactgaataagtgtcagatcttccccagcaagcctgtttcgcgagaggaccagtgctcgtataagtggtggcagaagtaccaaaagaggaaattccactgtgctaatcttacctcctggcccaggtggctgtatagcctctacgacgctgagactctaatggacagaatcaaaaagcaactaagagagtgggatgagaatctcaaggacgacagcctgccctccaatcctattgatttttcttaccgggtggcagcctgcctacccatcgatgacgttcttaggatccaactgctcaaaatcgggagcgctatacagaggctgagatgtgagctggacattatgaacaaatgcactagcctgtgttgcaagcagtgtcaggagactgaaattacaacaaagaacgagatctttagcctgtcattgtgcggcccaatggcagcctacgttaacccacatggctacgttcacgaaacgctcactgtatataaggcctgtaacctgaatttgatcggaaggccaagcacagagcactcctggttcccgggatatgcttggaccgtagcccaatgtaaaatctgtgcaagccatataggatggaagttcaccgctaccaaaaaggatatgagtccccagaaattttggggattgacaaggagtgccttactgccaacaatccctgatactgaagacgagataagccctgacaaagtgatactttgcttgtag

SEQ ID NO: 217912 - DNA, 1335 bp, synthetic construct
  misc_feature 1..1335: note = Description of Artificial Sequence: Synthetic coding sequence
  source 1..1335: mol_type = other DNA
atggaggaggagggcaagaagggtaagaagcccggaatcgtgagcccattcaagcgcgtttttttgaaaggggaaaaatcccgcgacaaaaaggcacacgaaaaagttacggagcggaggccactgcatacggtggttctctcactgcccgagagggtcgagcccgatcggttattgtccgattacattgaaaaggaagtgaagtacttgggacagctcacctccatacctggctacctcaacccctcctccagaactgaaatccttcacttcattgacaacgcgaaacgggctcaccagctgcctgggcacctcacccaggaacatgatgcagtactctcccttagcgcttataatgttaagctggcctggcgcgacggggaagatataatcctccgggtaccaattcacgatatcgcggcagtgtcttatgtcagggatgacgctgctcacctcgtcgtcctcaagacagctcaagaccccggaatctccccctcccaatcgttgtgtgccgaatcttccaggggtttgagtgctgggagcctgtcagagtcggccgtgggacccgtagaagcttgctgtctggtgatcctcgctgcggagtctaaagtcgcggctgaggaactgtgttgtttactcggccaggtgttccaggtggtgtacacagagtcgactatcgatttcctggatcgcgctattttcgacggcgcttctactccaactcatcaccttagcctgcactccgatgatagtagcacaaaggtggatatcaaggagacatatgaagtcgaggcttcaacattttgcttccccgagtcagttgatgtaggcggtgcgtcaccacattctaagacaattagtgaatcagaactgtctgcttctgccaccgaactcttgcaagattacatgttaaccctgcgcacaaagctgagctcccaggagatccagcaatttgcagcgttactgcatgagtacaggaatggggctagcattcacgagttctgtatcaatctcagacagctatatggggacagccgaaagttcctgctccttgggcttcggccattcattcctgaaaaagactctcagcatttcgagaactttctggaaacaattggcgtgaaggatggcaggggtataattacagactcctttggcaggcaccgcagggctctgtcaacaactagctcatccacaaccaacgggaatcgcgctaccgggagctccgacgaccgcagtgccccaagcgaaggtgacgagtgggacaggatgatctctgatatatccagcgatattgaagctctgggctgctctatggatcaagacagcgcctag

SEQ ID NO: 217913 - DNA, 1398 bp, synthetic construct
  misc_feature 1..1398: note = Description of Artificial Sequence: Synthetic coding sequence
  source 1..1398: mol_type = other DNA
atgcatagctcctgtcggcaacgtaggaaccagaacctgtcaaaagaaatacctcaaactgaattccataccggctactccatggagaatgaaccagggattgtgtctccattcaagagggttttcctgaaaggtgagaagagccgcgataaaaaagcgcatgagaaggtgaccgaacgcaggccccttcataccgttgtactcagcctgccagagcgcgtggagcccgacagactcttaagtgattacatcgaaaaggaagtgaaatatcttggtcagttgacatccattcctggataccttaacccttcaagccgtacagagattctgcatttcattgataatgctaagcgtgcccatcagctaccgggtcacctgactcaggagcacgacgctgtgctgtctctgagtgcctacaatgtcaaactcgcgtggcgcgatggcgaagacatcattctgagagttccaatacatgatattgctgcagtgagttatgtcagagacgacgctgcccacctggttgtgttaaagacggcacaggacccaggaattagtccgtctcagtctctctgtgcagagtcctcgcgcggactgtcggcaggatcgctcagtgagagtgcagtcggccctgtcgaggcttgttgccttgtgatcctcgcggctgaaagtaaagtcgccgctgaggagctgtgttgcctcctcggtcaggtgtttcaggtcgtgtataccgagtcaacgatcgactttcttgatagagccatcttcgacggggcaagcacccccacacatcatttgagcctgcactcggacgacagctctactaaagtggatattaaagagacctacgaagttgaggcgtccacattctgttttccagagtcggtggacgtggggggagcctctccccactccaaaacaatttctgaatccgagttaagcgcctcagctacggagctcctgcaagattacatgctcaccctgaggacaaagctctctagccaggagattcagcagtttgccgctctgctgcatgagtaccgaaatggggcttccattcacgagttttgtataaatttgagacaactttatggggactctcgcaagttcctgctccttggactgcgtccatttatacctgaaaaagattcccagcactttgaaaacttcttagagaccatcggggtcaaggacggcagggggatcatcacggatagtttcgggaggcaccggagagcactcagcaccaccagttctagtaccaccaatggcaatcgcgcaacgggttcctcagatgatagaagcgcacctagtgagggtgacgagtgggacagaatgatatctgatatctcttccgacattgaggccctggggtgcagcatggatcaggattctgcgtag

SEQ ID NO: 217914 - DNA, 1317 bp, synthetic construct
  misc_feature 1..1317: note = Description of Artificial Sequence: Synthetic coding sequence
  source 1..1317: mol_type = other DNA
atggaaaacgaaccagggatagtctcaccttttaaacgtgttttcctcaaaggagaaaagtcccgggacaagaaggctcacgagaaggtaaccgagcgcaggccactccatacagtggtgctgtcacttccagagcgcgttgagccagatcggcttctgagtgattacatcgagaaggaggtcaaatacttaggtcaactgaccagtatcccaggctatctcaacccatcgagtcgaaccgagatactgcactttatagataacgcaaaacgcgcacatcagctacctggacatttgacgcaggaacacgatgccgttctgagtctgtccgcttacaatgtaaaactcgcctggcgcgacggagaagatatcatcttgcgggtgccaatccacgatatagcagcagttagctatgttcgcgacgatgccgcacatctagttgttttgaagacagcgcaggaccccggtatttcgcctagtcagtcactttgtgcagaaagtagcagaggactctcagcaggcagtttgagtgagtctgcagtgggacctgtggaggcttgctgtcttgtaatactcgctgccgaatctaaggtcgcagccgaagaattgtgctgcctgctcggccaggtgttccaagtggtatacacagaaagcaccatcgactttttagatagggcgatttttgatggagcgagcactccgacacaccatctgtccctacacagtgacgactccagtaccaaagtcgacattaaagagacttacgaagttgaagcttctactttctgttttcccgagagtgtggacgttgggggagcttcgccgcatagtaaaactatcagtgagagcgaactgagcgcctccgccaccgagctgctgcaggattacatgttgacgctccgcaccaagctttccagtcaagagatccaacagtttgctgcactgctgcacgagtaccgaaacggtgcgtccatccatgagttctgtattaatctgagacaactgtacggcgactcacggaaattcctcctccttgggcttaggccgtttattcccgaaaaggacagccagcattttgagaactttctagaaactattggagtgaaggacgggaggggcatcatcactgactcatttggcagacacagaagggcactcagtacaacatcgtcttcgaccacgaatggcaatagggcgacaggaagttcggacgacaggtccgctccgtccgagggagacgagtgggaccggatgatctccgacatctcatccgatatcgaggcactaggatgctccatggaccaggattcggcttag

SEQ ID NO: 217915 - DNA, 1161 bp, synthetic construct
  misc_feature 1..1161: note = Description of Artificial Sequence: Synthetic coding sequence
  source 1..1161: mol_type = other DNA
atggaagaagaaggaaaaaaggggaagaagtacctggggcaattgacaagcattcctggatatttgaatccatctagccggacggaaatcctgcatttcattgataacgcaaagcgagcccatcagctcccgggacatctcactcaagaacacgacgccgtgctgagcctgagcgcctacaacgtcaagctggcatggcgggacggagaggacatcattctgagagtgccaatccatgacatcgcagctgtgagctacgtgagggatgacgcagcgcatctggtggtgcttaaaaccgctcaagaccccggaatctcaccaagtcaatccctgtgcgccgagtcttctcggggactttcagccggatccttatccgagtcagctgttggccctgtcgaggcttgttgtctcgttatcctggctgctgaaagtaaagtcgccgcagaagaactttgttgcctgctggggcaggtcttccaagtggtctataccgagtctacaattgactttctggatcgcgctatctttgatggagcaagcacgccaacccaccatctgtctctgcactccgatgacagctcgactaaagttgacatcaaagagacctatgaagttgaggccagcaccttctgttttccagagtctgtggatgtcgggggagcttccccccactctaagacaatctctgaatcagagctgagcgcatccgccaccgagttgcttcaagactacatgctcacactaaggacaaagctgtcatcccaggaaatccagcaattcgccgcactgctgcacgaataccggaacggcgcatcaattcacgagttttgcatcaatctgcgacagctatacggggactcacgcaagttcttgctcctagggctgagacccttcatacccgagaaagactctcagcatttcgagaacttcctagaaacaatcggggtaaaagacgggaggggaatcatcaccgattccttcgggagacatcgtcgagccctttctactaccagctccagtacaacgaacgggaatagggctactgggagttcagacgatagaagtgccccttccgaaggtgatgaatgggataggatgatcagtgacatcagtagtgacatcgaagctctcggctgctccatggatcaggattctgcctag

SEQ ID NO: 217916 - DNA, 216 bp, synthetic construct
  misc_feature 1..216: note = Description of Artificial Sequence: Synthetic coding sequence
  source 1..216: mol_type = other DNA
atggaggaagagggcaaaaagggcaaaaaacccggtatcgtgtcacccttcaaaagggtcttcttgaagggagagaagagtcgtgataagaaagcccacgagaaggtcactgaaaggcgccctttacatacggtagtgctctctctccctgaaagggttgaaccggataggctgttgtcggactacatagaaaaggaagttaagggcagccattag

SEQ ID NO: 217917 - DNA, 1062 bp, synthetic construct
  misc_feature 1..1062: note = Description of Artificial Sequence: Synthetic coding sequence
  source 1..1062: mol_type = other DNA
atggaggaagaagggaagaaaggaaaaaagccaggcattgtgagcccctttaagagggtgttcctcaagggggaaaaatcccgggacaagaaggctcatgaaaaagtgactgagagacgtccactgcacactgtcgtcttaagcttgcccgagcgtgtagagcccgaccgcctgctgtcagattacatcgagaaggaggtaaaatacctgggccagctgacaagcatacctggatatctgaatccatcctccagaacagagatactgcactttattgataatgccaaacgagcgcaccagcttccaggccatctcacccaggaacatgatgccgtactcagcctctctgcctacaacgtcaaattagcctggcgagatggagaagatatcattctccgcgtccccattcatgacatagcagccgtctcatacgttcgcgatgacgcggcacatctagtagtgctgaagactgacgattctagtacaaaggttgacattaaagagacttacgaagtcgaagcctcaaccttctgctttcctgagtcagtcgatgtgggaggtgctagtccacatagcaaaaccatctctgagtccgagctgagcgcttccgccaccgagttgctgcaggactacatgttgacacttaggacaaagctgtcaagccaggagatccagcagttcgccgctttgctccacgaataccgcaacggagcgtctatacacgagttctgcatcaatctaaggcagttgtatggcgacagtagaaagttcctgttgctgggcctgcggcctttcatacctgaaaaagattcacagcactttgagaacttcttggagactatcggagtcaaggacgggcgaggtattattactgactccttcggacggcatcgacgggctctgagcacgacctcttcaagcaccacaaatgggaatcgggcaactggtagctctgacgatagaagcgctccctctgaaggagacgaatgggatcgaatgatctctgatatttcctccgacatcgaagcgttgggctgctcgatggatcaggactccgcatag

SEQ ID NO: 217918 - DNA, 1224 bp, synthetic construct
  misc_feature 1..1224: note = Description of Artificial Sequence: Synthetic coding sequence
  source 1..1224: mol_type = other DNA
atgcgaagaaatctgcggctgggaccatccagcggggcagacgcccagggacagggagccccacgtcccggactggccgctccccgaatgttattacctcctgcctcgcaggcaagcagggggtcaggaagcactggttgcagtttgatggctcaggaagtcgacacagcccagggggctgaaatgaggcgaggcgctggagctgcacggggtcgcgctagctggtgttgggctctggccctcttgtggttagccgtcgtacctggatggtcaagggttagcggaatccccagcaggcgtcactggccagtaccctataagagattcgattttcggccaaaacctgatccatattgtcaggcaaagtacaccttttgcccgactggaagtcccatccccgtcatggaaggcgacgatgatatagaggtttttaggttgcaggctccagtatgggaatttaagtatggcgatcttctcggtcacttgaagattatgcatgatgccatcggcttccgatccactcttaccggtaaaaattatactatggagtggtatgagctatttcagctgggaaattgcaccttccctcatttgcggcctgagatggacgccccattttggtgcaatcagggcgcagcttgttttttcgaggggattgatgatgtacattggaaggaaaatggtactcttgtgcaggttgcgaccatctctggtaacatgttcaaccagatggccaaatgggttaagcaggacaacgagaccgggatctattacgagacctggaacgttaaggcttcacctgagaagggagctgaaacatggtttgactcgtacgactgcagtaagtttgtgctcaggactttcaataagttggctgaatttggagctgagttcaagaacattgagaccaattatacccgaattttcctttattctggagaaccaacatacctcggaaatgagaccagcgtcttcggacccactgggaacaagactctgggcttggcaataaagcgattttactacccattcaagccccaccttcctaccaaggaattcctcctgagtctactgcaaatctttgatgctgtgattgtacacaagcaattttaccttttctacaactttgagtactggttcctccccatgaaatttccgtttattaaaatcacatacgaggagattccactccctattagaaataagacactcagcggactgtag

SEQ ID NO: 217919 - DNA, 822 bp, synthetic construct
  misc_feature 1..822: note = Description of Artificial Sequence: Synthetic coding sequence
  source 1..822: mol_type = other DNA
atggagggagatgatgacatcgaggtctttagacttcaggctcctgtctgggagtttaagtatggcgatctcctcggccacctgaagatcatgcatgacgccattggattccgctctacactcacaggcaagaactacacgatggaatggtacgaactgttccaactgggtaactgtacctttccccacctcagaccggagatggacgcaccattctggtgtaatcagggcgcagcctgtttcttcgagggaattgacgatgtgcattggaaggaaaatggaaccctcgtgcaagtggctacaatatctggcaatatgtttaaccagatggccaaatgggtaaaacaggataatgaaaccggcatttattacgaaacatggaacgtcaaggcgtcacctgaaaagggcgctgaaacatggtttgacagttacgactgctctaaattcgtgctacggactttcaacaagcttgctgagttcggcgctgaattcaaaaacattgagactaattacactcgcatctttctgtactcaggagagccgacctatctgggaaacgagacaagcgtgtttggacccactggcaataagactctgggactagccattaagcgattttattatcctttcaagccccatctgcccaccaaggaattcctcttgagcttactccagatttttgatgcagtaatcgtgcataaacagttctacctgttctataactttgaatactggtttctgcccatgaagttcccttttatcaaaattacatatgaggagattccactccccatccgcaacaaaacactgtccggactttag

SEQ ID NO: 217920 - DNA, 1077 bp, synthetic construct
  misc_feature 1..1077: note = Description of Artificial Sequence: Synthetic coding sequence
  source 1..1077: mol_type = other DNA
atggcgcaggaggtggataccgcacaaggagctgaaatgcgcagaggtgcaggagcggcacgcggacgagcgtcatggtgttgggctctggcgttgttgtggcttgcagtggtccctggatggtcccgggtcagtgggattccatctcggcgtcattggcccgtgccttataaacgatttgattttagaccaaaacccgacccatactgccaggccaaatatacattttgtccaacgggctcacccatccccgtgatggaaggggatgacgacatcgaagtgttccgacttcaggcccctgtatgggagttcaaatatggagatctgttgggccatttgaaaatcatgcacgatgcaattggcttccgatccacactgacaggtaaaaactataccatggaatggtatgaactctttcagctcggcaactgtacattccctcacctccgtcccgaaatggatgcccctttctggtgcaatcagggagccgcttgcttttttgagggaattgatgacgttcactggaaagaaaacgggactttagttcaagtggccacaatttccgggaatatgttcaatcagatggccaagtgggtgaaacaggacaacgaaactgggatctactacgagacttggaacgtcaaggcctccccggagaagggggctgaaacatggtttgactcctatgactgttctaagtttgtgctgcgcacctttaataaattggctgagttcggagccgaattcaaaaatatcgaaacaaattacacgcgcatttttttgtatagcggcgaacctacctacctcggtaacgaaacatcggtgttcggccctactggcaataaaacacttggactggccattaaaagattctactacccctttaaaccacacttacctacgaaagaatttctcctgagccttctgcagattttcgatgctgttattgtgcataagcagttctacctgttttataactttgaatactggtttctgcctatgaaattcccatttatcaagatcacgtatgaggaaatccccttgcccattcggaacaagacactgtcggggctttag

SEQ ID NO: 217921 - DNA, 936 bp, synthetic construct
  misc_feature 1..936: note = Description of Artificial Sequence: Synthetic coding sequence
  source 1..936: mol_type = other DNA
atggaagcaacgcgaagaagacagcatttgggtgctacgggtgggcctggggctcaactgggcgcatccttcctgcaagccagacacggctctgtatcagccgacgaggctgcgagaaccgcaccattccacttggacttatggttctattttactttgcagaattgggtactggacttcggacggccaatcgcgatgctcgtcttccctctggagtggttccctctcaataagccttccgttggcgactatttccatatggcatataacgtaatcactcccttcttgctgcttaaattgatcgagcgttctcctaggaccctccccaggtccatcacgtatgtatcaatcataatcttcataatgggggcttctatccatttggttggcgatagtgtgaatcatagactcctgttttccggttatcagcaccaccttagcgtcagagaaaaccccatcattaaaaatcttaagcctgagactctgatcgatagcttcgagctgctctattactatgacgagtacttgggacactgcatgtggtacattccattcttccttatcctttttatgtatttctctggctgttttaccgcctctaaagcagagagcttaattcccggacctgccctccttctggttgcacctagcggtctgtactattggtacttggtgactgagggccagatcttcatcctgtttattttcacttttttcgcaatgctggcgctagtgctccatcagaagaggaagaggctctttttggattccaacggtttgttcctgttttcttcctttgcgctgactttgctgttggtggccttgtgggttgcttggctgtggaatgaccctgtgctccgaaaaaagtaccccggtgtcatttacgtcccagagccttgggcattctacacccttcacgtgtccagtcgccactag

SEQ ID NO: 217922 - DNA, 549 bp, synthetic construct
  misc_feature 1..549: note = Description of Artificial Sequence: Synthetic coding sequence
  source 1..549: mol_type = other DNA
atgcgtctgccagcccgattacctagcacctccacatcggggtccaccagccactgccggacgggattctggaccctgggcgtcccccttccttgttggtactcgctgtccagtggtttccatagtacctctcccgttttgggcaccactagtacctggcctaccactagcagtcggcctttctcatgttccagcggatgctttactgcaagcaaagcagaatcactgatacccggacctgccctactgctggtggccccttccggcctgtactattggtacctagttaccgaaggccagatcttcattctctttattttcaccttttttgctatgttagctttggtgctacatcagaagaggaagcgcctgtttctcgactctaatggactgtttctgttttcctcattcgcactcacactgctgcttgttgccctgtgggtggcgtggctttggaatgatcccgtgctcaggaagaagtaccctggtgttatatatgtgccagagccttgggcattctacacactgcatgtgtccagtcggcattag

SEQ ID NO: 217923 - DNA, 1032 bp, synthetic construct
  misc_feature 1..1032: note = Description of Artificial Sequence: Synthetic coding sequence
  source 1..1032: mol_type = other DNA
atggcagcagtggcaggcaaggagagacgcgctcgcggtaggcccagacctgagactttaggggcaatcccacgcagagagggcggtgaagcaggtctgtcccgggcattcaagccgcttgcccaagcacccctgagctgtgaaacttcattacgaaagcttaagtttaagggcaagaaacacggatcggtttccgctgatgaggccgctaggactgccccatttcatctcgacttatggttctatttcacactgcagaattgggtgctcgactttgggcgtcctattgccatgctagtgttccctttagagtggtttccactgaacaagccaagtgttggcgattacttccacatggcgtacaacgtgatcactcccttcctcctgcttaaactgatagagcgctcccccagaacactgcccagatcgattacttacgtttccatcatcatttttattatgggcgctagcatccatttggtgggggactcagttaatcaccgtctattatttagcggataccaacatcacctgtcagtgagagagaacccaattatcaagaatcttaagcctgaaacccttatcgacagcttcgaactcctctattattacgacgagtacctgggacattgcatgtggtacattccattttttttaattttgtttatgtatttctctggctgctttactgcttccaaggctgagtctctcatacctggacctgcacttctgctcgtggctccctcaggattatattactggtatctggtgacagaaggccaaatctttatcttattcatattcacttttttcgcaatgctggccctcgtcctgcaccagaaacgcaagcgtctgttcctggactctaacgggctgttcttattctcatcatttgcgttgacgctcctcctggtggccttatgggtggcttggttgtggaatgacccggtccttaggaagaagtatcctggggtcatctacgtcccagaaccttgggcattctacactttgcatgttagttctcggcattag

SEQ ID NO: 217924 - DNA, 861 bp, synthetic construct
  misc_feature 1..861: note = Description of Artificial Sequence: Synthetic coding sequence
  source 1..861: mol_type = other DNA
atgaacccggcttcagatgggggtacttccgagtcaatctttgatctggactacgctagttggggcatacgaagcactctcatggttgccggttttgtgttctatctgggagtcttcgtagtctgccaccagctgtccagctccttgaacgccacctaccggtcactagttgccagggagaaggtcttttgggacctcgccgctactcgggcagttttcggagttcagtcaaccgccgctggactgtgggcactgctgggcgatccggttctgcacgcagacaaagcccgaggccaacagaattggtgctggttccacataactacagctaccggttttttttgcttcgaaaacgtcgctgtgcacctttctaacctaatcttcaggactttcgatctgtttcttgtgatccaccacctctttgcctttcttgggttcctggggtgccttgtaaatctgcaagccggtcactatctggccatgaccacgctcttgctggagatgagcacccccttcacttgtgtgagctggatgcttcttaaagccggatggagcgagagtctcttttggaaattaaaccagtggttgatgattcatatgttccattgtagaatggtgctgacctaccacatgtggtgggtctgcttctggcattgggatggtcttgtatcttccctgtacctccctcatctgactctatttcttgtcggcctggctttgctgactctgattattaatccttattggactcacaaaaaaacacagcaattgctaaatccagtggactggaattttgcccagccagaggctaagtccaggcctgaaggaaatggccagctcctgcggaaaaaacgaccctag

SEQ ID NO: 217925 - DNA, 1065 bp, synthetic construct
  misc_feature 1..1065: note = Description of Artificial Sequence: Synthetic coding sequence
  source 1..1065: mol_type = other DNA
atgtatagagagtgggtggtcgtaaatgtattcatgatgttgtacgtgcagttggtccaggggtcctccaacgagcacggccctgtgaaacgctcatctcagtctaccctagaacggagtgagcagcagatcagagccgcatcctcactggaggagctgctccgcatcactcactctgaagattggaaactttggcgctgccgcctgagactgaagtcattcacctctatggacagccgctctgcctcccaccgatctacaaggttcgccgcaaccttttacgacatcgagacactaaaggtgattgacgaggagtggcagcggacacagtgtagtccacgagagacctgtgtggaagtagcttctgagctcggcaaatcaacaaacaccttctttaaacccccttgcgtgaatgtgttcagatgcggagggtgttgcaacgaagagtccctaatctgtatgaacaccagcacctcttacatctctaagcagctttttgagattagtgtacccctgacttccgtgccagagctagtacctgtgaaggtcgctaaccataccggttgcaagtgcctgccaactgcccctcggcacccttactcgatcatcaggaggtcaattcagataccggaggaggatagatgttcacatagcaagaaattgtgccccatagatatgttgtgggacagcaataagtgcaaatgtgtcttgcaggaagaaaaccctctggcaggaaccgaagatcacagccaccttcaggagccagctctttgtggtccacatatgatgtttgacgaagacaggtgtgaatgcgtgtgcaagacaccttgccctaaagacctcatacaacacccaaaaaactgtagctgtttcgagtgtaaagaaagccttgaaacttgctgtcaaaaacataaattatttcatcccgacacgtgctcttgtgaggaccggtgtccatttcacacgagaccctgcgcaagtgggaaaaccgcctgtgccaagcattgtcgcttccccaaagagaagcgggcagcgcaaggccctcactcgagaaaaaacccctag

SEQ ID NO: 217926 - DNA, 504 bp, synthetic construct
  misc_feature 1..504: note = Description of Artificial Sequence: Synthetic coding sequence
  source 1..504: mol_type = other DNA
atggaaagattcgttgtgacagctccgccagcacgtaaccgctctaaaaccgctttatacgtgactccgttggatcgcgtgacggagtttgggggtgaattacacgaagacggtggcaaactcttctgtaccagttgcaatgtggtacttaaccatgtgcgcaaaagcgcaatctctgaccatctgaaatccaagacacataccaaaagaaaagccgagttcgaagaacaaaacgtgagaaaaaaacaaagaccacttactgcttcattgcaatgcaacagtacagcccaaactgaaaaggtcagcgttattcaggatttcgttaagatgtgtctggaggccaatattccccttgaaaaagcagaccacccagccgtcagagcctttctcagtcgtcatgtcaagaatggtggaagcattccaaagagtgatcagctgcggagagcatatctccctgatggatacgagaacgaaaaccagctgctcaactcccaggattgctag

SEQ ID NO: 217927 - DNA, 504 bp, synthetic construct
  misc_feature 1..504: note = Description of Artificial Sequence: Synthetic coding sequence
  source 1..504: mol_type = other DNA
atggaaagattcgtcgtaaccgcaccgcctgccagaaatcgttctaaaacagccctttacgtgacccccctcgatagggtgaccgaattcgggggagagttgcacgaggatggcggtaaactcttctgtacctcttgcaacgtggtgctgaaccacgtgcgcaaatctgctatctctgatcatctcaaatccaaaacacacaccaaacgcaaggccgagttcgaagagcagaacgtgcgcaaaaagcaaaggccgttgactgcctccttgcagtgcaacagcacagcccagactgagaaagtttcagtcatacaggactttgtgaagatgtgcctggaggcgaatataccactcgagaaggctgaccacccagcagtcagagcctttttgagtaggcacgtgaaaaacgggggttcaatccccaaatctgatcagctccgacgcgcataccttcccgacggatatgagaacgagaatcaacttctgaatagccaagattgctag

SEQ ID NO: 217928 - DNA, 504 bp, synthetic construct
  misc_feature 1..504: note = Description of Artificial Sequence: Synthetic coding sequence
  source 1..504: mol_type = other DNA
atggaaaggtttgttgtgacagctccacccgcacgaaataggtccaaaaccgcactgtatgtcactcccctcgacagagtcaccgaattcggtggggagctgcatgaagacggcggaaagctgttttgtacaagctgtaatgtagtgctgaaccacgtgcgcaaatcagccatcagcgaccacctcaaaagtaaaacccataccaagcgaaaggcggagttcgaagagcagaatgtgcgcaagaagcagagacctcttacggcctccctgcagtgcaatagtacagcgcaaactgaaaaggtgagtgtgattcaggacttcgtgaaaatgtgtctggaagcgaatatcccgttggaaaaagcagatcacccagccgtgagggcttttttgagtcgtcacgttaagaacggaggcagtatccccaaaagcgaccagttacgccgagcctatctccccgatgggtatgagaatgaaaatcagttactgaattcacaggattgctag

SEQ ID NO: 217929 - DNA, 321 bp, synthetic construct
  misc_feature 1..321: note = Description of Artificial Sequence: Synthetic coding sequence
  source 1..321: mol_type = other DNA
atggagcgctttgtagtgacagcccctccagcaaggaacaggtccaagaccgccttgtacgtgaccccactggatagagtcacagaatttggcggagagttgcatgaagatggcggtaaactattctgcacttcatgtaatgttgtcttaaatcatgtacgcaaaagcgcgatttcagatcacttaaaatccaagacccacactaagaggaaagctgaattcgaagagcagaacgtccgcaagaagcagcgacccctgaccgctagcctgcagtgtaattccactgcacaaaccgagaaggttagtgtgatccaggattag

SEQ ID NO: 217930 - DNA, 504 bp, synthetic construct
  misc_feature 1..504: note = Description of Artificial Sequence: Synthetic coding sequence
  source 1..504: mol_type = other DNA
atggagcgttttgtggtgaccgcccctccagccaggaaccgatctaagactgccctgtacgttaccccactggatcgagtaactgagttcggcggtgagctccatgaggatggaggtaagctgttttgcacgtcgtgtaacgtcgtgctgaaccacgtgaggaagtccgccataagtgaccacctaaaaagcaagacacacaccaaacggaaagctgaattcgaggaacagaatgtgcggaagaagcaacgacccctgaccgcttcactgcagtgcaactctaccgcccagactgagaaggtatccgtgatccaggatttcgtgaaaatgtgcctggaggcgaacatacctctcgagaaggccgaccatccagcggtgcgcgcatttttgtcaagacacgtgaagaacggcggatcaattcctaaatctgatcaactgaggagggcctatctcccagacggctacgagaacgaaaaccaacttctgaactctcaggactgttag

SEQ ID NO: 217931 - DNA, 1608 bp, synthetic construct
  misc_feature 1..1608: note = Description of Artificial Sequence: Synthetic coding sequence
  source 1..1608: mol_type = other DNA
atggcaagtctgagtctggctcctgtgaatatatttaaggcaggcgctgacgaggagagggcggaaaccgcacgactgacctctttcatcggggctattgctataggcgacctggtgaaaagtactctgggccctaaggggatggataagatactgctgtcatccggtcgggatgccagcctgatggtaacaaacgacggggctaccattttaaaaaatatcggcgtcgacaaccccgcagcgaaggtgctagtcgacatgagtcgggtgcaagacgatgaagtcggggacggcaccaccagcgtgaccgtgctagcggctgagctcctgcgagaggcggagtctttgatagccaagaagatccacccacagacgattatcgctggatggcgcgaggcaaccaaggccgcacgggaggcacttctgtccagcgccgtggaccacggctctgatgaggtcaagttcagacaagatctaatgaacatcgccggaaccactctgagcagcaagttgcttacacaccacaaggatcactttacgaaacttgccgtggaggctgtgctcaggcttaagggctctgggaacctcgaggccatccacatcatcaaaaaactgggaggttctttagctgactcttacctggacgagggatttcttctggacaagaagataggtgtcaatcagccaaagagaatcgaaaacgctaagatcctgatagccaacacaggtatggacactgataagataaaaatattcggttctcgcgtccgtgtggacagtaccgcaaaggtggccgaaattgagcacgccgagaaagagaaaatgaaagagaaagtggagcggattctcaagcatggcattaattgctttatcaatcgccagttgatctacaactatccggaacagttgttcggcgctgctggagtgatggctatcgagcacgccgacttcgctggcgtggagaggctggccctggttactggcggtgaaatcgctagtacatttgaccatcctgaactcgtgaaattgggttcttgtaaacttatcgaagaggtgatgatcggagaagataaactgatccatttttctggcgtggccctgggcgaggcgtgcaccattgtgctccggggagctactcagcagatccttgacgaagccgagcgcagtcttcacgatgctctgtgtgtgttagcacaaacggtcaaggacagtagaaccgtgtatggcggaggctgctccgagatgctgatggctcacgctgtgactcagcttgccaatcgaacccctggaaaggaagccgttgccatggaatcgtacgctaaagctctgagaatgcttccaactatcatcgctgataatgccggatacgacagtgccgatctggtggcccagctgagggccgctcatagcgaagggaatactacggccggtctcgatatgagggaggggaccattggagacatggctattttaggtattacagagtccttccaggttaaacgccaagttctccttagtgccgctgaagctgcggaagtgatcctccgagtggataacataatcaaggccgctcccaggaaaagggtccccgaccaccacccatgttag

SEQ ID NO: 217932 - DNA, 1467 bp, synthetic construct
  misc_feature 1..1467: note = Description of Artificial Sequence: Synthetic coding sequence
  source 1..1467: mol_type = other DNA
atggacaaaatattgttatcctccggacgggatgcttcactcatggtgaccaatgacggggcaacaattctgaagaacatcggtgtcgataaccccgctgccaaggtactcgtagatatgagccgagtgcaggacgatgaggttggagacggtaccacctctgtgaccgtcctcgccgcagaactgttgagagaagcagagtccctcatagctaagaaaatccacccacagaccatcatcgctggttggagggaagcaacgaaggccgcacgagaggcccttctgtcctccgcggtggaccatggcagtgatgaggtgaagttccggcaagacttgatgaacattgccggaactacactgagctctaaattactcacgcaccacaaagatcactttaccaagctggctgtcgaggccgtgctgagactgaagggatcgggtaacctggaggctattcacatcatcaaaaaactgggcggatccttagctgacagctacttggacgaggggtttcttttggacaaaaaaatcggcgtaaatcagcctaagaggatcgagaatgcaaaaatcctgatcgctaacactggaatggatacagacaaaatcaaaatctttggttctcgtgtgagggtagatagcacagccaaggtcgcagaaatagaacacgctgaaaaagaaaaaatgaaagaaaaggtggagagaatactgaagcacgggatcaactgctttatcaacagacagttaatttataactaccccgagcagttattcggcgctgcaggagttatggcaatagagcatgccgatttcgcaggggtagaacgactggccctagtcacaggtggagaaatcgcatccacattcgatcacccagagttggtaaaattggggtcttgcaagcttatcgaggaggtgatgatcggggaggataaactgatacacttctccggggtggcccttggggaggcttgcaccatcgttcttcgcggtgcaacccagcaaatccttgatgaggccgagcggtctctgcatgatgctctgtgtgtgctggcacagactgttaaggacagcaggaccgtgtacggtggcggttgttcagagatgctcatggctcatgctgtgacacaactcgctaataggacccccggaaaagaggctgttgctatggaatcttacgcaaaggcgctgcgcatgctgcccactattatcgccgacaatgcaggatacgactccgccgatctcgtggcccaactgcgggctgcccactcagaaggaaacactactgcaggattggatatgagagagggaaccatcggtgacatggctatcttgggaattacggagagcttccaagtcaagagacaggtacttctcagtgcagccgaagccgctgaggtgattttacgcgtcgacaacatcataaaagctgcccctcggaagcgcgtgcccgaccaccatccttgttag

SEQ ID NO: 217933 - DNA, 1638 bp, synthetic construct
  misc_feature 1..1638: note = Description of Artificial Sequence: Synthetic coding sequence
  source 1..1638: mol_type = other DNA
atgatgggtcacaggcctgtcctggttttatcccagaatacaaagcgagagtcaggtaggaaagtgcaaagcgggaacattaatgccgcaaagactatcgcggatattattcgcacatgccttggcccaaaatcaatgatgaagatgctgcttgatcctatgggcggaattgtgatgacgaacgatggcaacgctattttgagagagatccaagtgcaacacccagcagcgaagagtatgatcgaaattagcagaactcaggatgaggaagtcggtgatggtactacttctgtcattatcctggccggagagatgctcagcgtggcagagcacttcctggaacagcagatgcatccaacggtcgtgatctccgcctaccggaaggcacttgacgatatgatttcaaccctgaagaagataagcattcccgttgatatttcagattccgacatgatgctgaatatcatcaacagctcaataacgaccaaggccatctcaaggtggtcctccctagcatgcaatatagcgctcgacgccgtgaaaatggtgcagtttgaagagaatgggcgtaaagagatcgacattaaaaaatatgcaagagtcgagaagatccccggtggaatcatcgaggatagctgtgttcttcgtggcgtaatgattaacaaagatgtgacacacccccgtatgaggcggtatatcaagaaccctagaattgtccttttggacagctctttggagtacaagaagggcgagtcacagacggacattgaaattacccgcgaggaggattttaccaggatactgcagatggaggaggagtatattcagcaactgtgcgaggacatcatccagctcaaaccggacgttgtgatcaccgagaaaggtatatccgatctggcgcagcattatctcatgagagccaatattacagcaatcaggcgtgtccggaagaccgataacaataggattgcaagggcatgcggagccagaatcgtttccaggccggaagagttgagagaggacgacgttggcacaggagctgggttattagagatcaaaaagatcggggatgagtattttactttcatcaccgattgcaaggatccgaaagcttgcacaattttgctcaggggggcatccaaggaaatcctgtccgaggtcgaacggaatctgcaagacgctatgcaggtttgcagaaacgtcctcctcgatcctcagctcgtccccggaggaggggcttctgagatggccgtcgcgcatgccctgaccgaaaagtcgaaggccatgacaggcgtggaacagtggccttatcgcgctgtcgcacaggctttggaggtcattccacgcactcttatccaaaactgtggagccagcacgatccgactgttgactagcctccgggctaagcatactcaagagaactgtgaaacctggggcgtaaacggcgaaaccgggaccttggtcgacatgaaagaattggggatctgggaaccactggccgtgaaactgcagacatataagactgcagtggaaacagccgtgctgctcctcagaattgatgatatcgtgagtggacataaaaaaaagggagacgaccagtctcgacaaggaggcgcacccgatgccggtcaggagtag

SEQ ID NO: 217934 - DNA, 1524 bp, synthetic construct
  misc_feature 1..1524: note = Description of Artificial Sequence: Synthetic coding sequence
  source 1..1524: mol_type = other DNA
atgatgggccaccgacccgtactggtgctatctcagaacacaaagcgggagtctggaaggaaggtgcaaagcggtaacattaatgccgcaaaaattcaagttcagcaccctgcagccaaaagcatgatcgagatttctcggacacaggatgaggaggttggcgatgggacaaccagcgtgattatcctggcaggagagatgctgtccgttgccgaacacttcctggaacaacaaatgcatcccacagtggttattagtgcctaccgaaaggccttggacgacatgataagcacactcaagaaaatatccatccccgttgatatttccgacagcgatatgatgctcaacatcatcaacagttcgatcaccacaaaggcaatctccaggtggtcctccctggcatgtaatattgccctggatgccgtcaagatggtacaatttgaggagaatggacggaaagagatcgacatcaaaaaatatgccagagtggagaagataccagggggaattattgaggactcttgtgttctgcggggtgtcatgattaacaaggatgtcacccacccacgcatgagacgctacattaagaacccacgcattgtgcttctggattcctcactggagtacaagaagggggaatcccagacagacattgagattacaagagaggaggattttacgaggattctacagatggaggaggagtacatccaacagctctgtgaggatattatacagctgaagccagacgtcgtgatcaccgagaagggtatcagcgatcttgctcaacattacctgatgcgggctaacatcactgctatcaggagggtgcgcaagaccgacaataaccggatcgctcgtgcctgcggagcccgaatcgtgtcaagacctgaggagctgcgggaagacgatgtggggaccggggctggactgctagagataaagaagataggagacgagtactttacctttatcaccgattgcaaagaccccaaggcctgcactatactgctgcgcggtgcctctaaagagatactctcggaagtggaacgtaatttgcaggatgcaatgcaagtgtgccgaaacgtgctcctggatccccagctggtaccaggcggaggggctagtgagatggctgttgctcacgctctgacagagaagtccaaggccatgacaggcgtggaacagtggccttaccgggcagttgctcaggcgttggaagttattcctcggacccttatccagaactgcggcgcaagcaccatcaggctactgacatccctgcgcgcaaagcatacgcaggagaactgcgagacctggggtgtaaatggcgagactggtacgctggttgacatgaaagaactaggcatctgggaacccttggctgttaagttacaaacttataaaaccgccgtcgagaccgcagtgctcctgctgagaatcgacgacatcgtcagcgggcataagaaaaagggagatgaccagtcacggcagggaggtgcacctgatgccggacaggagtag

SEQ ID NO: 217935 - DNA, 1503 bp, synthetic construct
  misc_feature 1..1503: note = Description of Artificial Sequence: Synthetic coding sequence
  source 1..1503: mol_type = other DNA
atgatgaaaatgctcctcgatcctatgggaggcatcgttatgacaaatgacggaaacgcaatcctgcgcgagatacaggtacagcaccccgctgcaaaatctatgatcgagatctcacgaactcaggatgaagaagttggagacggaaccacttctgtaatcatactggctggcgagatgctgtcagtggcagagcatttcctggagcaacagatgcaccctacagttgtgataagtgcatacaggaaggcactagacgatatgatctctactctaaagaagatatctattccagtggacatatcagactctgatatgatgctgaacataattaacagcagtatcacaactaaggcgatatccagatggagcagcctggcctgtaatatcgctctcgacgccgtgaagatggtccaatttgaagaaaacggtaggaaggaaatagatatcaagaagtacgcacgggttgagaaaatcccaggcggtataattgaggactcgtgtgtgctgcgcggtgtcatgatcaacaaggacgtgacccaccccagaatgaggcgctatataaagaatccgcgaattgtcctgttggattcatccttggaatacaaaaaaggggagtcgcaaacagacattgaaatcacaagggaggaggacttcacccgcatcctgcagatggaggaagagtacatccagcaactgtgcgaggacatcatccagctgaaacccgacgtagttataactgagaaaggtatatctgacttggcacagcactatctgatgcgcgctaacattaccgcaatccgcagagtgcgcaagacagacaataacagaatcgcacgcgcttgtggcgcacggatcgtcagcaggccagaagaactgagagaagatgatgtgggcacaggggctgggttgctcgagatcaaaaaaatcggggacgagtatttcacttttattactgactgtaaggatcctaaagcctgtaccatccttctacgtggcgcttcaaaggagatcctttcagaggtagagcgaaacctccaggatgctatgcaggtatgtagaaatgtccttctggatccccagttggtacccggtggcggtgctagcgaaatggccgttgcccatgctttaacagagaaatccaaagccatgacaggggtggaacagtggccctatcgggctgtggcacaagctctcgaagtcataccgaggacacttatccagaattgcggggcatctacaattcgcttgctgacaagcctacgagccaagcatacgcaagagaattgtgagacctggggcgtcaacggggaaaccggaacactcgtggatatgaaggagctgggtatttgggaaccattggcagtgaagctacagacctacaagaccgctgttgaaaccgcagtgctcctgctgcggatagatgacattgtgtccggacacaaaaaaaaaggagatgatcagagccgacagggcggagcccctgatgctggtcaggagtag

SEQ ID NO: 217936 - DNA, 831 bp, synthetic construct
  misc_feature 1..831: note = Description of Artificial Sequence: Synthetic coding sequence
  source 1..831: mol_type = other DNA
atgtatgagggagatctggaaggccagagcatgaactggacttccgaagagggtcgcggagatatcattaggtccggtaccaacatcgacagagcatggcaatgtcagaacacaaagagggagtcaggacggaaggtgcagagcggaaacattaacgccgctaagacaatcgccgacatcattcggacatgtctgggacccaagagtatgatgaagatgctgcttgaccccatggggggtatcgtcatgaccaatgatggtaacgccattctgcgcgagatccaggtccagcatccagcagccaaatcaatgatcgagatcagccggactcaagacgaagaagttggagacgggactacctctgtcattatcctcgccggtgaaatgctctccgtcgccgaacatttcttggagcagcagatgcaccctacagtggtgatatcagcctatcggaaagctctggacgacatgatttcgaccctgaagaaaatttccattccagtggacataagtgactcagacatgatgttgaatattattaatagctccataacaactaaagccatcagcagatggtcctcccttgcctgtaatattgctctggatgccgttaaaatggtgcaatttgaggagaacggccgaaaggagatagatatcaagaaatatgcgagagtggaaaaaatacccggtggcatcatcgaagacagctgcgtgctgagaggcgtaatgataaacaaagatgttactcaccctcgcatgcgccgatatattaagaatccacggattgtcctgcttgattcatctctagagtataagaaaggggaaagttag

SEQ ID NO: 217937 - DNA, 486 bp, synthetic construct
  misc_feature 1..486: note = Description of Artificial Sequence: Synthetic coding sequence
  source 1..486: mol_type = other DNA
atgatgggtcataggcccgtgttggttctgagccagaatacgaagcgtgaatccggcagaaaggtgcagtcaggtaatattaatgcggctaagaccattgcagatataattcgcacttgcctagggccaaaatctatgatgaaaatgctcctagacccaatggggggaattgttatgaccaacgatggaaatgccatcctgagggagattcaagttcagcatccggctgccaagtcaatgatagaaatttcccgcacacaggacgaagaggtaggcgacggcactacttccgttatcattttagagagccactccgtgaccatgctggaatgcggtggagccatactggcacactgtaatctatgtctgccagctggggagatgctgagtgttgcagaacacttccttgagcagcaaatgcacccaacagtggtgataagcgcctatcggaaagctctggacgacatgatttcgacccttaaatag

SEQ ID NO: 217938 - DNA, 567 bp, synthetic construct
  misc_feature 1..567: note = Description of Artificial Sequence: Synthetic coding sequence
  source 1..567: mol_type = other DNA
atgtacgagggagacctggaggggcagtcaatgaattggacatctgaggagggaaggggagatatcatccggtccggcacaaatatcgatcgggcatggcagtgtcaaaacacaaaaagggagtccggtaggaaggttcagtcaggcaatatcaatgctgctaaaatccaggtccaacacccggcagccaaatcaatgatcgaaatatctcggacacaggacgaggaggtaggcgatgggaccaccagcgttattatcctggccggagaaatgcttagtgtcgccgaacattttttggagcagcagatgcaccccaccgtcgtgatatctgcttaccggaaggctctcgatgatatgattagcacactgaagaagatctcaatcccggtagatatctccgactccgatatgatgctgaacattatcaactctagtatcaccaccaaggccatcagcaggtggagctctctggcctgtaacatagcccttgatgctgttaaaatggtacaattcgaagagaacggacgtaaggagatcgacattaagaagtatgctcgcgtggagtag

SEQ ID NO: 217939 - DNA, 1503 bp, synthetic construct
  misc_feature 1..1503: note = Description of Artificial Sequence: Synthetic coding sequence
  source 1..1503: mol_type = other DNA
atgatgaagatgttattagacccaatgggcggaattgtgatgaccaatgatgggaacgcaattctccgggagatccaggtacagcatcctgccgcaaagtccatgattgagatctcacgaacacaggatgaggaggtaggtgatggtacaacgagcgtcataatcctggccggtgagatgttgtctgtagctgaacatttcctggaacaacagatgcacccaaccgtggtgatatctgcttatagaaaggctcttgatgatatgatctccaccctcaagaagataagtatccccgtggacatttccgactccgacatgatgttgaatatcattaactcttcaattacgactaaggcaatttccaggtggtcatcactagcctgcaacattgcattggatgctgttaagatggtgcaattcgaggaaaacggcagaaaagagattgacatcaaaaagtacgccagggtggaaaaaatccccggtggcattatcgaagactcctgcgtccttagaggtgttatgattaacaaggatgtaacccacccaagaatgcgaagatacataaagaacccacgcattgtcctccttgacagcagcctcgaatataaaaagggagaatcacagactgatattgaaatcactcgcgaggaagatttcaccaggattcttcagatggaggaagagtatatacagcagctgtgtgaagacatcatccaactcaagccggatgtcgtgattacagagaaaggcattagcgacctcgctcagcactacctgatgagggctaatattacagcaatccgaagggtgagaaaaaccgacaacaacaggattgcccgagcctgtggtgcgcgaatcgttagccggccagaagaactgagggaggacgacgtcgggacaggagcaggactcctggaaataaaaaaaataggcgatgagtatttcacttttatcaccgactgcaaggatcctaaagcctgtaccattttattacggggtgctagcaaagagatcctttcagaggtcgaacgcaatcttcaggacgctatgcaggtctgtagaaatgtgcttctggaccctcagttggttcctgggggaggggctagtgaaatggcagttgctcacgccttgacggaaaagtcaaaggcaatgacgggcgtcgaacaatggccctatcgcgcagttgcccaggccctggaggtgatcccacgaacattgatccagaattgcggcgcaagtacgatcaggctcctaacctctttgcgggcaaagcacacccaggaaaattgcgaaacttggggcgtgaatggagagaccggcaccctggtggatatgaaagaattaggcatttgggaacctctggctgtcaagctgcaaacctataaaacagcagtggaaacggctgtactcctcctgaggatagacgatatagtgtcaggacacaaaaagaaaggtgacgatcaatcacgtcaaggtggagcaccggatgccggacaggagtag

SEQ ID NO: 217940 - DNA, 1620 bp, synthetic construct
  misc_feature 1..1620: note = Description of Artificial Sequence: Synthetic coding sequence
  source 1..1620: mol_type = other DNA
atgccagagaatgtggcccctcgctcgggggctaccgcaggtgccgcaggcggtcgcggaaagggagcataccaggacagagacaagcctgcacagatccggttctctaacatctccgcagctaaggccgtggccgacgctatccgtacgagcttaggacccaagggcatggacaaaatgattcaggatggtaagggagacgtcaccataactaacgacggagccaccatcctgaagcagatgcaggtgctgcatcccgctgcgagaatgctcgtagagctgagcaaggcacaggacattgaggccggagatggcactaccagcgtggtaatcatcgctgggtccctgttggactcatgcaccaaactgctccagaagggtatccatccaacaattatcagcgagagctttcagaaggcactggagaaggggattgagattttgactgacatgagtaggccagtcgagttaagcgatcgggagactctgctaaactccgcaactacaagtctcaatagcaaagtggtgtctcagtacagctccctgctcagtcccatgtcagtaaacgcagtgatgaaggtgatcgaccctgctaccgccacgtcagttgatctcagggatatcaaaattgtcaagaagctgggaggcactatagacgattgtgaactggtggagggccttgtcttaacacagaaagtctctaattctgggatcactagagtggaaaaggcgaagatcggcttaattcagttctgcctgagcgctcctaagacagatatggataaccagattgtggtctctgattacgcacagatggatagagtcctcagagaggagagagcttacatcctgaatctagtgaagcaaattaaaaaaacaggatgcaatgtgcttctgatacagaagtcgatattgagggatgcacttagtgacctggcactacatttcctgaacaaaatgaagattatggtcattaaagatatagaaagagaggatatcgagttcatatgcaaaactattgggacaaagccagttgcccacattgaccagtttactgcagacatgctgggctccgccgagttagctgaggaagtaaacctgaatggaagcggcaaattgctcaagattaccgggtgcgcatctcctggcaaaaccgtgacaatcgtggtccgcggaagtaacaaacttgttatcgaggaggctgaaaggagtatccacgacgccctctgcgtaatccggtgcctcgtcaaaaagcgcgctctaattgccggaggcggtgcgccagagatcgagctcgccctcagactgacagaatatagccggaccctcagcgggatggagagctattgcgtgagagcatttgccgacgcaatggaagtcattccttcaaccttagccgagaacgccggactgaatcccatttcaaccgtaaccgagcttcgtaataggcatgcccaaggagaaaagaccgccggtatcaatgtccggaaagggggaatctctaatattcttgaggaactggtcgtgcagcctctcctggtctctgtgtccgcactgactttagcaaccgaaaccgtgagatcaatactcaagatagatgatgtcgttaatacccggtag

SEQ ID NO: 217941 - DNA, 1452 bp, synthetic construct
  misc_feature 1..1452: note = Description of Artificial Sequence: Synthetic coding sequence
  source 1..1452: mol_type = other DNA
atggataagatgattcaggacggtaagggcgacgttactattactaatgacggagcaacaatactgaagcagatgcaggtgttacatccagcagccagaatgctcgtcgagctgagtaaggcccaggatattgaagccggtgatggaaccaccagcgtcgtgattattgccggtagtctgttggatagctgtacaaaactgctgcagaaaggtattcatcccacgatcatcagtgaaagcttccagaaggccctcgagaaggggatagagatactcaccgacatgagtagacctgtggaactttctgaccgcgagactctcttgaattccgcgaccacctcccttaatagcaaggtcgtcagccagtatagttctctactttcacccatgtccgtgaatgcagttatgaaagttatagacccagcaacagctacctccgtggatcttagagatatcaaaatcgtcaagaaacttgggggaaccatagatgattgtgaactggttgaaggtcttgtgttgacccagaaagtgtcaaactccggaattaccagagtcgagaaggctaagattggactcatccagttctgcttgagcgcccctaagacggacatggataatcagattgttgtgagcgattatgctcaaatggaccgggtcctgcgggaggagagggcgtatattctgaacctggtgaaacagatcaaaaagaccggatgcaacgtgctgttaatccaaaaatccattttgcgcgacgcactttctgaccttgccctgcatttcttgaataaaatgaagatcatggtaattaaggacatcgagagagaagatatcgagttcatttgtaagactatcgggaccaaacccgtcgcgcacatcgatcagtttacagcagacatgctgggcagtgcagagctcgcggaagaggtgaacctaaatggatcaggaaaactccttaaaataacagggtgtgcatctcccggaaagaccgttacaatcgtggtacgagggtccaataagctggtcatcgaggaggccgagcggtccatacatgacgctttgtgcgttatcagatgtttagtgaagaagcgagccctcattgctggaggaggagcacctgagatagaactcgcccttcgcttgaccgaatactcccggacattgtcaggcatggagtcctactgtgtaagggctttcgcggatgccatggaagtaatcccaagtaccctcgccgagaatgccggtctgaatccaatcagcaccgtaactgagctgcggaaccgccacgcacagggggaaaagactgctgggattaacgtcagaaagggtgggatcagcaacatcttagaggagttagtggtccagcccttgctggtaagtgtctcagctcttactctagccacagaaactgtgcggtccatcctcaagatcgatgacgttgtgaacacgaggtag

SEQ ID NO: 217942 - DNA, 1530 bp, synthetic construct
  misc_feature 1..1530: note = Description of Artificial Sequence: Synthetic coding sequence
  source 1..1530: mol_type = other DNA
atgcccgaaaatgtcgctccacggtctggagcaactgcaggggcagccggagggagaggaaaaggggcatatcaggatcgagacaagcccgctcagataaggttctcaaatatctctgctgccaaggcagtggccgacgcaattcgcacttcattaggccctaagggaatggataaaatgctggtggagctaagcaaagcacaggacatcgaagctggagatggtaccacatccgtggtcattatcgcagggagccttttggattcttgcaccaaactgttgcagaaaggaattcatcctacaataattagcgaaagcttccagaaggccctggaaaaaggtattgagattcttacggacatgagccggcctgtcgagctgagcgatcgcgagacgctacttaacagtgcgaccacttctttgaactctaaagtcgtgtcccagtactccagcttattgagccccatgtctgtcaatgccgttatgaaggtgatcgaccctgctacagccacttccgtagacttaagagacattaaaatcgtgaaaaaactcggcggtacaatcgacgactgcgaactggtggaagggctggtgcttacacaaaaggtctcgaactcagggattactcgcgtcgagaaagcgaagatcgggttgattcaattctgcctttcagcacccaagaccgacatggataaccagattgttgttagtgattatgcacagatggatcgggtccttcgagaggagcgagcttacattctgaacttggttaagcagattaagaaaaccggatgcaatgttctgctcatccagaagagcatactccgcgatgccttatccgacttggccctacatttccttaacaaaatgaaaataatggtaattaaagatatagaacgtgaggacatagaatttatttgcaagactatcggaactaaacctgttgcccacatcgatcagtttactgccgatatgttgggctccgcggaactggcagaagaagtcaacctgaacggctccggtaagttactaaagattaccggatgcgcaagtcccggtaaaacagtgacgattgtcgtgcggggatctaataaattggtgatcgaggaagccgaaaggtccattcacgacgcattatgtgttatcagatgcctggtgaaaaagcgcgctttgatcgcgggtggcggagctcctgagattgaactggcgctgcgacttacggagtactctagaaccctttcaggtatggagtcctattgtgtccgagccttcgccgatgctatggaggtcatacccagcaccctcgccgaaaacgccggtcttaatcctatcagcacagtcaccgaactgcggaatcggcacgcccaaggtgagaagacggcagggattaatgttagaaagggtggcatttctaacatcctggaagagctcgttgtgcagcctctgttagtgagtgtcagtgccctgacactggccaccgaaacagttcggagcatactaaaaattgatgacgtcgtcaacaccaggtag

SEQ ID NO: 217943 - DNA, 1170 bp, synthetic construct
  misc_feature 1..1170: note = Description of Artificial Sequence: Synthetic coding sequence
  source 1..1170: mol_type = other DNA
atgtctcgacccgtcgaattgagcgatcgcgagacactgttgaacagtgccacaacatcgctgaactccaaggtggtgtcacaatacagttcattgctgtcgcctatgagcgtgaatgctgtgatgaaggtgatcgatccagcaactgcgacctccgtcgatctgagggacattaagatcgtgaaaaaactcggagggaccatcgatgattgtgagctagtcgaaggtttggttctgacccagaaggtgtctaattcaggaatcactagagtggagaaggccaaaattgggctgatccaattctgcctgtctgccccaaaaaccgacatggacaaccaaatcgtggtgagcgactacgctcagatggatagggtcttgagagaggaaagggcgtacatattgaacctagtgaagcagataaagaagaccggctgtaacgttctgctcatccagaaatcaattctacgcgacgccttgtctgatctcgccctacacttcctgaacaaaatgaagatcatggtaataaaagatattgaacgcgaggacatcgagtttatctgcaaaaccatcggaaccaaacccgtggcacatatcgaccagttcactgcggatatgctgggctctgctgaactggcggaggaagtgaatctcaatggatcagggaaactgctgaaaatcaccggctgtgcgtctcctgggaagacagttaccatagtagtgcgaggcagtaataagctggtgatagaagaggctgaaaggtccatccacgacgcactgtgcgtgattcgctgcctcgtcaagaagagagccctgatcgccggagggggagcaccggagattgaactcgccctaagacttaccgaatactctcgtaccctgagcggtatggagtcttactgtgttcgagcatttgctgacgccatggaggtcattccctcaactctggccgaaaacgcaggcctcaaccccatctcgacagtcaccgaactgaggaacagacacgctcagggagaaaagactgccggaattaatgtgcgcaaagggggtatcagcaacatcctggaagagctggttgtgcagcctctgctggtcagcgtgtccgccttaacgctggccaccgaaaccgtgcgctctatcctgaagattgacgacgtggtgaacactcgatag

SEQ ID NO: 217944 - DNA, 1626 bp, synthetic construct
  misc_feature 1..1626: note = Description of Artificial Sequence: Synthetic coding sequence
  source 1..1626: mol_type = other DNA
atggccagcatggggaccctcgcatttgatgagtacgggaggccatttctcatcatcaaagatcaggacagaaagtctcggctgatgggactcgaagccctgaaatcacacataatggccgcaaaagctgtggcaaatacgatgaggacatctcttgggcctaatggattagacaagatgatggtcgataaagatggtgatgtgacggtcacaaatgacggcgcaaccatcctcagcatgatggacgtcgaccaccagatcgccaaactgatggttgaattgtcaaaatctcaagatgacgagatcggggacgggacgacaggcgtagtagtgttggctggcgctctgctcgaagaagccgagcaattgttagatcgcggaatacacccaatcaggattgccgatggctacgaacaggccgctagggttgctatagagcacctggacaaaataagcgactcagtgttagtagatatcaaggacacagagcctctgattcaaactgcaaagactaccctgggctcgaaagtagtgaattcttgccacaggcagatggctgagattgccgtgaacgccgtgcttacagtagctgatatggagagaagagatgtggacttcgagctgattaaagtggaaggcaaggtaggaggacgattagaagatacaaagcttattaagggagtcatagttgacaaggatttcagccatccccagatgcccaagaaggtggaagatgcgaaaattgctatcctaacttgtcctttcgagccacccaagccgaagacaaagcataagctggatgtgaccagcgtggaggactataaggcactgcagaaatatgagaaggagaagtttgaagagatgatccaacaaataaaggagacaggtgctaaccttgctatttgtcagtggggatttgatgatgaggctaaccacctactactccagaacaatcttcccgctgtgcgatgggtgggcggaccagagatagagctgatcgccatagcaaccggagggagaatagtgcccaggttttccgagcttactgctgagaagctcggattcgctgggctggtgcaagagattagcttcggaactactaaggacaagatgctagtgatagaacagtgcaaaaactcaagagcagtaactattttcatcagaggagggaataagatgatcatagaggaggctaagagaagccttcatgatgcgctgtgtgttattcggaacctgatacgggacaatagagttgtctacggcggtggtgcagccgaaataagctgcgcactggcagtgagtcaagaggccgataagtgtcctacactcgagcagtacgcaatgagagctttcgccgatgccctggaggtcatcccaatggcactgtcagaaaatagcggcatgaacccgatccagactatgacggaagtgcgagccaggcaggtgaaggaaatgaacccagccctcggcatcgactgcctccataaagggactaacgacatgaaacaacagcacgtcatagagacacttatcggtaaaaagcagcagattagcctggccacacagatggtgcggatgattcttaaaatcgatgatatacgcaaacctggtgagagtgaagaatag

SEQ ID NO: 217945 - DNA, 1545 bp, synthetic construct
  misc_feature 1..1545: note = Description of Artificial Sequence: Synthetic coding sequence
  source 1..1545: mol_type = other DNA
atggcctctatggggaccttggcgtttgacgaatatgggaggcccttcctgatcatcaaagaccaagaccggaagtctcggctgatgggtctggaggccctgaaatcccacataatggcagcaaaggccgtcgccaacaccatgaggaccagtctcggccctaacggactggacaagatgatggtcgataaggacggtgatgtcacagtcacaaacgatgagataggggatggcacgactggcgtcgtggttctcgctggggcactactggaagaagccgagcagctgctcgataggggtatccacccgatccgcatagccgacggctacgagcaagccgctcgtgtcgcaatcgagcatcttgataagatcagcgactctgttctcgtagatattaaagataccgaaccactcatccagaccgccaagacaactctgggttccaaggtcgttaattcttgtcacaggcagatggccgaaatcgccgtcaatgccgtcctcaccgtggctgacatggaaagaagggacgtcgacttcgaattaatcaaggtagaaggaaaagtggggggaagactagaggatacaaaactgatcaagggtgtgatcgtggataaagatttctctcatcctcagatgcccaagaaggtggaggacgccaaaattgccatccttacttgcccatttgagcccccaaagcctaaaactaaacataagttagacgtcacctcggtggaagactataaggcactgcagaagtacgagaaggagaagttcgaagagatgatccaacagataaaggaaaccggcgcaaacctggctatttgtcagtggggattcgacgacgaggccaaccacctgctgttgcagaacaatttaccagccgtgcgatgggtcggcggaccagagattgagctgatcgctatcgccacaggcggtaggatcgtacccaggtttagcgaactcactgctgagaagctgggctttgcaggtttggtgcaggaaattagctttgggaccactaaagacaagatgttggtcattgagcagtgcaagaacagcagagcggttactatattcattcggggaggcaacaaaatgatcatcgaagaagctaaaaggagcctccacgatgctttgtgtgtgatccgcaacctgatcagagataacagggtggtgtacgggggtggagccgctgagatatcatgcgctctggccgtgagccaagaggccgataagtgtcctaccctggaacagtatgcaatgcgcgcattcgctgatgcccttgaggtcattccaatggcgttatctgagaattctggcatgaacccgatacagactatgacagaggttagagcacgccaagtgaaggagatgaatcctgcgcttggaatcgactgcctccataagggaactaacgatatgaaacaacagcatgtgatcgaaacgctaattggaaaaaaacagcagatttcgctggcaactcaaatggtgcgaatgatcttgaaaatagatgatatacgcaagcctggcgaatcagaggaatag

SEQ ID NO: 217946 - DNA, 1563 bp, synthetic construct
  misc_feature 1..1563: note = Description of Artificial Sequence: Synthetic coding sequence
  source 1..1563: mol_type = other DNA
atgaactcttcactgggcccaaccattgagaaactgtcagtatcccacatcatggctgccaaggcggtggcaaatacaatgaggacaagcttggggcctaacggcctggacaagatgatggtagataaagacggggacgtcacagtgacaaatgacggtgcaacaatacttagcatgatggatgtggaccaccagatcgccaagcttatggttgaactgtcaaaatctcaggacgacgaaatcggagatgggaccacgggggtggtggttctcgcaggcgctctcctcgaggaagccgaacagctactggatcgcggaattcaccctatcagaatcgctgacggctatgagcaagcagcgagggtcgccatcgagcatctggacaagatatctgatagcgtcttggtcgatatcaaggatactgagcccttgatccaaactgcaaaaactactctgggctcaaaggtggtaaacagctgtcaccgacagatggcagaaattgccgttaacgcagtcctgacagtggccgatatggaacgacgggatgtcgattttgagctgattaaggtggaagggaaggttggcggtaggcttgaagataccaagctcataaaaggtgtgattgtggataaagacttctcccatcctcagatgcctaagaaagtcgaggacgccaagattgctatcttgacctgccccttcgagccgccaaagcccaagacaaaacacaagctggatgtcacaagcgtcgaagactacaaggccctccaaaaatatgagaaggaaaagttcgaggagatgattcagcaaattaaagagacaggcgctaatttggcaatttgtcagtggggcttcgatgacgaggcgaaccatcttctgttgcagaataatcttcctgcagtccgctgggtggggggaccagagatcgagctcatcgccatcgcaacagggggaaggatagtccctagattttcagaactcaccgccgaaaagctgggctttgccggactggttcaagagatttcattcggcactacaaaagacaaaatgctggtgatcgaacagtgtaagaacagtagagcggtgaccatcttcatcagaggagggaacaagatgattatcgaggaggctaagcgatcacttcacgacgccctttgcgtgattaggaacctgatcagggataacagagttgtgtatggcggtggggctgctgagatctcctgcgcccttgccgtgtcacaggaggctgataagtgccccacgctggaacaatatgctatgagggccttcgcggacgcactggaagtgatacctatggctctatcagaaaactctggtatgaatcccatccagacaatgacagaggtcagggcaagacaagtcaaagaaatgaatcccgctctaggcattgattgtctccacaagggcactaacgatatgaagcaacagcacgtgattgagactttaattggcaagaagcagcagatttcgctggcgacccagatggtcaggatgatattgaagatcgatgacatccggaaacccggtgagtcagaggagtag

SEQ ID NO: 217947 - DNA, 1347 bp, synthetic construct
  misc_feature 1..1347: note = Description of Artificial Sequence: Synthetic coding sequence
  source 1..1347: mol_type = other DNA
atggctgccaaagctgtcgcgaacaccatgcgtacctcactgggacccaacgtcctggccggagccctgctggaggaggctgagcagcttttggatcggggaatccatccaatcagaatcgccgatggttatgagcaggccgctagggtagccatcgaacacctcgacaagatttctgattcagttttagttgatattaaagataccgaacccctaattcagactgccaaaaccacactcggaagtaaggtggtcaacagctgtcaccggcagatggccgagatagcggtgaacgcagtgttgaccgtagccgatatggagcgcagggacgtggattttgagctgatcaaagtcgagggaaaagtggggggtcgacttgaggacactaaactgatcaagggagtcatcgtggataaagacttctcacatcctcagatgcccaaaaaggttgaagatgccaaaattgcaattctcacgtgccctttcgagcctcccaagccaaaaacaaagcataaactggatgtcacctctgtcgaagattacaaagctctccagaagtatgagaaagagaaattcgaagaaatgattcagcagatcaaggaaacaggcgcaaacctggctatttgtcaatgggggtttgacgacgaagcaaaccacctcctgctccagaataatctgccagcagttcggtgggtaggtggccctgagattgagctgatcgctatagctaccggcggtagaatcgttcccagattttcagaacttaccgcagagaagctcggattcgctggcttggttcaagagatctcatttggtaccacaaaagataagatgctggttattgaacagtgcaagaacagcagagccgttaccatattcatccggggtggaaacaaaatgattatagaggaggccaagcgctcattgcacgatgccttatgtgtgattcgtaacctgatacgagataatcgggtggtgtatggcggaggcgcagccgagatttcgtgtgctttggcagttagccaagaggccgacaagtgtccaacgctggagcagtacgccatgcgggcttttgctgatgcgctagaagtgatccctatggctctaagtgagaacagcggcatgaatccgatacagactatgacagaagtaagggctagacaagtgaaagagatgaatcctgcgttgggaattgactgtctacacaaaggcacgaatgacatgaagcagcagcatgtgatagagactctgattgggaagaaacagcagatttcgcttgctacccaaatggtgaggatgatccttaaaatcgatgatatcaggaaacctggtgagtctgaggaatag

SEQ ID NO: 217948 - DNA, 1461 bp, synthetic construct
  misc_feature 1..1461: note = Description of Artificial Sequence: Synthetic coding sequence
  source 1..1461: mol_type = other DNA
atggcttcgatgggcaccctggcctttgatgagtacggcagacccttcttgataattaaagatcaggacagaaagagtcggcttatgggcctagaagcgctgaagtcccatatcatggcagccaaggctgttgctaataccatgaggacgtctctggggcctaacgtactggccggagccttactcgaagaggcggagcagctccttgatcggggaatccaccctatcaggattgccgatggatatgaacaagccgctagggtggcaatagaacatcttgacaagatttctgactcggtattagtggatataaaggacaccgaaccactgattcagacagcaaagaccaccctgggttctaaggtggttaactcttgccaccgccaaatggccgaaatcgctgtgaacgccgttctgaccgtggcagatatggagagacgagatgtagacttcgagttgattaaggtggaaggaaaggtaggaggtagactggaggatactaagctgataaaaggagtgattgtggacaaggacttttcccacccacagatgcccaaaaaggtggaggacgctaaaattgccattctgacatgtccctttgagccgcctaagcctaagaccaaacacaagttggacgttacctccgtggaagattacaaagccctccagaagtacgagaaagagaaattcgaagagatgattcaacaaatcaaagaaaccggggctaatctggcaatttgtcagtggggatttgatgacgaggccaatcatctgctgctccagaataacctgcccgcagttcggtgggtaggaggccctgagattgagttaattgccatcgccactggaggaaggatcgttccaagattttctgaactgaccgcagagaagctcggatttgctggcctagtccaggaaattagcttcggaacgacgaaagacaaaatgctggtcattgagcagtgcaaaaatagcagggccgtgaccatctttattaggggtggcaataagatgattatcgaggaggcgaaacgctccttacatgacgccttatgcgtcatacgaaatctgattcgggacaaccgagtggtatacggaggcggtgcagctgaaatcagctgcgcactagctgtatcccaggaggctgataaatgtccaacgttagagcagtacgccatgagagctttcgctgacgccctggaggtgattccgatggccctatcagagaattcgggcatgaacccaattcagactatgaccgaggtccgcgcaagacaggtgaaggaaatgaaccctgcgttagggattgactgcctccacaagggcactaatgacatgaagcagcagcacgtgattgaaactctgattggcaagaagcaacagatttccttagccacacagatggtccggatgattctgaagattgacgatatcagaaagcccggagagtccgaggagtag

SEQ ID NO: 217949 - DNA, 1512 bp, synthetic construct
  misc_feature 1..1512: note = Description of Artificial Sequence: Synthetic coding sequence
  source 1..1512: mol_type = other DNA
atggctgccaaagccgttgctaatactatgcggactagcctgggcccaaatgggctggacaagatgatggttgataaagacggggatgtgacagtgaccaacgatggtgccactattctctccatgatggacgtggatcaccagatcgccaagctgatggtcgaactgtctaaatctcaggatgatgagataggcgatgggaccacaggcgttgtggtgctggccggtgctctactggaggaggctgaacagctcctcgacaggggaattcaccccattcgtatcgccgatggctacgagcaggctgcccgtgtggcaatcgaacacttggacaaaataagcgattccgtgttggttgacatcaaggataccgaaccattaatccaaacggcaaaaaccaccctgggatctaaggtggttaactcgtgccatcgccaaatggcagagatcgccgtgaacgctgtactgactgtcgcagacatggaaagacgcgatgtcgactttgagctgattaaggttgaggggaaggtcggcggaaggctggaggacacaaagctgatcaaaggcgtgattgtggataaagatttttcacatccccagatgccaaaaaaagtcgaagatgcaaaaatagccattctgacttgcccctttgagccaccgaaaccgaaaacaaagcataagctcgacgtgacaagcgtggaagactacaaggcacttcagaaatatgaaaaggagaaatttgaagagatgatccaacagattaaagagactggcgctaacctggctatttgtcagtgggggttcgacgatgaggccaatcacctgctcttacagaacaatctcccagcagtaagatgggtcggaggacccgaaattgagttgattgccatagcaactggtggcagaatagtgccccgtttctccgagctgacagcagaaaaacttgggtttgcagggttggtgcaagaaatatcttttggcacaaccaaagacaaaatgctggtaattgaacaatgcaaaaacagtcgagcggtgactatctttattcgaggcggaaacaaaatgatcatcgaagaagccaaacggagtctgcatgatgctctgtgcgttatacggaacctgattagagataatcgcgtcgtgtacggcggtggtgcggcagagatttcctgtgccctagctgtatcccaagaggctgacaagtgcccaacgctcgagcaatatgctatgagggcgttcgccgatgccctggaggtcatacctatggccctatcagagaactccggtatgaatcctattcagactatgacagaggtgcgagcacgtcaagtcaaagagatgaaccctgctttgggtatcgattgccttcacaagggcacgaatgacatgaaacaacagcacgtaatcgagacactgatcggaaaaaaacaacagatatccctcgctacgcagatggtccgcatgattctcaagattgacgatattcgtaaaccgggtgaatctgaggagtag

SEQ ID NO: 217950 - DNA, 1593 bp, synthetic construct
  misc_feature 1..1593: note = Description of Artificial Sequence: Synthetic coding sequence
  source 1..1593: mol_type = other DNA
atggccgctatcaaggccgtcaatagcaaggccgaggttgctagagcgcgtgccgcactcgctgttaatatatgcgctgctcggggactgcaggatgtactccggaccaaccttggcccaaagggtaccatgaagatgctggtgtctggggctggagatattaaacttaccaaggacggtaacgtgttgttggacgaaatgcaaattcagcaccccacagcttctcttatcgccaaagttgccaccgcccaggatgatgttacgggagacggcacgaccagcaacgttttgattatcggggagttactaaagcaggctgatttatatatatctgagggcctccacccacgcattatagcggaaggctttgaagcggcaaagattaaggccctggaggtcctggaggaggtgaaggtgaccaaggaaatgaagcggaaaatcctcctggacgtcgcgaggacttctttgcaaactaaagtccacgccgagttggccgacgtgctgaccgaagtcgtggtcgatagcgttcttgctgtgcggaggcctggctatccgattgatctcttcatggtggaaattatggagatgaagcataagctcggcacagacacaaagttgatccagggtctcgttttggatcacggagcgcgacacccagacatgaaaaagagagtcgaggatgcatttatcctaatctgtaatgtgtccctggaatatgaaaagacagaagtgaactcaggctttttctacaagactgccgaggaaaaagaaaagctggtaaaggccgaacgcaaatttatcgaggaccgcgtgcagaagattattgaccttaaagacaaagtgtgcgcccagtccaacaaaggctttgtcgttatcaaccaaaaaggaatagatcccttttccctagactcgctggcaaagcacgggatcgttgctcttaggcgtgccaagcggagaaacatggaaaggctatcattggcctgtggcggaatggccgtcaattccttcgaggatctcactgttgattgccttggccacgcaggcctcgtgtacgaatacaccctgggcgaggagaagttcacattcatcgaagagtgcgtcaacccctgcagcgtgaccctgctggtcaaaggccctaataaacacaccctgacgcaggtgaaggacgctattcgggatggattgcgcgctataaagaacgccattgaggacggttgtatggttcctggggctggggctatcgaggtagctatggccgaggcactagtgacctataagaacagcatcaagggacgggcacgcctgggagtccaggcgtttgccgacgccctgctgatcatcccaaaagtgctggcccaaaacgctgggtatgatccgcaggagacactggtgaaggtgcaagcggagcatgtggagtctaagcaactggtgggagtggatttgaacacgggcgagccaatggtcgccgctgacgccggtgtgtgggataattattgcgtaaagaagcagctcctacactcctgcactgtgatagccaccaatatcctcttagtcgatgaaataatgagggcagggatgtcctccttgaagtag

SEQ ID NO: 217951 - DNA, 1482 bp, synthetic construct
  misc_feature 1..1482: note = Description of Artificial Sequence: Synthetic coding sequence
  source 1..1482: mol_type = other DNA
atggctgcaatcaaagctgtcaattctaaggctgaggtcgctagagccagagcagccctggctgtcaatatctgcgccgcacggggtttacaggatgtgttgagaacaaatttgggccctaaaggcacgatgaagatgcttgtgtcaggcgctggagatatcaaactgaccaaagacggtaacgtactgctggatgagatgcagatccagcatccaaccgcaagcctcatcgctaaggttgccactgcgcaggatgacgtcacaggggatggcaccactagtaacgtcttgattattggcgagctgctgaagcaagccgatctctacattagcgagggtctccaccccaggatcattgcagaaggcttcgaggcggcaaagatcaaggctctcgaggtcctcgaggaggtgaaggtcacaaaagaaatgaagagaaagattctgttggatgtggcgcgaacctcacttcaaacaaaggtacacgcggaactcgctgatgtgctcaccgaagttgtggtagattctgtcctcgcggtgaggcggccaggctacccgatcgatctgtttatggtggaaattatggagatgaaacataaactggggaccgatacgaaggaggtaaattctggttttttctataaaaccgctgaagaaaaagagaaactggtgaaagctgaacgtaagtttatagaggacagggtgcagaagatcatcgacctaaaagacaaggtctgtgcccagagcaataaaggatttgtcgtaatcaatcagaagggtatcgaccccttttccctggattcactggcaaagcacggaatcgtcgcactccgtagagctaagcggaggaatatggagcgactgtccctggcctgtggcggaatggccgtgaactccttcgaggaccttactgtggactgcttaggccacgctgggctcgtttacgagtacacccttggggaagagaaattcacctttatcgaagaatgtgtgaacccctgctcagttactttactagtgaaaggcccaaacaagcacacactgacacaggtgaaggacgctatccgggatggcttgcgtgcgatcaaaaatgcgattgaggacgggtgcatggtacctggtgccggtgctattgaagtcgctatggcagaggcactggtgacttacaagaactcaatcaaggggagggcacggctgggcgtgcaggcctttgccgatgcactactcattattcccaaggtattggcacaaaatgcaggctacgatccacaggagacactcgtgaaggtccaggcagaacacgtggaaagcaagcagctggtaggagtcgacctgaacacgggggaacccatggtggctgccgacgcaggcgtgtgggataactactgtgttaagaagcaactactccactcttgtacagtgatcgctactaatatccttctggtcgacgaaatcatgcgcgcaggaatgagtagcctgaagtag

SEQ ID NO: 217952 - DNA, 1458 bp, synthetic construct
  misc_feature 1..1458: note = Description of Artificial Sequence: Synthetic coding sequence
  source 1..1458: mol_type = other DNA
atggcagcgataaaagccgtgaactctaaagccgaggttgcccgagccagggccgctcttgcagtaaacatatgcgctgctagaggactgcaggacgtgctgcgaacaaacctgggtcccaagggaacaatgaagatgctggtgtccggagctggggacatcaaactgactaaggacggcaacgtgttgttagatgaaatgggacttcaccctagaattatcgcagaagggtttgaggccgctaaaattaaagcccttgaagtccttgaggaagtgaaggtgacgaaagagatgaagcgaaagatacttctggacgttgctaggacatccctgcagactaaggtacatgccgaactggctgacgtgctgacagaggtggtcgtagactcggtgctcgcagttcgacgacctggttatcccattgatctttttatggtggagataatggaaatgaaacacaagctaggcacagataccaagctgattcaagggctcgtcctcgatcacggtgcacgacacccggacatgaaaaagcgtgtcgaagacgcttttattcttatatgtaacgtgtcactcgagtacgagaaaaccgaggtcaacagtgggtttttctataagactgctgaggagaaagagaaattggtgaaggctgagcgcaaattcatagaagaccgcgtgcagaagattatcgatttgaaggacaaggtctgcgcacaaagcaacaagggctttgtagtgatcaatcagaaaggcattgaccccttctccctcgattcactggctaagcacggtatcgttgccctgagaagggccaaaaggcgtaacatggaacggttgagtctggcttgtggtgggatggctgttaactcttttgaggacctgacggtggactgcctggggcacgctggattggtgtacgagtacaccctcggggaggagaagttcacatttattgaggagtgtgtcaacccgtgtagcgtgactctgcttgtcaaaggccctaataaacatacattgactcaggtcaaggatgcgattcgcgacgggttaagggctattaaaaatgcaattgaagacggttgcatggttcctggagcaggagccatcgaagtggccatggcagaagctcttgtaacatataagaacagcatcaaaggcagagcgcgtttgggagtacaggcatttgccgacgctctgcttatcatccccaaagtgcttgcacagaatgcagggtatgaccctcaggagactttggtgaaagtccaagccgagcacgttgaaagcaagcagctcgtgggagtcgacctcaatactggcgaacccatggtggctgcagacgcgggagtctgggacaactattgcgtaaaaaagcagctgctccactcgtgtactgtcattgctacaaatattttacttgtcgacgagatcatgcgcgcaggaatgtcctctctgaagtag

SEQ ID NO: 217953 - DNA, 966 bp, synthetic construct
  misc_feature 1..966: note = Description of Artificial Sequence: Synthetic coding sequence
  source 1..966: mol_type = other DNA
atgaaacccggattctcaccacgtggtgggggtttcggtgggagaggcggatttggcgatagaggaggaagaggaggtcgtgggggattcggcggaggcaggggccgtggtggaggcttcaggggtagaggacgtggaggaggtggcggtgggggaggaggcggaggtggagggagaggtggcggagggttccacagcggtggaaacagaggcagaggccgaggcggaaaaagggggaatcaaagcggaaaaaacgtcatggttgaaccacatcggcacgaaggcgtctttatctgtaggggaaaagaagacgccttagtgactaaaaacctggtccccggagaaagcgtgtatggagagaaacgcgtgagtatcagtgagggagacgataagatagagtaccgggcttggaaccccttccggtccaagcttgcagctgccatactcggcggtgtagatcaaatacacataaagcctggagccaaggtcttatatctaggcgcagcctctggtactaccgtcagccatgtctcggatatagtcggcccagacgggctggtgtatgccgtggaattttcccatcggagcggtagagatctgattaacctggcaaagaagcgaactaacattatccctgtgattgaggatgcacggcaccctcataaatacaggatgttgatcgctatggtcgacgtgattttcgcagacgtggcccagcccgaccagacaagaatcgtggcactcaatgcgcacacattccttagaaatgggggtcactttgttatatcaatcaaagcgaattgtatcgactcaaccgcttctgccgaggcagtcttcgcatccgaagtgaaaaaaatgcagcaggagaacatgaagcctcaggagcagctgacgctcgagccctatgaacgggatcacgctgtggtcgtgggcgtttatagacctccccctaaagtcaaaaactag

SEQ ID NO: 217954 - DNA, 723 bp, synthetic construct
  misc_feature 1..723: note = Description of Artificial Sequence: Synthetic coding sequence
  source 1..723: mol_type = other DNA
atggatgtccatggggaagccgctggcgaagcaggacaggaaggcggagaagggctacaaggtggggctggtcaatctgaggagggcccttccgccgaaaaatgtcgggtttgcccttgtgtgtgccgggagaggcacccccaggaggagagaagatgcgaactggcgagtgatggagttcctagaaggcgaagtggcctgcaaggagcggattcgtgcgactacgagggaggggaccaggaatacggaccaggagaccagagccccggtcagggcccagagcaccatggcccagccgagggactgttatccgatggccaagtgcgcgcagcaggagctgaaccaggaagaccttacatcggagatggcggattacacgagctgggccatcatcctgaccacgccgctggggctgggggacagccgcaccacgctgacaggagaggggagtggcccggaggggcagggcctgcccagccggcagctaggggacggttgtgtcggggtagggagctgtgtgcccagcctggcggacccgctgttaccgaggttggcagactcgaggaattagcggttccgagacgctgcgcaccgcctcttcctcgggacgtactggaggggtcgtgccccctccctaccgctagctgcctgtgtgccgatccagctggtttgagacccgctgcaacgctgcgcttgtctcctgcgagaccagcatggccttag

SEQ ID NO: 217955 - DNA, 591 bp, synthetic construct
  misc_feature 1..591: note = Description of Artificial Sequence: Synthetic coding sequence
  source 1..591: mol_type = other DNA
atggacgataccctgtttcaactgaaattcaccgctaaacaattggaaaaactggcgaagaaggccgagaaagattccaaggcagagcaggctaaagtgaagaaggctctactgcagaagaacgtagaatgcgccagagtctacgctgaaaacgcaattaggaagaagaacgagggtgtcaattggctcaggatggcctctcgcgtcgatgctgtggctagcaaggtgcaaacagccgtgacgatgaaaggcgtcaccaagaatatggctcaggtgaccaaggcactggacaaagccttatctaccatggatttgcaaaaagtatccagcgtcatggatagatttgagcagcaggttcaaaatctggacgtgcataccagcgtgatggaagacagtatgtcctccgctactaccctcactaccccacaggagcaggtagacagcctgatcatgcagatcgctgaggagaacgggctggaggtccttgatcagttgagtcaacttcccgaaggagcctctgccgttggtgaaagttctgtcagatcgcaggaagaccagttgtccagacggctcgccgcattgcgaaattag

SEQ ID NO: 217956 - DNA, 600 bp, synthetic construct
  misc_feature 1..600: note = Description of Artificial Sequence: Synthetic coding sequence
  source 1..600: mol_type = other DNA
atgtctaacatggaaaagcacttgttcaacttgaaattcgctgctaaggagctatcaagatcagccaagaagtgcgacaaagaggaaaaggccgaaaaagcgaaaatcaaaaaggccattcagaaagggaacatggaagttgcccgtattcacgcagaaaacgcaattagacagaagaaccaagcagtcaattttctgcgcatgagtgcacgagtggatgccgttgcggcacgggtgcagactgctgtaactatgggcaaagtgaccaagtcaatggcaggtgtggtcaaaagtatggacgcaaccctgaaaactatgaatttggagaaaatatccgcattaatggataagttcgagcaccagtttgagacactcgacgtacagacccagcagatggaggacacaatgagctctaccacaaccctcactaccccacaaaaccaagtcgacatgctattacaggagatggctgacgaggctggattggatcttaatatggagctccctcagggccagactggtagcgtgggcacttctgtggcaagcgctgaacaggacgagctttcccagagactggccagactgcgagatcaggtctag

SEQ ID NO: 217957 - DNA, 669 bp, synthetic construct
  misc_feature 1..669: note = Description of Artificial Sequence: Synthetic coding sequence
  source 1..669: mol_type = other DNA
atggatcttctttttggcaggcgaaagacacccgaggaactgctccggcagaaccaacgcgctttgaacagagccatgcgggagctggacagagagcgccagaaactggagacgcaagaaaaaaagatcatagccgacataaaaaaaatggccaaacagggacagatggacgccgttaggatcatggccaaggacctggtccgaaccaggcgttacgttcgcaaattcgtgttgatgagggcaaacatccaggcagtctccctgaagattcaaacactgaaatccaataactcgatggcccaggctatgaagggggtgaccaaggccatgggaacgatgaatcggcagctgaagctcccacagattcagaagattatgatggagtttgagcggcaggccgaaatcatggatatgaaagaggaaatgatgaatgacgctattgacgacgcgatgggagatgaggaggatgaggaggagtcagatgctgttgtttcacaggtgctcgacgaactgggtctgagtctgactgacgagctgagcaatcttcctagcaccggaggctctctgtcagtagcagccggaggcaaaaaagcagaagccgctgcctccgccctagcggacgctgatgcagacctggaagagcggctcaagaacttacgcagggactag

SEQ ID NO: 217958 - DNA, 669 bp, synthetic construct
  misc_feature 1..669: note = Description of Artificial Sequence: Synthetic coding sequence
  source 1..669: mol_type = other DNA
atggacctgctcttcggccgtcgaaaaacaccggaagaacttttgcgccaaaaccagcgagcccttaatcgcgctatgcgcgagctcgaccgtgaacggcagaaactagagacacaagagaaaaagatcattgctgatatcaagaagatggccaaacagggccagatggacgcagtgcgcattatggctaaggacctagtcaggactcgaagatacgttaggaaattcgtgttaatgcgagcaaatatccaggctgtgtccctaaagattcagacgctgaagagcaataattccatggcgcaggccatgaaaggggtgaccaaagcgatgggcactatgaaccggcaattgaagttaccccagatacaaaaaataatgatggagttcgaacgacaggcagagattatggacatgaaggaagagatgatgaatgacgcaatagacgatgctatgggagacgaggaagacgaggaggagtctgacgctgtagtgagtcaggtcctggatgagctcggactctctctgacagatgagctgtctaacctgcctagcacgggaggcagcttgagtgtcgccgcaggcggtaaaaaagccgaggctgcagccagtgccttggctgatgcagacgcagacctggaagaaaggctaaaaaatctacgcagagattag

SEQ ID NO: 217959 - DNA, 642 bp, synthetic construct
  misc_feature 1..642: note = Description of Artificial Sequence: Synthetic coding sequence
  source 1..642: mol_type = other DNA
atggccagcctgttcaaaaaaaagacggtggacgacgtgatcaaagaacagaaccgggaactgcgtggcactcaacgcgctattatcagggatcgcgctgcactagaaaagcaagagaagcagttagaactggagatcaaaaaaatggccaaaatcggcaacaaagaggcctgtaaagttttagccaagcagttggtgcatttgagaaaacagaaaacacggacgtttgcagtcagctccaaggtgaccagtatgagtacccagacgaaggtgatgaatagtcagatgaaaatggctggggctatgtctacaaccgcaaaaaccatgcaggctgtcaacaagaagatggacccacagaagacattgcaaactatgcagaattttcaaaaagaaaatatgaaaatggagatgactgaggagatgattaacgatactctagacgacatattcgacggtagtgatgacgaggaagagagtcaggatattgtgaaccaggtcctggatgaaattggaattgagatctcagggaaaatggccaaagcgccaagtgccgctagaagtctgccaagcgcaagcacttcaaaagcgacgatctccgatgaggaaattgagagacagttgaaggccctgggtgtcgactag

SEQ ID NO: 217960 - DNA, 519 bp, synthetic construct
  misc_feature 1..519: note = Description of Artificial Sequence: Synthetic coding sequence
  source 1..519: mol_type = other DNA
atggagttggaaatcaaaaagatggccaagattggtaataaagaagcctgcaaggtcctcgccaagcagctcgtgcacctccgaaagcaaaaaaccaggaccttcgcagtgtcctcgaaggtgacctccatgagtacgcaaactaaagtcatgaactcccaaatgaaaatggccggagccatgtccaccaccgcgaaaaccatgcaggcggttaataagaaaatggacccgcagaagaccttgcagaccatgcaaaactttcagaaggagaacatgaaaatggagatgaccgaagaaatgatcaatgacactctggacgatatcttcgacgggtccgacgatgaagaagaatctcaggatattgtcaatcaggtactggacgaaattgggattgagatctctgggaaaatggcaaaggcaccaagcgcagctcggagtctgccaagcgcgagtacttccaaagctaccataagcgacgaggagatcgagcgacagcttaaggctctgggggtggattag

SEQ ID NO: 217961 - DNA, 669 bp, synthetic construct
  misc_feature 1..669: note = Description of Artificial Sequence: Synthetic coding sequence
  source 1..669: mol_type = other DNA
atggggttgtttggcaagacccaggaaaagccacctaaggagctggtcaacgaatggtccctcaagatcagaaaggaaatgagagtagtggatagacagattagggatattcagcgcgaggaggagaaggtgaagcgctcggttaaggacgccgctaagaagggccaaaaggacgtctgcatcgttctggctaaagagatgatccgctcacgcaaggctgtgtcgaaactttacgcctctaaggcccatatgaactctgtgttgatgggcatgaaaaaccagctagccgtcttacgagtggccggttcactccagaagtccaccgaggttatgaaagctatgcaatccttagtgaagattccagagattcaagcaaccatgcgtgagctgagtaaggagatgatgaaagctggcatcatcgaggaaatgctggaagacactttcgagtcaatggacgaccaggaagaaatggaagaagaggcagagatggaaatcgacaggatactgtttgagattactgctggcgcactgggtaaagcccctagtaaagtcaccgatgccttgcctgagcctgagccacctggagcaatggctgcatcggaggatgaagaggaggaagaggaggcactggaagcgatgcagagtcgactggcaaccctacgctcatag

SEQ ID NO: 217962 - DNA, 471 bp, synthetic construct
  misc_feature 1..471: note = Description of Artificial Sequence: Synthetic coding sequence
  source 1..471: mol_type = other DNA
atgatcaggtcacggaaagccgtctccaaactctatgccagcaaagcccatatgaacagtgtgttaatgggtatgaagaaccagttagcagtcctgagagtggcaggcagtctccagaaatccacagaagttatgaaagccatgcaatccctggtgaaaataccggaaattcaggctactatgagggaactcagtaaggaaatgatgaaagccggaatcatagaggagatgctagaagatacttttgagagtatggatgatcaggaggaaatggaggaggaggccgaaatggaaattgaccgaatcttatttgaaattacggcaggggcactcggaaaagcacccagtaaagttacagacgctctccccgaaccagaacctcctggagccatggcggcttcagaagatgaggaggaagaagaagaggccctcgaagccatgcagagccgcctggccacgctgagatcctag

SEQ ID NO: 217963 - DNA, 756 bp, synthetic construct
  misc_feature 1..756: note = Description of Artificial Sequence: Synthetic coding sequence
  source 1..756: mol_type = other DNA
atggagggcgaactttattctgcactgaaggaagaggaagcctccgagagcgtttccagcaccaactttagcggcgaaatgcatttctatgaactggttgaagatacaaaggatggcatttggctggtgcaggtaaatgagtggtcactgaaaataaggaaggagatgcgggtggtggaccggcagattcgagatattcagagagaggaagagaaggtgaaacgctcagttaaggacgctgccaaaaaaggacagaaagatgtttgtatcgtgctcgccaaagagatgattagatcacgcaaggcggtaagcaagctgtacgccagtaaagcacacatgaattcagtcctgatggggatgaaaaaccagctggcagtactgagggtcgccggatctcttcagaagtccacggaggttatgaaggccatgcagtctctggtgaagattcccgagatccaggccaccatgagggaactgtctaaggaaatgatgaaagccggaatcatcgaggagatgcttgaagacacattcgagtcaatggatgaccaggaggagatggaagaggaagccgagatggaaatcgaccggatacttttcgaaattactgccggtgccctcggcaaggcacctagcaaagttactgacgcactccccgaacccgagccccctggcgcaatggcagcgtctgaggacgaagaggaggaagaggaggcactggaggccatgcagtcccggctggctaccctcaggtcttag

SEQ ID NO: 217964 - DNA, 549 bp, synthetic construct
  misc_feature 1..549: note = Description of Artificial Sequence: Synthetic coding sequence
  source 1..549: mol_type = other DNA
atgggcctattcgggaaaacacaagaaaagcctccgaaggagctggtgaatgagtggagcctcaagatccgtaaggagatgcgcgtcgtggatcgccaaattcgggatattcagcgtgaagaggagaaggtgaagcgctcggttaaggatgctgcgaagaaagggcagaaagatgtatgtatcgtactggcgaaagaaatgatccgctcgcggaaggccatgcagtccctcgttaagattcctgaaattcaggcaacaatgagggagttgtcaaaggagatgatgaaggccggtatcatcgaggaaatgctcgaggacacatttgagtccatggacgatcaagaagagatggaggaagaggcagagatggaaatcgaccgcatcctgtttgagattacagcgggtgctctaggcaaggcaccttccaaggtgacagatgcccttccagaacccgagcctcccggagccatggcagcatccgaagacgaggaggaagaggaggaggctttagaggcaatgcagtccagactcgctaccctgcgctcttag

SEQ ID NO: 217965 - DNA, 798 bp, synthetic construct
  misc_feature 1..798: note = Description of Artificial Sequence: Synthetic coding sequence
  source 1..798: mol_type = other DNA
atgtccaggcgcagaccagaggatggcctggggaaagccggaccctgcgttatgaggcaccatcccccaaggtctaaagccgaagtttggagaaccctgcgaggaggagggggtcgaggcgagcttgccatgagtggactgggtaggctgtttgggaaggggaagaaggaaaaggggccaacacccgaggaggccatccagaagcttaaagaaaccgaaaagattctcattaagaaacaggaatttctcgagcagaaaattcaacaagagctacagactgccaagaagtatgggaccaaaaacaagagggctgctcttcaagctttgagacggaagaaacggtttgaacagcagctcgcccagacagacggcaccctgtctacgcttgagttccagcgtgaggcgattgaaaacgctacaactaacgcagaggtattaaggaccatggagctcgccgcacagtccatgaagaaggcctaccaggatatggacatagacaaagtcgacgagctgatgacagacattacagaacagcaggaggtggcacagcagatcagcgatgctatctctcgccctatgggcttcggtgacgacgttgatgaggacgagctgttagaagaactcgaagaactcgagcaggaagagctggcccaggagttgctgaacgtgggagacaaggaagaggagccttcggtgaagctcccttctgttcctagcacacatctcccagccggacccgcaccaaaggtcgacgaggacgaggaggcgttaaaacaacttgccgagtgggtttcttag

SEQ ID NO: 217966 - DNA, 378 bp, synthetic construct
  misc_feature 1..378: note = Description of Artificial Sequence: Synthetic coding sequence
  source 1..378: mol_type = other DNA
atggccggaccttctctggcctgttgtctcttgggcctgcttgccctgacttctgcttgttatatccagaactgccccctgggcggaaagagggccgctcctgatttggacgtccggaagtgcctgccctgtgggccaggaggtaagggaaggtgctttggcccaaatatatgttgtgccgaggagcttgggtgtttcgtaggtacagccgaggccctgcgctgccaggaggaaaattacttacctagcccctgccagagtgggcagaaagcctgtggcagtggtggccgatgtgccgtcctggggctctgctgttctccggatggttgtcatgctgatccagcctgcgacgcagaggcgacatttagccagagatag

SEQ ID NO: 217967 - DNA, 831 bp, synthetic construct
  misc_feature 1..831: note = Description of Artificial Sequence: Synthetic coding sequence
  source 1..831: mol_type = other DNA
atggctccaccccctgcccctctgcttgcccctcgccctggggagactcgaccaggctgtaggaagccaggaactgtctcatttgcagatgttgccgtatacttttcacccgaagagtggggctgcctgagaccagcacagcgcgctctctatagggacgtaatgcaggagacatatggccatttaggggcacttgggtttcctggcccaaagcctgcactgatttcatggatggaacaagagtccgaagcttggagtccggcagctcaagaccccgaaaaaggcgaaagactaggaggagctcggaggggtgatgtgcccaatcgtaaggaagaggagccagaagaagtgccaagggctaagggtcctagaaaagcacccgtgaaggaatccccggaggtgctagtggagaggaatcccgaccccgcaatcagtgtggctcctgctagggcacagccccctaaaaatgcagcctgggaccccacgaccggcgcacaacctccagcccctattccttcaatggacgctcaggccggtcagaggcgccatgtctgcaccgactgtggcagaagatttacctaccccagcctgttggtaagtcatcgcagaatgcacagcggagaaagaccatttccctgtcccgagtgtggaatgaggtttaaaagaaaattcgccgtggaggctcaccagtggatccatcggagctgttccggtggaaggcgcggacgacgccctggcatccgtgcagtaccacgcgcaccagtgcgcggagatcgcgacccgccagtcttgtttcgccactatcctgatatttttgaggaatgcggatag

SEQ ID NO: 217968 - DNA, 516 bp, synthetic construct
  misc_feature 1..516: note = Description of Artificial Sequence: Synthetic coding sequence
  source 1..516: mol_type = other DNA
atgaatcgactatttggcaaagccaagcccaaagcccctcctcctagtctcacggactgcattggaacagtggattctcgcgcagagagcattgataagaagatcagcaggcttgacgccgaactggtcaaatacaaagatcagatcaaaaaaatgagagagggtcctgctaagaacatggtgaaacagaaggcattacgtgtactgaagcaaaagcggatgtatgagcagcagcgggataatctggcgcagcaaagcttcaacatggagcaagccaactacactattcagtccctgaaggacactaaaacgacagtagatgcaatgaaactgggcgtgaaagagatgaaaaaggcttacaagcaggtgaagatcgatcagattgaggatctgcaggatcagttggaggatatgatggaggatgccaacgagatccaggaagctctgtcccgcagttacggtaccccagaacttgatgaagacgaccttgaagccggttggagctctggaggatag

SEQ ID NO: 217969 - DNA, 606 bp, synthetic construct
  misc_feature 1..606: note = Description of Artificial Sequence: Synthetic coding sequence
  source 1..606: mol_type = other DNA
atgggcaacctcttcggcaggaagaagcagagccgcgtgaccgagcaagataaagccatcctccagctgaagcaacagcgcgataaattgcggcaataccaaaaacgcattgcccagcaactggaaagagaaagagctctcgccaggcagctgttgcgcgacggccgaaaagagagggcaaagctacttctgaagaagaaacggtaccaggagcagctgctggacagaacagagaatcagatctcctctttggaggccatggttcagtcaattgaattcacccaaattgaaatgaaggttatggaagggcttcagtttgggaatgaatgtttgaataaaatgcaccaggtgatgagcatcgaagaagttgagcgtatcctggatgagacgcaggaggccgtcgagtatcagcgccaaatcgacgaattgctcgccggaagttttacccaggaggacgaagatgccatcttggaagagctttccgccatcacccaggagcagattgaactgccagaggtgccatctgagcctctgcctgaaaagatccccgagaacgtacctgtaaaggcccgacccaggcaggccgagttggtcgcagccagctag

SEQ ID NO: 217970 - DNA, 1362 bp, synthetic construct
  misc_feature 1..1362: note = Description of Artificial Sequence: Synthetic coding sequence
  source 1..1362: mol_type = other DNA
atgtggtctcccgagagggaggccgaggctcctgccggaggagacccagccggtttacttcctccggagtgggaagaagacgaggagcggatgagctttctgttctccgctttcaagcgcagcagggaggttaactccaccgactgggactcaaaaatggggttttgggcacccctcgtgctgtcccactcacgaaggcagggtgtggtgcgtcttcgtctccgagacctccaggaggctttccagagaaaaggctccgtacctcttggcttagccaccgtactccaggatctgctccgcagaggcgagcttcagcgcgaaagtgactttatggcgtccgtggactcttcctggattagctggggggtgggggtttttctgttgaaaccactgaagtggacactcagtaacatgcttggcgacaacaaggtacctgcggaggaagttctggttgcagtcgagttgctaaaggaaaaggccgaggaagtgtacaggctgtatcagaatagtccactgtcaagtcatccagtggtcgcgcttagcgaacttagcaccctgtgcgcgaatagctgtcccgacgaaagaaccttttaccttgtgttgctccagcttcagaaggaaaagcgcgtcactgtactcgagcagaatggcgaaaagattgtcaagtttgccagagggccaagggctaaggtgtcacccgtgaacgatgttgacgttggcgtgtatcagctgatgcaatcagagcagctattgtcccggaaagtcgagagcctgtctcaagaggcagaaaggtgtaaagaagaagcaagaagggcctgcagagcaggcaaaaagcaactggccctgcgaagtctgaaggccaaacaaaggactgagaaaaggatagaggccctacacgctaaactcgatacagtgcagggtattttggataggatttacgcttcacagaccgaccagatggtgttcaacgcctatcaggccggagtgggagccctgaagctcagtatgaaggacgtcacagtcgagaaggcagaatcactggtcgatcaaatccaggagctttgtgatacacaggatgaggtatcccagaccctggcgggtggggtcaccaacggactggacttcgacagtgaggaactggaaaaggaactagacatcctgctacaggacactaccaaggagcctctggatcttcctgacaaccctaggaatagacacttcacaaacagtgtacctaaccctcgaatcagtgacgcagaactggaagctgagctcgagaaactttctttaagcgagggcggtctggttccttcctctaagtcccctaaaaggcagttagagcccactctgaaacccttgtag

SEQ ID NO: 217971 - DNA, 1362 bp, synthetic construct
  misc_feature 1..1362: note = Description of Artificial Sequence: Synthetic coding sequence
  source 1..1362: mol_type = other DNA
atgtggagtcccgagcgcgaggccgaagcgcctgcagggggagaccccgctggtctcctgccacctgaatgggaggaggatgaggaaagaatgtcatttctgtttagcgcctttaagcggtctagagaagtgaattcaactgactgggacagtaagatgggcttctgggcgcctctggtactctcacatagcagacggcagggcgtggtgaggctgaggctgcgagacttgcaggaggctttccagcgaaaaggatctgtgcccctcggtctggctacagttcttcaagatctactgagacggggagaattgcagcgggagtctgatttcatggcttcagtagactcgtcctggatctcgtggggagtaggcgtgtttctgctaaagcctttaaaatggacgctcagtaatatgttgggcgataataaagtgcctgccgaggaggtgctagtcgccgtcgagctgctgaaggagaaggccgaagaggtgtacaggttgtatcagaacagcccactgtccagccacccggtggttgccctctcggagttgtctacgctgtgcgccaactcttgtccagacgagcgaacattttatctggtgctgctccagttgcagaaggaaaagcgcgtcaccgttttagaacagaatggggaaaagatcgtgaaatttgctaggggacccagggcaaaggtgagccccgttaacgacgtggacgtgggagtctaccagctcatgcagtctgagcagctgctgagtagaaaggtcgagagtctgtcacaggaggctgagagatgcaaagaggaggccaggcgtgcatgccgagcaggcaagaagcagctcgcacttaggtcccttaaggccaagcagagaacagagaaaaggattgaggcgttacacgcaaagctggatactgtgcagggcatccttgatcgcatctatgcctctcagacagaccagatggtattcaatgcataccaggccggagtgggggctctgaagctttccatgaaagacgtcactgtcgaaaaggctgagtccctcgtagaccagattcaagaactttgcgatactcaggatgaagtaagtcagacacttgccggaggtgtcacaaatggtcttgattttgactctgaagagttagagaaagaactggacattttactccaagacaccaccaaggagcctctcgaccttccagacaaccctagaaacaggcactttaccaactccgttcctaatcccagaatcagcgatgccgagttagaagcggagcttgaaaagttgagcctttctgagggcggactggtgccttcttctaaaagtccgaagagacagctagagcctactctgaagcccctatag

SEQ ID NO: 217972 - DNA, 1992 bp, synthetic construct
  misc_feature 1..1992: note = Description of Artificial Sequence: Synthetic coding sequence
  source 1..1992: mol_type = other DNA
atggagaggcctgaagaaggcaagcaatcacccccaccacaaccgtggggccgtttgctgcggctcggtgccgaggagggcgaaccacacgtcttgcttcgcaagcgcgaatggactatcgggagacgacgtggttgcgatttgagcttcccctccaacaaactggtatcaggcgatcattgcagaatcgtagtggatgagaagtccggacaagtgaccctggaggatacgtcgacctctggcaccgtgataaacaaactcaaggttgtaaaaaaacagacatgcccacttcagaccggcgacgtaatatatttggtttaccgcaaaaatgagcccgagcataatgtggcttacctttatgagtctctgagcgaaaaacaagggatgacccaggagtcttttgaggccaacaaagagaacgtatttcacggcacgaaggatacatccggcgcaggagctggcagaggcgcagacccacgtgtccccccaagtagtccggcaactcaggtgtgcttcgaggaaccgcaacccagtactagcacatcggatctgtttcccaccgctagcgcaagctcaacggagcctagccctgctggtcgagagaggtcttcgtcctgcggctcaggtggcggtggcatttcacccaaaggctcaggcccatccgttgccagcgacgaggttagcagtttcgcctctgctctgcctgatagaaaaacagcaagtttctcttccttggaacctcaggaccaggaggatctagagcccgtgaagaagaagatgcgtggagacggagatctggacctgaatggccagctgctcgtggctcaaccacgtcggaacgctcagaccgtccatgaagacgtaagggccgctgcaggcaagcctgataaaatggaagaaacccttacttgcatcatttgtcaggacctcctccatgactgcgtctccttgcaaccttgcatgcacacattttgcgctgcctgctactccggctggatggagcgttcttcactgtgcccaacctgtagatgtccagtggagaggatctgcaagaaccatatccttaataacctagtagaggcctatctcatccagcatcctggaaattcccgcagtgaggaggacgtacagagtatggatgcacgcaataagataacgcaggatatgcttcagccaaaagtgcggaggtctttctctgatgaagagggctcatctgaagatctgctggagctgtccgacgtggattccgagtcaagcgatatatcccagccgtacgtcgtgtgcagacagtgtcccgaatatcggagacaggcagcccagcccccacattgtccggctcccgagggagaacctggggctccacaggctctgggggacgctccttccacctcagtgtccttgactactgttcaggactacgtttgcccattacagggaagccatgccttgtgcacttgctgcttccaaccgatgccagaccgccgagccgagcgagagcaggatcctcgggtcgcacctcagcagtgcgccgtctgccttcagccattttgtcacctatactgggggtgtacgaggaccggttgttatgggtgtctggccccattctgtgaactgaatctgggggataagtgcctggacggtgttctgaacaataactcgtacgagagcgatatactcaagaattatttggcaacccgtggcctaacatggaagaacatgcttaccgaatccctggtggcgttgcagaggggtgtttttcttctctcagattacagggtgactggggatacggtgctatgttattgctgcggcctccgctccttcagagagctcacgtatcaatatcggcagaatatcccggcatctgagctgcccgtcgccgtgacctctcgccctgattgttactggggcaggaactgccgcacgcaggtgaaagcccatcacgcaatgaagttcaatcacatttgtgaacagaccagatttaagaactag

SEQ ID NO: 217973 - DNA, 1872 bp, synthetic construct
  misc_feature 1..1872: note = Description of Artificial Sequence: Synthetic coding sequence
  source 1..1872: mol_type = other DNA
atggagcggccagaagaggggaaacagagtcctccaccccaaccctggggcagactcctgagactgggggctgaggagggagaaccccatgtccttcttcgtaagagggagtggacaatcggcagaagaagaggctgcgacttgtcattcccctccaacaagctggtcagcggcgaccactgtaggatcgtggtggacgaaaagagcgggcaggtcacactcgaggacacatccacttccggcacagtcattaataaactgaaagtggttaagaaacagacatgtcccctgcagaccggagacgtcatttatttagtctatcggaagaatgaaccggagcacaacgttgcttacctgtatgagtctctgagcgaaaaacaagggatgacccaggaatcttttgagatggtgccctgttgcgttgctcaggctggactcaagctcctcggcagctcagacccccctacactggctagtcagtctatcgtcatcaccgggtccggcggaggcggtattagtcccaagggttccgggcctagcgttgcatccgatgaggtgagtagcttcgcatccgcgctacctgataggaagaccgcttctttctcaagcctcgagccccaggaccaggaagatttggagccagtcaagaagaagatgcggggagacggagatctagacctgaacggtcagttacttgttgcgcagccccgaagaaacgcccagacggtacacgaggatgtgagagcagcagctgggaaacctgacaagatggaggaaaccctaacatgcattatctgtcaggatttgctccatgactgtgtgagtctccagccatgcatgcacaccttctgtgccgcatgttattctggatggatggagcggtccagtctctgccctacctgtcggtgcccagttgagagaatttgcaagaatcacatactaaacaatctggttgaagcttatctgattcagcacccggataaatcacggtcagaggaggacgtgcagtctatggacgctaggaacaaaattacgcaggacatgctgcagccaaaggtcagacgttctttctctgacgaagaggggtccagcgaggatttgctggagcttagtgacgtcgactcggaaagcagcgacattagccagccttacgttgtgtgccgacagtgtccggagtaccggagacaggcggctcagccaccacattgcccggctcccgagggagaacctggtgcaccccaagccttgggcgatgccccaagcacatccgttagcctgacaactgccgtgcaggattatgtatgccctttacagggaagtcatgccctgtgtacttgttgctttcagccaatgcccgatagaagagctgaacgtgagcaggaccctcgcgtggctccacagcagtgtgcagtctgcctgcaaccattctgtcacctttattggggatgtaccaggacaggatgctacgggtgcctagcacctttttgcgagttgaatttaggagacaagtgtctggacggcgtcctaaacaataatagttacgagagcgacattctgaagaattatctggctacaaggggactgacctggaagaatatgcttacagagtcactggtggcgctgcagcggggagttttcctcttgtcagattaccgggtgacaggagataccgtgttatgctattgctgcgggttgcgctcctttcgggaactcacgtatcagtataggcagaacattccagcctccgagttgcctgtggccgttactagccgccctgactgctattgggggagaaattgccgaactcaagttaaagcacaccatgcaatgaaatttaatcacatctgcgagcagacgcgttttaagaactag

SEQ ID NO: 217974 - DNA, 1995 bp, synthetic construct
  misc_feature 1..1995: note = Description of Artificial Sequence: Synthetic coding sequence
  source 1..1995: mol_type = other DNA
atggagcgcccagaggaaggaaaacaaagtcctccaccgcagccatggggacgactgctgagactcggtgccgaggagggtgaaccccatgtcctcctccggaaacgggaatggactatcggaaggcgccgaggctgcgacctgtcttttccgtctaacaagctagtgtctggggatcactgcagaattgtcgttgatgaaaagtcagggcaggtcacattggaggatacttcaaccagtgggaccgtgattaataagctcaaagtggtgaaaaaacagacatgtccgctgcagactggcgacgtgatttacctcgtatataggaagaatgaaccggagcacaacgtggcctacctatacgagagtctgagcgagaaacaggggatgacccaagaaagttttgaagccaacaaggaaaatgtgtttcacgggactaaggataccagcggagccggtgccggtcgcggagcggaccctcgtgtgcccccaagctcacctgccacacaggtgtgctttgaagaacctcagccttcaacctcgacctctgacctgttcccaacagcatctgcttcttcaactgagccctcccccgctggcagggagcgctcaagtagttgtgggagtgggggaggcggaatttctccaaaggggagtggaccctcagtggcctccgacgaggtatcctcttttgcatccgcactcccagacaggaaaaccgccagtttttcttcactggaaccacaagaccaagaggacctggagccagtgaaaaagaagatgagaggggacggcgatcttgatctgaatgggcagctgctggtggcacagcctcgccgaaacgcacaaaccgtgcatgaagacgttcgagctgcggcaggcaagcccgacaagatggaagagactcttacctgtattatctgccaggacctgttgcatgactgcgtgtcattgcagccttgcatgcacaccttttgcgcggcttgttattcaggatggatggagcgctctagcttgtgtccaacttgtagatgtcccgtcgagcgaatctgcaaaaaccatattctgaacaatcttgtcgaggcatatttaatacagcatccagacaaatcccggtccgaagaagacgtgcaaagcatggatgccagaaacaagatcacgcaggacatgctgcagccaaaagtgaggaggagcttctcggacgaagagggctcatccgaagacctgctggagctatctgatgttgactccgagtcttccgatattagccaaccctacgttgtttgccgccagtgccctgagtatcgcaggcaggccgctcagccacctcactgccctgctcctgaaggcgagccgggagcgcctcaggccttaggtgatgcccctagtacttcagtgtcgcttacaacagctgtccaggattatgtttgcccgttgcaggggtctcacgctctgtgtacctgttgtttccagcccatgcccgaccgccgtgccgaacgggagcaagatcccagggtagccccacagcagtgtgcagtgtgtttgcaaccgttctgtcacctgtactggggctgcacccggaccggatgttacggctgcctggctccgttttgtgagctgaacctgggagacaaatgtctggacggcgtgctgaataataatagctacgaatccgacattcttaaaaattacctcgcaacccgaggccttacttggaaaaacatgcttacagagtcgcttgtcgccctgcagaggggagtttttctgctatctgactatcgagtgaccggcgacacggtgctttgctactgttgtggccttcgttcattcagggaactaacataccagtaccgccagaatattcccgcatccgagttgccggtggccgtgacaagtagaccagattgctactgggggagaaattgccgaactcaggtgaaggcacatcatgctatgaagttcaaccacatctgcgaacagactcgctttaaaaattag

SEQ ID NO: 217975 - DNA, 1959 bp, synthetic construct
  misc_feature 1..1959: note = Description of Artificial Sequence: Synthetic coding sequence
  source 1..1959: mol_type = other DNA
atggaaaggccggaggagggaaaacaaagtccccctccccaaccctgggggaggctactccgccttggtgccgaggagggagaacctcacgtgctgctgcgcaaacgagagtggaccatcggacgcaggcgcggatgcgaccttagcttcccgtccaataaattggtttctggcgatcactgtcgcatcgtagtggacgaaaaatctggccaggtgactcttgaggatacctctacctccgggacggtcatcaacaagctcaaagtcgtcaaaaaacagacctgccctttgcagactggcgacgtgatttacctcgtatatagaaaaaatgagcccgagcacaacgtggcctatttgtacgagagcttgtccgagaagcagggaatgacccaggaatcgtttgatacttctggcgcaggcgctgggaggggagccgacccgagggtgccaccgtcttcccctgccacccaggtatgtttcgaggagcctcagccgtctacatctacctccgatctcttcccaaccgcttccgcatcttctaccgagccttctcctgcgggtcgggagcggtccagtagttgcggatctggtggtggaggcatctctcccaaaggctccggcccaagcgtcgcttccgacgaagtctcctcctttgctagcgcactgcctgaccgtaaaacggctagcttcagcagtttggagccacaggaccaggaagacttagagccggtgaaaaaaaagatgagaggagacggagatctcgatttgaatggacagctgttggtggcacagcctaggcgaaacgctcagaccgttcatgaggatgttagggccgctgctggaaagcctgataagatggaggaaacgctgacatgtataatttgccaagatctattgcacgactgtgtaagcctgcaaccatgtatgcatactttctgcgctgcatgctactcaggttggatggaacggagctcgttgtgtcctacatgtagatgtccagtcgagcgaatctgtaaaaaccacatcctgaacaacctggtcgaggcgtatctgatccagcatcctgataagtcccgctccgaagaggatgtacagtcgatggatgcgaggaataaaataacccaggatatgctccaaccaaaagtcaggcgtagcttcagtgacgaggaggggagcagtgaggacttgctggaattatcggatgtagactctgaaagctcagacattagccagccatatgtggtgtgtcgccaatgcccagaatatcgcaggcaggcggcacagccgcctcactgccccgcaccagagggcgagcctggggctccacaggccctcggagatgctcctagtacgagcgtgtcgcttaccacagccgtgcaggattatgtctgtcctttgcagggatcgcatgctctgtgtacctgttgctttcagccaatgcccgacaggcgggctgaaagggagcaagacccacgtgtcgctcctcagcagtgtgccgtgtgtctgcaacctttctgtcacctctattgggggtgcacacggaccggctgttatggatgtctggcacccttctgcgaactcaatctgggggataagtgtctggacggggtgctaaacaataattcatacgaatcagacatcctgaagaattacctggcaactagagggctcacttggaaaaatatgctgacagagagtcttgtggcacttcagcggggagtgtttttacttagcgattacagggtcactggggacactgttctgtgctattgttgtggactcagaagtttcagggagcttacctatcagtatcgccagaatatcccggcatctgagctgcctgttgccgtaacgtcacgtcccgactgctattggggcaggaactgccggacccaggtgaaggcccatcacgcaatgaaattcaaccacatttgcgagcagacacgcttcaagaattag

SEQ ID NO: 217976 - DNA, 672 bp, synthetic construct
  misc_feature 1..672: note = Description of Artificial Sequence: Synthetic coding sequence
  source 1..672: mol_type = other DNA
atggaaaggcccgaggaaggaaagcagtcacctccacctcaaccatggggtaggctgcttaggcttggcgcagaggaaggcgaacctcatgtgctgctaaggaagcgggaatggactattgggcgacgccgaggctgtgatctctccttccccagcaacaaacttgtgagtggcgaccactgcagaatcgtggtggatgaaaaatccggtcaagtgactttggaggacaccagtactagcggcactgttatcaacaaactgaaggttgttaaaaagcaaacatgcccattgcagacaggcgacgtcatctatctcgtgtaccgtaaaaacgagccagagcacaatgttgcatacctctacgaatccttatccgagaaacagggcatgacacaggagtcatttgatacttccggtgccggagcaggcagaggcgctgaccccagagtgccaccgtcgtcacctgccactcaggtatgtttcgaggagccacagcccagtacaagtacatcagacctgttccctactgcatccgcatcatcgacagaaccgtcacccgctggcagggaacggtctagttcttgtggctcgggaggtgggggaatcagcccaaaagggagtgggccaagcgtcgcctcagatgaggtgagttccttcgccagtgccttgccctag

SEQ ID NO: 217977 - DNA, 1050 bp, synthetic construct
  misc_feature 1..1050: note = Description of Artificial Sequence: Synthetic coding sequence
  source 1..1050: mol_type = other DNA
atgactcaagaatcatttggctctggtggtggaggcatatcacccaaaggttccggtccatctgtagctagcgatgaggttagctcatttgccagcgctctccccgacagaaagacagcatccttctcatcacttgagcctcaagatcaggaagacctggaaccagtcaagaaaaagatgaggggcgacggggacttagatttaaatgggcagttgctggtggcgcagcctcgccgaaatgcccagacagttcatgaggatgtccgagccgctgcgggaaagccagataaaatggaggaaaccctgacttgtatcatctgtcaggatcttctgcacgactgcgtctctttgcagccttgtatgcacacattttgtgcggcttgctacagtggctggatggaaaggagcagcttgtgcccgacttgtaggtgccccgtagaacgcatctgtaagaaccacatactgaacaatttggtggaggcctacctgatacagcacccggacaagtcgcgcagtgaagaagatgtacagtctatggacgctcgaaacaagatcacacaggatatgttgcagccaaaagtgcgccgatctttcagcgacgaagaaggcagtagcgaggacctcttggagctcagcgatgtggattccgagagctctgatatttcgcaaccatacgtggtctgtaggcaatgccctgaatatcgtaggcaagctgcgcaacccccacattgccccgctcctgagggtgaacccggtgccccacaggcgctcggggatgctcccagtacctccgtgagcctgacgaccgctgtgcaggactatgtgtgtcccttgcagggtagccacgctctgtgcacttgctgctttcagccaatgcctgaccggcgtgcagaacgtgagcaagatccgcgtgtagcccctcaacagtgtgccgtgtgccttcagccattttgtcacctttactggggatgtactagaaccggctgttacgggtgccttgctcctttctgtgtgagcgggagacaatgcttccctgccacaagtctctag

SEQ ID NO: 217978 - DNA, 1719 bp, synthetic construct
  misc_feature 1..1719: note = Description of Artificial Sequence: Synthetic coding sequence
  source 1..1719: mol_type = other DNA
atggagaggcccgaggagggcaaacaatcacctccacctcagccctggggaagactgttacgactgggcgctgaggagggagagccgcatgtcctgctacggaaacgcgagtggactataggcaggcgacggggttgcgacctatccttccctagtaataaattggtgtcgggtgatcattgcagaatcgtcgttgatgaaaagtctggtcaagtcacactcgaggatacaagcacctccggcaccgtgattaataaactgaaagtggtgaagaaacagacgtgcccattgcaaactggagacgtgatatatctggtttatcgtaagaatgaaccagaacatagatctgggggtggtggcatttcaccgaagggctccgggccaagcgtggccagcgacgaggtgtcctcctttgcttcggcactccccgaccgaaagaccgcttcttttagttcattagagcctcaggaccaagaagacctcgaacctgtcaaaaagaagatgagaggcgacggagatctagatctcaacggccagctcctggtggcccagccacgcaggaatgcccaaaccgtccatgaggacgtccgtgccgctgctggcaagcccgacaaaatggaggaaaccctgacctgcatcatttgtcaggaccttttacacgactgtgtgagcctccagccatgtatgcacacgttttgcgccgcatgctactctggctggatggagcgctcttcattgtgtcctacatgcaggtgtcccgtggagaggatttgcaaaaatcatatattaaataatctcgtcgaagcataccttatccagcatcccgataaaagccgatcagaggaagatgtccaaagcatggatgctcggaataagataactcaggatatgctgcagcctaaagtgaggagaagcttcagtgatgaggaaggctcatccgaggacctgctggaacttagcgacgtggactcagaaagcagcgacatatcccagccatacgttgtctgtcgtcaatgccccgagtaccgcagacaggccgcacaaccaccccattgccctgctcctgaaggcgagccaggcgcacctcaggcgctcggtgacgctcctagtacttccgtttctcttacgactgccgtgcaagactatgtgtgcccgctgcagggcagtcatgcgctctgcacctgttgtttccagcccatgccagatcgccgtgccgagagggagcaggacccgagggtggctcctcagcagtgcgccgtatgcttgcagccgttttgtcacctgtactggggatgtacccgtacaggctgttatgggtgcctagcccctttctgcgaactgaatctcggcgacaagtgcctcgacggagttctgaataataatagttacgaaagcgacattctaaagaactacctagccactcggggattgacctggaaaaacatgttaactgaaagcctcgtcgccctgcagaggggcgtgtttctgcttagcgactaccgcgtcactggagatactgttttgtgttactgctgtggattgcgatccttccgggagctgacctaccagtatcggcagaatatcccagcttctgaactgcccgtggctgtcacaagtagaccggattgttactgggggcgaaactgcagaacccaggtgaaggctcatcatgcgatgaagtttaaccatatatgtgaacagacaaggtttaagaactag

SEQ ID NO: 217979 - DNA, 345 bp, synthetic construct
  misc_feature 1..345: note = Description of Artificial Sequence: Synthetic coding sequence
  source 1..345: mol_type = other DNA
atgaggctgctgattctagctcttctgggtatctgtagtttgacagcctacatcgtggaaggagtgggctcagaagtttctgataagcgtacttgtgtttctctgaccacccagaggctgcccgtctcacggattaaaacatacaccatcacggaagggtcactgcgggctgtgattttcataactaagcgtgggctgaaggtgtgtgcagacccgcaggctacatgggtgcgagacgttgtgagaagcatggatcgcaaaagcaatacacgcaataacatgatacagacaaagcccactggaacccagcagagtaccaataccgcagttactttaactggctag

SEQ ID NO: 217980 - DNA, 345 bp, synthetic construct
  misc_feature 1..345: note = Description of Artificial Sequence: Synthetic coding sequence
  source 1..345: mol_type = other DNA
atgcgcctcttaatcctggccctgcttggcatctgctcattgacagcctatattgtcgaaggggtgggctcagaggtgtctcacaggcgtacgtgcgtaagtcttacaactcagcggcttcctgtatccaggatcaaaacctacacaattacagagggaagtctgcgggctgtaatatttattacaaagcgcggtctgaaggtgtgcgccgaccctcaagcgacttgggttcgtgacgttgtccgatctatggatcgtaagtcgaacactcggaataatatgatccagactaagccaacaggtacgcagcaaagcactaatacagcagtaaccctgacaggatag

SEQ ID NO: 217981 - DNA, 1002 bp, synthetic construct
  misc_feature 1..1002: note = Description of Artificial Sequence: Synthetic coding sequence
  source 1..1002: mol_type = other DNA
atggaatctagcgggaatccagaaagcactacctttttctactatgacttacagtcgcagccgtgcgaaaatcaggcctgggtgttcgctactctggccacgaccgtcttatactgcttagtctttctcctttccctagttgggaactcacttgtcctgtgggtattagtgaaatatgagagccttgagtcattgactaatatctttattctcaatctgtgcctgagtgacctggtcttcgcctgcctgcttcctgtgtggatttcgccttaccactggggatgggtgctgggagacttcctgtgcaaactgcttaatatgattttcagcattagtctctatagttccatattttttcttaccattatgaccatccaccgctaccttagcgtagtgtcccccttaagtaccttgagagttcctacactgcggtgccgtgttctggtgacgatggccgtttgggtcgcttcaatcctgtctagcatcttagataccattttccacaaagtcctgagctctggttgtgactactccgaattgacctggtacctcacaagcgtgtatcagcacaatctgttttttctgttgagtctggggataattctcttctgttatgtagaaatcctgaggacattgtttcggtcaaggtcaaaaagacgtcaccgcacagtgaaactcatcttcgcaatcgtggtcgcttatttcctttcctggggtccttataattttaccttgttcctacaaaccctgtttcgcacccaaatcatcaggtcatgtgaagctaagcagcagctggaatatgccttgctgatctgcaggaatctggctttctctcattgttgcttcaaccccgttctttatgtttttgtgggagtgaaatttagaacacatctaaaacacgtgctgcgacagttttggttttgccgtctccaagctccatcacccgcttcaatcccccactccccgggagctttcgcctacgagggcgcttctttttactag

SEQ ID NO: 217982 - DNA, 111 bp, synthetic construct
  misc_feature 1..111: note = Description of Artificial Sequence: Synthetic coding sequence
  source 1..111: mol_type = other DNA
atggagagcagcggaaatcctgagtctacaacatttttttattatgatctgcagtcccagccatgcgagaaccaggcttgggtgtttgccacattggctacaaccgtgtag

SEQ ID NO: 217983 - DNA, 1002 bp, synthetic construct
  misc_feature 1..1002: note = Description of Artificial Sequence: Synthetic coding sequence
  source 1..1002: mol_type = other DNA
atggagtcatctggaaacccagagtctacaacattcttctattacgatcttcaaagccagccctgtgagaatcaggcatgggtgtttgctactctggcaaccacagtgctgtactgtctggtgttcttgctgtccttggtggggaattccctggtcttgtgggtactggtcaaatatgagagcttagagagtctcactaacatcttcatacttaatctttgcctgagtgacctggtgttcgcatgcctcctgcctgtgtggatctcaccctaccattgggggtgggtcctcggcgactttctctgtaagctgctgaatatgattttcagtattagcctctactccagcatcttcttcctgactataatgaccatccaccgttacctgtctgtggtgtcaccgctgtctacattaagagtgcccacgctccggtgccgagttcttgtaacaatggccgtctgggtggcaagcatcctgtcaagcatcttagatactatcttccataaggtcttgagtagcggctgcgactacagcgagttgacctggtacttgacaagcgtgtaccaacacaacctcttctttcttctttctcttggcatcatattattctgctacgtcgagatcctccggaccctgtttcggtccagatctaagcgcaggcaccggacagtgaagctgatcttcgctatagtcgtggcttactttctgagttggggaccttataatttcaccctgtttctgcagactctgttccgtactcagatcatccggtcatgtgaggccaaacaacagctcgagtacgcactgctgatctgtcgtaacctggccttcagccattgctgtttcaaccccgtgctgtacgtgttcgtcggggtaaagttcaggactcatctgaagcacgtgttgaggcagttctggttctgtagactgcaggcgcctagtcccgcatcaattcctcacagccccggtgcctttgcctatgagggagcatctttctattag

SEQ ID NO: 217984 - DNA, 300 bp, synthetic construct
  misc_feature 1..300: note = Description of Artificial Sequence: Synthetic coding sequence
  source 1..300: mol_type = other DNA
atgaaggtgagtgccgcacttttatgtctgttgctgatggctgccaccttcagtccacaagggctcgcgcagcccgactctgtatcgatcccaatcacttgttgtttcaatgtcattaatcgaaagatcccaattcagcggctagagtcatataccaggatcactaatatccaatgcccaaaggaagccgtcatatttaagaccaaacgaggaaaggaggtgtgcgccgaccctaaagagaggtgggttcgggacagtatgaagcacctggaccaaatttttcagaatttgaaaccctag

SEQ ID NO: 217985 - DNA, 291 bp, synthetic construct
  misc_feature 1..291: note = Description of Artificial Sequence: Synthetic coding sequence
  source 1..291: mol_type = other DNA
atgcagatcatcaccactgctctcgtctgccttttgttggcaggaatgtggcctgaagacgttgatagtaaaagtatgcaggtaccattcagtcggtgctgttttagctttgccgagcaggagatccctctcagggcgattctctgctatagaaatacatcttctatctgctccaacgaggggctcatatttaagctcaagagagggaaagaagcttgcgcactcgacacagtgggatgggtacaacgccatcggaagatgctccgacattgcccaagcaagcgcaaatag

SEQ ID NO: 217986 - DNA, 282 bp, synthetic construct
  misc_feature 1..282: note = Description of Artificial Sequence: Synthetic coding sequence
  source 1..282: mol_type = other DNA
atgaagataagtgtcgcagcaatccctttttttctgcttatcacaatcgccctaggaacaaaaacagaatccagttcgcgcggaccatatcatcctagcgagtgctgttttacctacacaacgtataagatcccgcgtcaacgcattatggactactacgagaccaattcccaatgctcaaaacccggtatcgttttcatcacaaaaaggggacacagtgtctgtaccaacccatcagataagtgggtgcaggactatattaaggacatgaaggaaaactag

SEQ ID NO: 217987 - DNA, 330 bp, synthetic construct
  misc_feature 1..330: note = Description of Artificial Sequence: Synthetic coding sequence
  source 1..330: mol_type = other DNA
atgaagatcagcgtggcagccatccccttttttctgctgattaccattgcccttggtactaaaactgagagttccagccaaacaggcggaaagcctaaggtcgtgaaaatacaattaaagctcgtagggggtccctatcatcctagcgagtgttgtttcacgtacactacatacaagatccctaggcaacggattatggactattatgagactaactcccagtgtagtaaacccggaattgtatttatcacaaagaggggtcatagcgtctgcaccaacccttccgataagtgggtccaagactatatcaaggacatgaaagagaattag

SEQ ID NO: 217988 - DNA, 330 bp, synthetic construct
  misc_feature 1..330: note = Description of Artificial Sequence: Synthetic coding sequence
  source 1..330: mol_type = other DNA
atgaagatatcagtcgccgctatccccttcttccttttgataacgatcgctctgggtaccaagacagaatctagcagtcagacaggtggaaagcctaaggtcgttaaaatccaattgaaactcgtcgggggaccctaccacccttcggaatgctgcttcacgtacaccacctacaaaatccctagacagagaattatggactactatgaaacaaattcacaatgctctaagccaggtatcgtgtttatcacgaagaggggtcactccgtgtgtaccaatccctccgataagtgggtgcaggactacatcaaggatatgaaggaaaattag

SEQ ID NO: 217989 - DNA, 342 bp, synthetic construct
  misc_feature 1..342: note = Description of Artificial Sequence: Synthetic coding sequence
  source 1..342: mol_type = other DNA
atgaaggtgagcgtcgccgctctctcttgtttgatgctcgttgcagttttgggttcccaggcccaattcattaatgacgcggaaaccgagttaatgatgtcaaaattaccactggaaaacccagtcgtgctgaactcgttccattttgctgccgattgttgcacgagctacattagtcagtctatcccctgttctctgatgaaatcctacttcgaaactagctcagagtgcagcaagccaggagtgatcttcctgaccaaaaaaggaagacaggtctgcgcaaaaccttccgggcctggggtgcaggattgtatgaaaaagctgaagccatacagcatttag

SEQ ID NO: 217990 - DNA, 186 bp, synthetic construct
  misc_feature 1..186: note = Description of Artificial Sequence: Synthetic coding sequence
  source 1..186: mol_type = other DNA
taatgtacctcatatatatctcaaagcattccatgttctctgatgaaatcttactttgagacttcttctgagtgtagcaagcccggagtcatcttcctgaccaaaaagggacgtcaagtctgcgcgaagccaagcggtccgggagttcaggattgcatgaaaaagctgaaaccctactctatatag

SEQ ID NO: 217991 - DNA, 342 bp, synthetic construct
  misc_feature 1..342: note = Description of Artificial Sequence: Synthetic coding sequence
  source 1..342: mol_type = other DNA
atgaaagtttctgtagcagccctttcatgcctaatgctagtagccgtcctgggcagtcaggcacagttcattaatgacgccgagaccgagctcatgatgagcaagctgccccttgaaaaccctgtcgtgctgaacagcttccactttgccgctgactgttgcacgagctacatctcacagagtattccatgctccctgatgaagagctacttcgagaccagctctgagtgctccaagcccggagtgatatttctaacaaagaaaggcagacaagtgtgtgcaaagccctccggacctggagtccaggattgcatgaagaaactcaagccatattcaatttag

SEQ ID NO: 217992 - DNA, 342 bp, synthetic construct
  misc_feature 1..342: note = Description of Artificial Sequence: Synthetic coding sequence
  source 1..342: mol_type = other DNA
atgaaagtctcagtggccgcactttcttgcctgatgctcgtcgcagtgctcggatcgcaagctcagttcatcaatgacgcggagactgagcttatgatgtcaaagcttccgctggagaacccagtggtgctgaatagttttcacttcgccgctgattgctgtacgagctatatcagtcagtctattccctgctctcttatgaaatcatatttcgaaacctcctccgaatgctctaaaccaggggtaattttcttaaccaagaaaggtagacaagtgtgcgctaaaccttccggaccaggagtgcaggattgcatgaaaaaacttaagccttattctatctag

SEQ ID NO: 217993 - DNA, 363 bp, synthetic construct
  misc_feature 1..363: note = Description of Artificial Sequence: Synthetic coding sequence
  source 1..363: mol_type = other DNA
atgaaggtctcggaagcagcgttatctttgcttgtcttaattctgataatcacctcggctagtcggtcccagcccaaagtgcctgagtgggtgaacactccaagcacatgttgtctgaagtactacgaaaaagtcctcccacgcagactcgtggtgggttacagaaaagccctcaattgtcacctgcccgctattatctttgttacaaaacgaaatcgggaagtgtgcacaaatcctaacgacgattgggtgcaagagtacatcaaagatcctaacctcccactgttgccgactaggaatctgtcaaccgtgaagatcatcacagctaaaaatggacagccacagctgctgaacagccagtag

SEQ ID NO: 217994 - DNA, 1188 bp, synthetic construct
  misc_feature 1..1188: note = Description of Artificial Sequence: Synthetic coding sequence
  source 1..1188: mol_type = other DNA
atggcctggcgccatctgaagaaaagagcccaggatgccgttattattcttggaggcggaggcctccttttcgcttcttatctgatggcgaccggtgatgaaagattttatgctgagcaccttatgccgacattgcaggggctgcttgatcccgaatctgctcacagactggccgttcgcttcacctcgctaggcctgctgccccgtgcacggttccaggacagtgatatgctggaggtgcgagtgctcggccacaaatttcgcaacccggtggggattgctgctggcttcgacaaacacggcgaagcagtggacggcctttacaagatggggttcggctttgtggagatcgggagcgtcacccccaagccacaggagggaaatcccagaccccgtgtgtttcggttaccagaagaccaggctgtcatcaataggtatggctttaacagccacggactgtccgtggttgaacaccgcctgagagctcggcagcaaaagcaggccaaactcactgaagacgggttgcctttaggcgtaaatctcggaaaaaataagacaagtgtagacgccgcagaggattacgccgagggagtcagagttctggggccactcgccgattacctggttgtaaacgtgtcatcaccaaacacggcaggcctacggtccctgcagggtaaagcagagctgcggagactgctgaccaaggttcttcaggagcgcgacggactgcgccgagtgcacagacccgctgtgctggtcaagattgcacctgacctgacctcgcaggacaaagaagacatcgcgagcgtcgttaaggagcttggcatagatggactgattgttacgaatactacagtttctcggccagcagggctccaaggggcactacgtagcgaaaccggcggtttgagtgggaagcccctgcgcgatttaagcacccagacgattcgcgaaatgtatgcactgacgcaagggcgtgtgcccatcatcggtgtaggcggtgtcagcagtgggcaagacgctttggagaagatccgggctggcgcaagcctcgttcagctgtatactgccctgacgttttggggtccccctgtcgtaggcaaggtgaaaagggagttagaagcactcctgaaggagcagggcttcggcggagtgacggacgcaatcggcgcagaccatcggaggtag

SEQ ID NO: 217995 - DNA, 270 bp, synthetic construct
  misc_feature 1..270: note = Description of Artificial Sequence: Synthetic coding sequence
  source 1..270: mol_type = other DNA
atgaaaggattagccgcagcccttctcgtgctcgtctgcaccatggccctttgctcctgcgcccaagttgggactaacaaagagctctgttgtttggtgtatacgtcttggcaaataccccagaagtttattgtcgactattctgagacatcacctcaatgccctaagcctggagtgatattactcactaaacgtggcaggcagatctgcgcagatcccaataaaaagtgggtccagaaatacatctctgatttaaaactcaacgcctag

SEQ ID NO: 217996 - DNA, 297 bp, synthetic construct
  misc_feature 1..297: note = Description of Artificial Sequence: Synthetic coding sequence
  source 1..297: mol_type = other DNA
atggcactgcttttagccctgagtctgctggtgctttggacatcccccgcacccacactgagcgggacaaatgacgctgaggactgttgcctctccgttacccagaagcctataccgggatacattgttaggaactttcattacctgttgatcaaggatggctgccgggtgccagccgtcgtcttcactaccctgcggggaagacagctgtgcgcccctccagaccagccatgggtggagagaatcatacagcggcttcaacgtacgtcagctaagatgaaaaggcggtctagctag

SEQ ID NO: 217997 - DNA, 315 bp, synthetic construct
  misc_feature 1..315: note = Description of Artificial Sequence: Synthetic coding sequence
  source 1..315: mol_type = other DNA
atggctctactcctggccctgtctctcctggtgctgtggacctcccccgcacctaccttgtcaggaaccaatgatgcggaggattgctgcctgagcgtcactcagaagccgattcctggctatattgtccgcaactttcattatctgttaattaaggatgggtgtagggtgccggcagtggtgttcacgaccttgaggggccgacagctgtgcgcaccaccagaccagccctgggttgagcgaatcattcagcgactccaacgtacctccgccaaggcttctctcgctctgccaggccctgtcagcagcctgtag

SEQ ID NO: 217998 - DNA, 291 bp, synthetic construct
  misc_feature 1..291: note = Description of Artificial Sequence: Synthetic coding sequence
  source 1..291: mol_type = other DNA
atgtgttgtaccaagagtctgcttctggcagcgctgatgtccgttctcttactgcacctctgtggcgaaagcgaagcggcaagtaactttgattgctgtttggggtacactgacaggatcctccatcctaaatttatcgtcggttttactcgccaactggctaacgagggctgtgacattaacgctattattttccataccaaaaagaaactctctgtatgtgccaaccccaagcagacatgggtcaagtatatagtgcgcttattgagcaagaaagtcaaaaatatgtag

SEQ ID NO: 217999 - DNA, 288 bp, synthetic construct
  misc_feature 1..288: note = Description of Artificial Sequence: Synthetic coding sequence
  source 1..288: mol_type = other DNA
atgtgctgcacaaagagtttactactagcagcgctgatgagcgtactgctcctgcatctttgtggcgaaagtgaggccagtaacttcgactgttgcctggggtacaccgaccgcatcctgcatcctaagttcatcgtcggcttcacaagacagttggcaaatgaggggtgcgacattaacgccattatctttcacaccaagaagaaactgtctgtttgcgccaaccctaagcagacgtgggtaaagtatattgttcgcctgttatctaagaaggtgaaaaatatgtag

SEQ ID NO: 218000 - DNA, 405 bp, synthetic construct
  misc_feature 1..405: note = Description of Artificial Sequence: Synthetic coding sequence
  source 1..405: mol_type = other DNA
atggctcagtcgctcgcactgagcctcctcatactggtgctggccttcgggattccacggacacaagggtctgacgggggagcccaagactgctgtttgaagtattcccagcgcaagatccctgcaaaggtggtgcgctcctatcgaaagcaggaacccagcctgggctgcagtatccccgcaatcctgttcctcccacgtaaacggagtcaggcagaattgtgtgccgatcctaaggaactttgggtacagcagctgatgcagcatctggacaagacgccatcacctcagaaacccgctcagggctgcagaaaggaccggggagcttcaaaaaccgggaaaaaaggcaagggctcaaaaggctgcaagcggaccgagcgttctcagacacctaaaggtccatag

SEQ ID NO: 218001 - DNA, 375 bp, synthetic construct
  misc_feature 1..375: note = Description of Artificial Sequence: Synthetic coding sequence
  source 1..375: mol_type = other DNA
atggcacagtcgcttgctctgagcctgctaatattagtgttggcttttgggattccacggacacagggatccgacggcggtgcccaggactgctgccttaaatattcccagcggaaaattcccgctaaggtggtgcggtcgtaccggaaacaagaaccaagccttgggtgcagtatccctgcgattcttttcctgccaagaaagaggtcccaggcagagctgtgtgccgaccccaaagagctgtgggttcagcaacttatgcagcatctcgacaaaacaccttcccctcaaaagcctgcccagggctgtcggaaagaccgaggggctagtaaaaccggtaaaaaagggaagggatcaaaaggatgcaagaggtag

SEQ ID NO: 218002 - DNA, 549 bp, synthetic construct
  misc_feature 1..549: note = Description of Artificial Sequence: Synthetic coding sequence
  source 1..549: mol_type = other DNA
atggctgagttcccttctaaagtgtcaacccgtacgtcaagcccagcacagggggcagaggcctccgttagcgccctaagacctgaccttggttttgttagatcacggttaggcgcactaatgctgctccagctggtgcttggacttctggtctgggcccttatagcggataccccgtatcacctgtacccagcttatggatgggtgatgtttgttgcggtatttctgtggctggtgacaatcgtgttattcaatttatacctctttcagctgcatatgaagctgtacatggtcccatggcccctggttctgatgatctttaatatctcggctacagtgctctatatcaccgcattcatcgcttgcagcgctgccgtggacttgacaagcctgaggggaacgcgcccttacaaccagcgggctgcagcatccttttttgcatgtctggtgatgatagcctatggcgtaagtgcttttttcagctaccaggcctggagaggcgttggtagcaatgccgctacgtcccagatggctggtgggtatgcttag

SEQ ID NO: 218003 - DNA, 414 bp, synthetic construct
  misc_feature 1..414: note = Description of Artificial Sequence: Synthetic coding sequence
  source 1..414: mol_type = other DNA
atgaaagtgagtgtggccgcactctcttgtcttatgctggttaccgctttgggatcgcaggctcgcgtaactaaggacgccgagactgagtttatgatgtcaaagcttccactcgaaaaccctgttctcctagacatgttgtggcggaggaaaataggcccacagatgaccctgagtcatgcggcaggctttcacgccacttctgcggattgctgcatcagctatacacctcgatcaattccatgcagccttctcgagtcatactttgagacaaatagcgaatgctctaaaccaggcgtgatctttttaacgaagaaggggcgtcggttttgtgcaaatccttctgataaacaggtacaggtatgtgttcgaatgctgaaactcgatacaagaattaaaaccagaaaaaactag

SEQ ID NO: 218004 - DNA, 363 bp, synthetic construct
  misc_feature 1..363: note = Description of Artificial Sequence: Synthetic coding sequence
  source 1..363: mol_type = other DNA
atgaaagtcagtgtagccgctctgagctgcctcatgctggtaacagccttaggatctcaggctagggtcactaaggacgccgaaaccgaattcatgatgtccaagctgcccttggagaaccctgtcctcctcgataggtttcatgccacaagtgccgattgctgcatatcttacacgccacgatctatcccctgctccctgcttgagtcctacttcgagacgaactcagaatgctcaaaacctggggttattttcctgacgaagaagggccgacgcttctgcgcaaaccctagtgataagcaggtgcaggtctgtgtcaggatgctgaagctggacacgaggatcaagacccggaagaactag

SEQ ID NO: 218005 - DNA, 2862 bp, synthetic construct
  misc_feature 1..2862: note = Description of Artificial Sequence: Synthetic coding sequence
  source 1..2862: mol_type = other DNA
atggaagaacaggggcactccgaaatggaaatcattccttccgagtctcatccccacatccaactgctgaaatccaacagggagctgctggtgacccacatcagaaacacacaatgtctcgttgataacctcctcaaaaatgactatttttctgccgaagacgctgagatagtgtgtgcgtgtcccacacagccagacaaggttcgcaagattcttgacctcgtgcaaagtaaaggagaggaagtctctgagttttttttatacctacttcagcagctcgccgacgcatacgttgacttacggccatggctcctggaaattggatttagtcctagtctgctgactcagtctaaggtggtggtaaataccgatccggtgtccagatatactcagcaactccggcatcacctggggagggatagtaaattcgtcctatgctatgcccagaaggaggaacttctcctcgaggagatctacatggatactatcatggagctggtaggcttttccaatgaatctctgggctccctgaacagcctagcatgtctgctggaccatacaactggcatccttaatgagcagggtgagactattttcatcctgggggacgctggagttgggaagagtatgctgctgcagaggcttcagtctctgtgggccaccggcagacttgatgccggagttaagtttttttttcactttaggtgtcgcatgttcagttgctttaaggagagtgaccgattgtgtttacaagatctgctatttaagcattactgctaccctgagcgagatccggaagaggtgttcgcttttttgttgcgcttcccccacgttgctctgttcacatttgacggacttgacgaactgcattccgatctggatctcagcagggtgccggattcgagttgcccctgggagcccgctcaccctctagtgctgctggctaatctgctttccgggaagctgcttaaaggagctagcaagctcctgactgctagaacaggcatagaggtgccaagacagttcctgaggaagaaggtcctgctgcgtgggttctcaccttcacacctacgcgcttatgccagacggatgtttccagagagagctctgcaggaccgtctgctctcacaactcgaggctaaccctaatttgtgttccctctgtagcgttcccctcttctgctggattatttttagatgctttcagcacttccgtgccgcttttgaagggtcgccccagctacccgattgcacgatgaccctgaccgacgtgtttctgcttgtcactgaagtgcacctcaacaggatgcagccgtccagcctggtgcagcgcaacacacgcagcccagtggagaccctgcacgccggtagggataccctttgttccctggggcaagttgcgcacagaggcatggagaaatcacttttcgtgttcacacaagaagaggtgcaggcctcaggactccaggaaagggacatgcagctgggattcctgagggcactacccgagttggggccaggcggagaccagcaaagctacgagtttttccatctgactctccaggcatttttcaccgcgtttttccttgtgctagatgacagagtgggtactcaggagctgcttcgctttttccaggagtggatgccccctgcaggagctgccactacatcctgctatcctcctttcctgccttttcagtgtctccaggggtcgggacctgctcgcgaggacctctttaagaataaagaccacttccagtttaccaatttattcctctgcggactgctgtctaaggccaaacagaaattactaagacacctggtgccagccgcagccctgaggagaaagcgcaaggcgttgtgggcgcacctgttcagctcactgcgcggataccttaaatccctgcctcgggttcaggtcgagtcgttcaaccaggtgcaggctatgcctacatttatatggatgttgagatgtatctacgaaacacagtctcaaaaggtgggacagcttgctgccagggggatttgtgccaactatctcaagttgacatactgtaatgcctgtagcgccgactgctctgccctgagttttgttctgcaccactttcccaaacgactggctctagaccttgataacaacaatttaaatgactacggcgtccgggagctacagccatgctttagcaggctcactgttctgcgcctgtccgtgaaccaaatcaccgacggcggagtcaaagtgctgtcggaagagcttaccaaatacaagatagtaacctacctcggattgtataacaatcaaatcacagatgtgggagcgagatacgtgaccaagatcctggacgaatgcaagggtctgacacaccttaagcttgggaagaataagattacatctgaaggaggcaaatatcttgctctcgctgttaaaaactcaaaatccatctccgaggtggggatgtggggcaaccaggtgggtgacgaaggggcaaaagccttcgccgaagctctgcgcaaccatcccagtctgactaccctcagcctggcttccaacggcatctcgaccgaagggggaaaaagcctggccagggcactacaacagaacacatccctcgagattctctggctgactcagaatgaactgaacgatgaagtcgctgagagtttggctgagatgctgaaggtgaatcagacactgaaacacctgtggttaatccagaaccagattaccgcgaagggcaccgctcagttggccgacgcgcttcagtctaatactgggattacagaaatttgtcttaatgggaatttaatcaaaccagaggaagcgaaggtatatgaagacgaaaagcggataatttgtttctag

SEQ ID NO: 218006 - DNA, 360 bp, synthetic construct
  misc_feature 1..360: note = Description of Artificial Sequence: Synthetic coding sequence
  source 1..360: mol_type = other DNA
atggctggcctcatgactattgtgaccagcctgctgtttctaggagtgtgcgcacaccacataatacccactggaagtgtggtcataccgtcaccctgttgcatgttcttcgtctccaagcgcatccccgaaaacagggtcgtgtcgtaccagctgtcaagtaggtccacatgccttaaggcaggtgtgatttttaccacgaaaaagggacaacagttttgcggggaccccaagcaggaatgggtccagaggtacatgaaaaacctggatgctaagcaaaagaaggcttctccaagagctcgggctgtggccgtgaagggaccggttcagagatatcctggtaatcaaacgacctgttag

SEQ ID NO: 218007 - DNA, 450 bp, synthetic construct
  misc_feature 1..450: note = Description of Artificial Sequence: Synthetic coding sequence
  source 1..450: mol_type = other DNA
atgaatctatggctcctggcatgcctggtggccggattcctgggagcctgggcgcctgctgttcacactcagggcgtgtttgaagattgctgcctcgcctaccactatcccatcggttgggccgtcttgcgcagggcctggacttatcgtattcaggaggtgagcgggtcctgcaatctgccagccgctatcttctacttgcccaagaggcaccgaaaagtctgcggaaaccccaagtcccgcgaggttcagcgcgctatgaagctcctggacgccaggaacaaggttttcgccaagttgcatcacaatactcaaacatttcagggtcctcatgcagtcaagaaattgtcgtccggcaactccaagctttcgtccagcaaattttccaaccccatcagcagcagcaagcgtaacgtgtctctgctcatatctgcaaacagcggcctttag

SEQ ID NO: 218008 - DNA, 255 bp, synthetic construct
  misc_feature 1..255: note = Description of Artificial Sequence: Synthetic coding sequence
  source 1..255: mol_type = other DNA
atgaatctgtggctcctcgcgtgtttggtagccggttttctgggggcatgggccccagcagtccatacccagggtgttttcgaggattgctgtcttgcttatcactatcctatcggttgggctgttctgcgcagggcctggacatataggatccaggaggtatccggaagctgcaatctccctgcagccataagacctagttgttgtaaggaagtggaattctggaaactacaggtcatcattgttcaggtatag

SEQ ID NO: 218009 - DNA, 453 bp, synthetic construct
  misc_feature 1..453: note = Description of Artificial Sequence: Synthetic coding sequence
  source 1..453: mol_type = other DNA
atgaacctttggctcttggcttgtctggtggcagggttcctgggtgcatgggcaccagctgtgcatacacaaggagtgtttgaggactgctgccttgcctatcactacccaattgggtgggccgtgctcagaagagcttggacctaccggattcaggaagtgtccggctcttgcaatctacctgccgctatattttacctgcctaagcgccacagaaaagtatgcggcaacccaaaatctagggaagtccaacgcgctatgaagctcctggatgcaagaaacaaggttttcgcaaagttgcaccacaatactcagacttttcaagccggacctcacgctgtgaaaaagttgtcatctggtaatagcaaattgtctagctccaagttttcaaatcccattagcagcagcaagaggaatgtatcattgcttatttccgccaatagtggcctgtag

SEQ ID NO: 218010 - DNA, 285 bp, synthetic construct
  misc_feature 1..285: note = Description of Artificial Sequence: Synthetic coding sequence
  source 1..285: mol_type = other DNA
atgatgggtctgagtctggcaagcgctgtgctattggcatcattactgagtttgcatctcgggacagctacgagggggtctgatatttctaagacttgttgcttccagtattcacacaagcctctcccctggacatgggtccgtagttacgagttcactagtaactcgtgttctcagagagcggtgattttcaccacgaagcggggaaagaaagtgtgtacccacccacgcaaaaaatgggtccagaagtatatctctctcctcaagacgcccaaacagctctag

SEQ ID NO: 218011 - DNA, 285 bp, synthetic construct
  misc_feature 1..285: note = Description of Artificial Sequence: Synthetic coding sequence
  source 1..285: mol_type = other DNA
atgatgggtctgtccctggcgtccgcagtactcctggcgagtttactgagtttgcaccttggcactgctaccagaggatcggatatctcaaaaacttgttgctttcagtatagccacaaaccgctgccatggacatgggttcggagctatgagtttacctctaattcgtgtagccagagagcagtcatttttacaacaaagagggggaagaaagtatgcacacatcccaggaaaaagtgggttcaaaagtacatctccctgctgaaaacccccaaacagctatag

SEQ ID NO: 218012 - DNA, 339 bp, synthetic construct
  misc_feature 1..339: note = Description of Artificial Sequence: Synthetic coding sequence
  source 1..339: mol_type = other DNA
atgaaagggcctccaaccttctgctccttgctgctgctctccctgctgctgagtcctgatccaaccgccgctttcctgctgccaccatcaactgcctgttgcacacagctgtatcgaaaacctcttagcgataaactactgcgtaaagtgatccaggtcgagctgcaggaggccgacggagattgccacctgcaagctttcgttttgcatttggcccagagatccatctgcatccatccccagaaccccagtctctctcagtggttcgagcatcaggaaagaaaactgcacggcactcttcccaagctgaacttcgggatgcttaggaagatgggatag

SEQ ID NO: 218013 - DNA, 384 bp, synthetic construct
  misc_feature 1..384: note = Description of Artificial Sequence: Synthetic coding sequence
  source 1..384: mol_type = other DNA
atgcagcagaggggtctggccatagttgctctggcagtgtgtgctgcactccatgcctcagaggctattctgcctattgcctcgagctgctgtaccgaggtgtctcaccatatttcacggagactcctggaaagagtcaatatgtgtagaattcaaagggccgacggtgactgtgatctggctgctgttattctgcatgtaaaacgacgaaggatatgcgttagcccccacaatcacaccgtgaaacagtggatgaaggtgcaggcagctaaaaaaaatggtaaaggaaacgtgtgtcacagaaaaaaacaccatgggaagaggaatagcaacagggcccatcagggaaagcacgagacctatgggcataagaccccctactag

SEQ ID NO: 218014 - DNA, 384 bp, synthetic construct
  misc_feature 1..384: note = Description of Artificial Sequence: Synthetic coding sequence
  source 1..384: mol_type = other DNA
atgcaacagcgtggtctcgccatcgttgcccttgccgtgtgcgcggcactgcatgcatcggaggcgattctgcctatagcttcaagttgttgtacagaagtgtcacatcatattagccggaggttgctggagagggtgaacatgtgccgtatccagcgcgctgacggagattgcgatctagccgcagtcattctgcacgtgaaacggagaagaatatgtgtgtcaccccacaaccacactgtcaagcagtggatgaaagtgcaggcagccaagaagaatgggaaaggcaatgtgtgccaccggaagaaacaccacggtaaaaggaactcaaaccgcgcacatcagggaaaacacgaaacttatggccacaagacaccttactag

SEQ ID NO: 218015 - DNA, 243 bp, synthetic construct
  misc_feature 1..243: note = Description of Artificial Sequence: Synthetic coding sequence
  source 1..243: mol_type = other DNA
atgtgccggatccagcgcgctgatggcgactgcgatctggcagctgtgattctgcacgttaaaaggcggcgaatttgtgtcagcccccacaatcacactgtaaaacagtggatgaaggtgcaggccgcaaagaaaaacggaaaagggaacgtgtgtcacaggaagaagcaccatgggaagcggaactccaatagagctcaccagggaaagcacgagacctacggacacaagaccccctactag

SEQ ID NO: 218016 - DNA, 354 bp, synthetic construct
  misc_feature 1..354: note = Description of Artificial Sequence: Synthetic coding sequence
  source 1..354: mol_type = other DNA
atgcaacaaagggggctggccattgtcgctctggcagtatgcgctgccttgcacgcatccgaggccattctccctatcgcatcttcctgttgcactgaggtgtcacaccatatcagccgacggctgctggaaagagtaaatatgtgccgaattcagcgtgccgatggcgactgcgacctggcagcagtgatgctggaatgttccgatatgatttcagctcattacaacctgcacttgcccggaagtaatgacagtccaaccagcgccttccaggtcgccggaattaccgccttcatgtccagcgccgaggaatccgtatcagcgagaacaacgatactccttagctctggctag

SEQ ID NO: 218017 - DNA, 282 bp, synthetic construct
  misc_feature 1..282: note = Description of Artificial Sequence: Synthetic coding sequence
  source 1..282: mol_type = other DNA
atgcaggtttctactgcagcgttggccgtcctgctgtgcaccatggccctgtgcaaccaggttttgtccgcccctctggcggcagacacaccgacagcttgttgctttagttacacctctagacagataccccagaattttatcgccgactactttgagacatccagccagtgttcaaaacctagcgtaatctttctgaccaaaagagggcgacaagtgtgcgccgatcccagcgaagagtgggtccagaagtatgtgagcgaccttgaactgagcgcctag

SEQ ID NO: 218018 - DNA, 159 bp, synthetic construct
  misc_feature 1..159: note = Description of Artificial Sequence: Synthetic coding sequence
  source 1..159: mol_type = other DNA
atgcaggtgagtaccgctgccctcgctgtccttctatgtactatggctttgtgtaatcaagtgttgagtgccccactctccaggccccgtgaggccggtcggagcgtacttacgcctgtccgatccgggtcaaggaatacctccgtgacatggagctag

SEQ ID NO: 218019 - DNA, 144 bp, synthetic construct
  misc_feature 1..144: note = Description of Artificial Sequence: Synthetic coding sequence
  source 1..144: mol_type = other DNA
atgcaggtttctactgccgctctcgccgtgctcctctgcacgatggcgctctgtaatcaggttttatctgctcctcaggcagggagatcagtattaactcctgttcggagtgggtcccgaaacacctccgttacatggagctag

SEQ ID NO: 218020 - DNA, 279 bp, synthetic construct
  misc_feature 1..279: note = Description of Artificial Sequence: Synthetic coding sequence
  source 1..279: mol_type = other DNA
atgaagctgtgcgtgactgtgttgtcacttctcatgctggtcgctgcattctgcagtccagccctctccgcccctatgggtagtgacccacctaccgcttgttgctttagttacaccgcacgtaagctgccacgcaattttgtggtggactactatgagacgagcagcctctgtagccagcctgcagtggtgttccagacaaaacgatccaaacaggtgtgtgctgacccaagcgagtcctgggtccaggaatatgtgtatgaccttgagttgaactag

SEQ ID NO: 218021 - DNA, 159 bp, synthetic construct
  misc_feature 1..159: note = Description of Artificial Sequence: Synthetic coding sequence
  source 1..159: mol_type = other DNA
atgaaactgtgtgtgacggtactgtccctgcttatgctggtcgccgcattttgttctccggctctcagcgctcccaacagcaaaccaaaggaagcttccaagtcagtgcttatacctgtgaacccgggtagtcgttcaacgtgtatgacttggaactag

SEQ ID NO: 218022 - DNA, 159 bp, synthetic construct
  misc_feature 1..159: note = Description of Artificial Sequence: Synthetic coding sequence
  source 1..159: mol_type = other DNA
atgaagctgtgcgtgacggtcctgagccttttagtcctcgtggccgcattctgcagtttggccctcagcgctcctaattctaaacctaaggaggcctcaaaatctgcccttaccccggtgtctccgggttcacgctccacctgcatgacttggaattag

SEQ ID NO: 218023 - DNA, 207 bp, synthetic construct
  misc_feature 1..207: note = Description of Artificial Sequence: Synthetic coding sequence
  source 1..207: mol_type = other DNA
atgaaattgtgtgttacagtgctgagcctccttgtgttggttgccgctttctgctctctagccctctcagcccctacaaagagctctgaatggaaactgcagggggtttgtttccagtgttgcagcagaaaggacccaatccaccagtcatgtcccacctggaccatggttcggcagaggaagatgcctacgaccgggaagggatag

SEQ ID NO: 218024 - DNA, 261 bp, synthetic construct
  misc_feature 1..261: note = Description of Artificial Sequence: Synthetic coding sequence
  source 1..261: mol_type = other DNA
atgaaattgtgtgtgaccgtgctctcgctccttgtgctggtagctgccttttgcagtctggcccttagcgctccaatggggagcgatccgccaactgcatgctgcttctcctacacagcgagaaagctgcccagaaacttcgtggtagactattacgagacctcctctctgtgtagtcagcccgctgtggtagccgctccacacggcccatggtctggaagggggaggtgccttccgcaggccagagataaagctagatag

SEQ ID NO: 218025 - DNA, 279 bp, synthetic construct
  misc_feature 1..279: note = Description of Artificial Sequence: Synthetic coding sequence
  source 1..279: mol_type = other DNA
atgaagctttgcgttaccgtgctctcgctgttagtcctggttgccgctttctgcagtctggctctctccgctcctatggggtccgacccccctaccgcatgctgtttcagttacactgccaggaagctgccacgtaacttcgttgttgactactacgagacctcctccctttgttcacaacccgcagtcgtctttcaaaccaaaagaggtaaacaggtctgtgcagaccctagtgagagttgggttcaggaatacgtatacgatcttgaactcaactag

SEQ ID NO: 218026 - DNA, 300 bp, synthetic construct
  misc_feature 1..300: note = Description of Artificial Sequence: Synthetic coding sequence
  source 1..300: mol_type = other DNA
atgaaagtgagtgcggcactgctgtgcctgctcctgatcgctgctacatttattccccagggtctcgcacaacccgacgccattaacgctcccgtgacatgctgttataattttaccaatcgcaagatcagcgtccagagactcgcaagttataggaggattacaagttctaaatgccctaaggaggccgtgatttttaagaccatcgtggccaaggaaatctgtgccgacccaaaacaaaaatgggtgcaagacagcatggaccacctggacaaacagacacagacacccaagacatag

SEQ ID NO: 218027 - DNA, 330 bp, synthetic construct
  misc_feature 1..330: note = Description of Artificial Sequence: Synthetic coding sequence
  source 1..330: mol_type = other DNA
atgctgaaactcacccctttgccaagtaaaatgaaagtgagcgctgccctgctttgtctcctgcttatggccgctactttctcgccacaaggactcgcccaaccagatagcgtttccatacctattacatgttgctttaacgtgatcaatcgcaagattccgatacagagactggaatcctacacacggattactaacatacagtgcccgaaagaggctgtgatattcaagaccaagcggggaaaggaggtatgcgccgaccccaaagagcgatgggtcagggacagtatgaagcacctggaccaaatcttccagaatctgaagccctag

SEQ ID NO: 218028 - DNA, 1068 bp, synthetic construct
  misc_feature 1..1068: note = Description of Artificial Sequence: Synthetic coding sequence
  source 1..1068: mol_type = other DNA
atggaaactccaaatacaaccgaagactacgatacgaccaccgagtttgattatggagatgccacaccttgtcagaaagtcaatgagcgtgccttcggcgcacagctcctaccacctttatattctctggtatttgttatcggtttggttgggaatatcctcgtagtgttagtgctcgtgcagtataaaaggctgaaaaatatgacctcaatctatctcttgaatcttgccatttctgatttacttttcctgttcacacttccgttctggattgactataagctcaaggacgactgggtatttggtgatgcgatgtgtaagattttatcgggattttactatactggactgtactcggaaatctttttcattattctccttacaatcgatcggtacctggccattgtccacgcagtgtttgcactccgggctaggaccgtgacatttggcgtgatcacatccataattatatgggctctagccattctggcctccatgcctgggttatattttagcaagacccaatgggaattcactcaccacacctgcagtcttcacttcccacacgaatcgctgagagaatggaaactattccaggcgctgaaactcaatctgttcggattggtattgcctctcctggtcatgatcatttgttacaccggaataataaaaatccttctgaggcgcccaaacgagaagaagagtaaggcagtccgactgatctttgttatcatgataatattctttttgttctggaccccctacaatctcactattctcattagcgtctttcaggactttctgtttacgcacgaatgcgaacagtcgaggcacctggacctcgccgtccaggtaaccgaggtcatcgcgtatacccattgctgcgtcaatcccgttatttacgcgttcgtcggtgagcggttccgcaagtaccttagacagctgttccatcgcagagtggccgtccacttggtcaagtggctgccattcttgtcagttgacaggctggagcgcgtttcctcaacatcaccttccacaggtgaacacgaactgagcgcaggtttctag

SEQ ID NO: 218029 - DNA, 1089 bp, synthetic construct
  misc_feature 1..1089: note = Description of Artificial Sequence: Synthetic coding sequence
  source 1..1089: mol_type = other DNA
atgggcactgaggccaccgagcaagtgtcctggggacactactctggggacgaggaagatgcctatagcgccgaacccctgcccgagctgtgctacaaggcagacgtgcaggctttctcacgggcatttcagccctctgtcagcctgacagttgctgctctgggactggccggaaatggtctcgttctggccacccaccttgccgctaggagggcagccaggtcgccaactagcgcgcacctccttcagttagctttggccgatcttttgctcgcgcttactctgcctttcgccgcagcaggcgctctgcagggttggtcactggggtcagctacatgccggaccatctcggggctgtattcggcgagtttccacgctgggttcctttttctagcgtgcatttctgcagatcgatacgtcgcgattgcccgtgctctcccggcaggtccgaggccttccacgcctggtcgtgctcatctagtgtccgtcattgtatggctgctaagtcttctcctggcactgcccgctctcctgttcagtcaagatggccagagggagggacagcgtcggtgtagactgatctttccggagggtctgacccagactgttaagggagcctcagctgtcgcccaggtggccctcggcttcgcactcccactcggggtgatggtggcgtgctacgctttacttggtcgcacactgttagcagcacggggacccgaacggcgtcgtgccctcagagtcgtggttgcgctggtggcggcattcgtcgtacttcagctcccgtattcgctggccctgctcctcgacacagctgacctgcttgcagctcgtgagcgaagctgtccggcttctaaaagaaaagatgtcgctttgttagtcacatcgggactcgctctggcccgatgcggcttgaaccccgtgctctacgcttttcttgggctgagatttaggcaagacctgaggcgactgctccggggagggtcttgccctagcggcccacagcccagacggggatgcccgcgtagacccagattatctagctgttccgcacctaccgagactcacagtctctcctgggacaactag

SEQ ID NO: 218030 - DNA, 1125 bp, synthetic construct
  misc_feature 1..1125: note = Description of Artificial Sequence: Synthetic coding sequence
  source 1..1125: mol_type = other DNA
atgctgtcaacaagccggtccaggtttattcgcaacaccaacgagtcaggagaagaggtaaccacgttctttgactatgattacggagccccttgccataagttcgacgttaagcaaattggcgcacaactgctgccaccattgtatagcttggtgtttatctttgggttcgtaggaaatatgctcgttgtgctgatcctgatcaattgcaagaaactgaagtgtctgaccgacatctaccttctcaacctagcaattagcgaccttcttttcctgattacactacctttgtgggcacactccgccgctaatgaatgggtgtttgggaatgccatgtgcaaactgttcactggtctgtatcacatcgggtacttcggcggtatcttctttattatcctgctgactatcgataggtacctggccatagtccatgcagtctttgctttaaaagccagaacagtaacattcggtgtggtcacctccgtgataacgtggctagtggccgttttcgcctctgttcccggtattatcttcacaaagtgtcagaaagaggattctgtgtacgtgtgcggtccatacttcccaagaggatggaacaatttccacactatcatgagaaacatcctgggcttggtccttccactgctcataatggtcatctgttattccggtatcctaaagacactactgcgctgcaggaatgagaagaaacggcaccgagcagtcagggtgattttcacaattatgatagtttatttcctgttttggaccccctataacattgttatcttgctgaacacattccaggagttcttcggcctcagcaattgcgagagcactagccagctagatcaggccacacaggtcacagaaactctgggaatgactcactgttgcatcaatcccatcatatacgcttttgttggagagaagttcaggtccctgtttcatattgctctcgggtgccgaatcgcgcctcttcagaaacctgtgtgtggcggacccggtgttcgcccaggcaagaacgtcaaagttacaacgcaaggcctactcgacggcagggggaagggcaaatctattggaagagccccagaagctagcctacaagataaggagggcgcttag

SEQ ID NO: 218031 - DNA, 1125 bp, synthetic construct
  misc_feature 1..1125: note = Description of Artificial Sequence: Synthetic coding sequence
  source 1..1125: mol_type = other DNA
atgctcagtacttcaagatccaggttcattcgaaatactaatgagtcaggggaggaggttacaactttcttcgattacgactatggcgcaccatgccataagttcgatgtcaagcagattggggctcagcttctgcctccgctgtacagtctagtgtttattttcggatttgtaggtaatatgttggtggtgctgatcctaattaactgcaagaagcttaagtgcctcactgacatctatctcttaaacctggccatctcggatcttctgtttctgataacacttccactctgggctcactctgctgcaaacgagtgggtgtttggcaacgcgatgtgtaaactgttcactggtctgtatcatatcggctacttcgggggaatctttttcatcatcctgctgacaattgaccgctatctggcaatagttcatgctgtattcgcgctcaaggctagaacggtgacttttggggtcgtcactagcgttatcacttggctggttgctgtatttgcatcagttcctggcatcattttcacaaagtgtcaaaaagaagatagcgtctacgtgtgtggaccgtatttccctcggggatggaacaacttccataccattatgagaaacatactcggacttgtgcttcctcttctgatcatggtaatttgttactccggcatcctgaaaaccctgctccgctgccgtaacgagaagaaaagacacagagccgtacgcgtaatctttactatcatgattgtttattttctgttttggactccctacaatatcgtaatcctgctgaatacttttcaagagtttttcggactctctaactgcgagagtacttctcagctggatcaggcaacccaggtgacggaaactctcgggatgactcattgctgtataaaccccattatctatgcattcgtcggcgaaaagttccgctcactgttccatatcgccctgggatgccggatcgcacctctgcagaaaccagtgtgtggcggtccaggcgtacgcccagggaaaaatgtcaaagtcacaactcagggactcttggacggaagggggaagggtaagagcatcggcagggcacctgaagcatcactgcaggataaagaaggtgcgtag

SEQ ID NO: 218032 - DNA, 366 bp, synthetic construct
  misc_feature 1..366: note = Description of Artificial Sequence: Synthetic coding sequence
  source 1..366: mol_type = other DNA
atgctgtctactagccggtcgcgctttattaggaataccaacgagtcaggtgaggaggtgacaacctttttcgactacgactatggtgccccatgccacaagttcgatgtcaagcagataggtgctcagctcttaccacccctctattcactggtttttatcttcggatttgttgggaatatgctggtggtactgatcctgatcaattgtaagaaacttaaatgcctcacagatatctacttattgaatctcgctatctctgacctgctgtttctgatcacgctgcccctttgggcgcacagcgccgcaaatgaatgggtttttgggaacgcaatgtgcaagctcttcaccgggctgtatcactag

SEQ ID NO: 218033 - DNA, 1083 bp, synthetic construct
  misc_feature 1..1083: note = Description of Artificial Sequence: Synthetic coding sequence
  source 1..1083: mol_type = other DNA
atgctcagcacctcacgatccagattcatccggaacactaacgagtctggggaagaagtgacaaccttctttgactatgattacggggcaccttgccataaattcgatgttaaacagatcggtgcccagttacttccccctctgtactctttggtgttcatcttcggatttgtgggaaatatgctagtcgtgctcatcctgattaattgcaaaaagctcaaatgcctgactgatatatatctgctgaatctggctattagtgatctccttttccttattactctgccattgtgggcccacagtgccgcaaatgagtgggtctttggcaatgccatgtgcaaactatttacgggtctgtaccatatagggtattttggaggtatattctttattattctgttgaccatagatcgttacctggctattgtgcacgcagtctttgcacttaaggcaagaactgtaacattcggagtggtgacctctgtgataacgtggctggtggcagtgtttgctagcgttcccggaattatcttcaccaaatgtcaaaaggaggactctgtgtatgtatgcggaccatattttccacgaggatggaacaactttcacactataatgaggaacattctcggattggtgttgccccttctgattatggtgatttgttattccgggattctgaagacattgctcaggtgccgaaacgagaaaaagagacaccgtgcggtgagagtgatctttaccattatgatcgtatactttctgttttggaccccctacaacattgtcatcctcttgaatacttttcaggaattttttggcttatccaattgcgaatccacgagccagctggatcaggcaactcaggtgaccgagacactgggaatgacacattgctgtatcaatccaatcatatatgctttcgtcggggagaagtttcggcgatatctctcagttttcttccgtaagcacatcacgaagcgcttttgcaagcagtgtcctgtgttttatagagaaactgttgacggcgtgacatcaaccaacaccccctcaaccggtgagcaagaggtcagcgctggcctgtag

SEQ ID NO: 218034 - DNA, 1068 bp, synthetic construct
  misc_feature 1..1068: note = Description of Artificial Sequence: Synthetic coding sequence
  source 1..1068: mol_type = other DNA
atgacaacttccttagatactgtggagaccttcggtactacatcatactacgacgacgtggggctgctttgtgaaaaggccgacactagagccttaatggcacaattcgtgccacctctctactccttagtgtttacagtcggccttttggggaacgtagttgtggtcatgatcctgatcaagtacaggagactccgcatcatgacaaatatttacctgctcaaccttgccatttccgatctgctgtttctcgtcactctgcctttctggatccattacgtgagaggccacaactgggttttcggtcatggcatgtgcaagctcctcagtggcttctaccacaccggtttgtattctgagatctttttcatcatcctcctgacaatcgatcggtatctcgcgattgtgcatgccgtatttgcgctccgtgctcggaccgtaacatttggagtgatcacctctatcgtgacttggggtctggccgtcctggccgctctgcctgagttcattttttacgaaactgaggagttgttcgaagaaacactttgtagtgccctgtaccctgaagacactgtttacagctggcgtcactttcatacattacgcatgactatcttttgcctcgtattaccgttgctcgtgatggccatttgctacacaggcattattaagactcttctgcggtgcccctctaagaaaaagtacaaagccattaggctcatttttgtaataatggccgtgttcttcattttctggactccctataacgttgctatcctgctgtcgtcttaccaatctatcctgttcggcaatgattgtgagaggagcaagcacctggacctcgttatgctcgtgacagaggttatagcctacagccactgttgcatgaatccagtgatttatgctttcgtaggcgagaggttcaggaagtatctgcgccattttttccacaggcaccttctgatgcatcttggacgctatatcccttttctgccctcggagaaactagagcgcacatctagtgtctccccctcaactgccgagcccgagttgtcgatcgtcttttag

SEQ ID NO: 218035 - DNA, 1068 bp, synthetic construct
  misc_feature 1..1068: note = Description of Artificial Sequence: Synthetic coding sequence
  source 1..1068: mol_type = other DNA
atgacgactagcctcgataccgtggagaccttcggcaccacctcctactacgatgacgtcggtctgctctgcgagaaggccgacaccagggccctgatggcgcagttcgtcccacctctgtatagcctggtcttcactgtgggcttgctgggaaacgtggtcgtggttatgatcctgatcaagtataggcgcttacggattatgacaaacatctatctgttaaatctggccatcagcgacctgctcttccttgtgaccctccctttctggatacattacgtgcgcggtcacaactgggttttcggacacggtatgtgcaaattactctcagggttctatcacacgggtctttattccgaaattttttttatcatcttgttaaccatcgataggtacttagctattgtgcacgcagtgtttgctctgcgcgctaggacagtgacctttggtgtaattaccagtattgtgacatggggtttggccgtgctggccgcactgccggagttcattttctacgaaacggaagaactgttcgaggaaacactctgtagtgctctttaccctgaagatactgtgtattcttggaggcacttccacacccttagaatgaccatcttttgcttggtgctaccccttctggtcatggcaatatgttatactggaatcataaaaaccctgctgcggtgcccctctaaaaaaaaatataaggccatcagattgatcttcgtgatcatggctgttttttttatattctggactccctataacgtggcaatacttttgtcaagttaccagagtattctattcggcaatgactgcgaacgttccaaacatctcgacctagttatgttggtaacggaggtcatcgcttattcacattgttgcatgaatccagtcatatacgcttttgtcggcgaacggtttcggaaatatctgaggcacttcttccaccgtcacctgctaatgcatctcgggcgatacatcccattcctgcctagtgagaaactggaaagaactagctctgtaagtccctctactgcagaacccgagctctctatagtgttttag

SEQ ID NO: 218036 - DNA, 1068 bp, synthetic construct
  misc_feature 1..1068: note = Description of Artificial Sequence: Synthetic coding sequence
  source 1..1068: mol_type = other DNA
atgacaacaagtctggataccgtcgagacttttgggactacatcatattacgacgatgttggcctcttatgtgagaaggctgatacaagagccctcatggctcagttcgtacccccactttatagcctggtcttcaccgttggcctccttggcaatgtggtggtcgtaatgatcctgatcaagtatagacggttaagaattatgaccaatatctatttgctgaatctggctattagtgacctgttattcttggttacactgccattttggattcactacgtaagagggcataactgggtgtttgggcatggaatgtgtaaattactgagtggattttatcataccggattgtattcagagatcttttttattatattacttactatcgatcggtacctggctattgttcacgccgtattcgccttacgcgctagaactgtcacgttcggtgttatcaccagcattgtaacctggggcctggctgtgctcgcagcgttgcctgagtttatcttctatgaaaccgaggagctgtttgaggaaactctgtgctctgctctgtacccagaggacacagtttactcttggcggcactttcacaccctgaggatgacaattttttgtctcgtgctgcccctgctagtcatggcgatctgctacacaggcatcattaaaacgttgctccgatgccctagtaagaaaaagtacaaagccatcaggttaattttcgtgatcatggctgttttctttattttctggaccccatacaatgtggcaatcttgctctcaagctaccagtcaattctgtttggaaacgattgcgaacggagtaaacacctggatctcgtgatgttggtgaccgaggtgatagcctacagccattgttgtatgaaccccgtgatctacgccttcgtaggagagagattcagaaaatacctcaggcattttttccatcgccatctgttgatgcatctgggcagatatatccccttcttgccgtcggagaagttagagcgcaccagttcagtcagcccatctaccgccgaacccgagctgagcattgtgttctag

SEQ ID NO: 218037 - DNA, 243 bp, synthetic construct
  misc_feature 1..243: note = Description of Artificial Sequence: Synthetic coding sequence
  source 1..243: mol_type = other DNA
atgactacatctctggataccgtggagaccttcggcacaacttcctattacgacgatgtaggccttctgtgtgagaaagccgacactcgtgcgctcatggctcaatttgtcccacccctctacagtttagtgtttaccgtcggcctgctgggtaacgtggtggtggtcatgattctgattaaatacagaagacttcgcataatgaccaatatatacctcctgaatctcgcaatttcagactag

SEQ ID NO: 218038 - DNA, 66 bp, synthetic construct
  misc_feature 1..66: note = Description of Artificial Sequence: Synthetic coding sequence
  source 1..66: mol_type = other DNA
atgacaacatccctggacaccgtcgagaccttcgggaccacaagctattacgacgatgtcggatag

SEQ ID NO: 218039 - DNA, 1068 bp, synthetic construct
  misc_feature 1..1068: note = Description of Artificial Sequence: Synthetic coding sequence
  source 1..1068: mol_type = other DNA
atgaccacatccctggatacagtggagaccttcggcactaccagttattacgacgacgtgggcctcctgtgcgagaaggctgatacacgggcacttatggcccagttcgtcccccctctttattcacttgtcttcactgtggggctgctgggaaatgttgtagttgtgatgatcttgattaagtaccggcgactgcgcatcatgactaatatttatctcctcaacctagccatatctgacttgctatttttggtcacacttccattctggattcactatgtcaggggccacaactgggtctttggccatggaatgtgtaaacttctctccggattttaccataccgggctgtactcagagattttcttcataattctgcttaccattgaccgttaccttgctatcgtgcatgccgtctttgctttgagagctaggaccgtgacatttggtgttattacctcaattgtgacatggggcctggccgtgctggccgctctgccggagtttattttctacgagaccgaggagctgttcgaagagactttgtgctcagccctgtaccctgaggacacagtttacagttggcgccacttccatactctgagaatgaccatcttctgcctggtcttgccactcctcgtcatggccatttgctatacgggcatcattaagacactcttgcgttgcccctctaagaagaaatacaaagccatccgtctcatttttgtgattatggcagtgttttttattttttggacgccatacaacgtagcaatcctgctcagcagttaccagtctatcctctttggaaacgactgtgaacggagcaaacatctggatcttgttatgcttgtgactgaggtgatcgcttacagccactgttgcatgaaccctgtgatctatgcttttgttggtgagaggttccggaagtatctgcgccacttttttcatcggcacctccttatgcaccttggccgttatatccccttcctccccagtgaaaagcttgaacgaacatccagtgtgtctccctccacagcagagccagagctctccattgtgttctag

SEQ ID NO: 218040 - DNA, 1131 bp, synthetic construct
  misc_feature 1..1131: note = Description of Artificial Sequence: Synthetic coding sequence
  source 1..1131: mol_type = other DNA
atgcccttcggaatcagaatgctgctcagggctcataagcctggctccagtagacgcagcgagatgactacatctttagacacagttgagacgttcggcaccacctcctactacgacgacgtcgggctgctctgtgaaaaggcagacacccgagctctgatggcccaattcgtaccacccctgtattccctggtgttcaccgtgggcctcctaggcaacgtggtggtcgttatgatacttattaagtatcggcgtttgcgtattatgaccaatatttaccttctgaaccttgccatttctgacctgctctttttggtgactttacccttctggattcattacgtgcgcggacacaattgggtctttggccacggcatgtgcaaattgctctcaggtttctaccataccggtctctacagtgagattttcttcattattttactgactattgacagatatctggcaatagtgcacgcggtttttgcgctgagagcccgtaccgtgacttttggggtcatcacatcaatcgtcacatggggtctggctgtcttagcagccctacctgaattcatcttctacgaaacagaggaattattcgaggagacgctgtgtagcgctctctacccagaagatactgtgtatagctggcgacacttccacacactgaggatgactattttctgcctggtcctcccactgctcgtcatggctatttgttacactggcatcatcaaaaccctgctcagatgcccttctaaaaaaaaatataaagctatccgactgatattcgtgattatggccgtgttcttcatcttctggaccccttacaatgtcgcaatacttctctccagttaccagtctatcctgttcgggaacgattgcgaacgctccaaacacctcgacctggtgatgctggtcactgaagtgatcgcctattcacattgctgcatgaaccctgtgatttacgcgtttgtgggggagagatttcgcaagtatttgaggcatttctttcatagacacctgctgatgcatttgggcagatatatcccctttctcccatctgaaaaactcgagaggacttcgagcgtcagcccttcaacggctgagcccgagctctctatcgtcttctag

SEQ ID NO: 218041 - DNA, 1083 bp, synthetic construct
  misc_feature 1..1083: note = Description of Artificial Sequence: Synthetic coding sequence
  source 1..1083: mol_type = other DNA
atgaatcccaccgatattgctgataccaccctcgatgagtctatttattctaattattatctttacgaatctatccccaaaccttgcactaaagaaggtattaaggccttcggtgaactgtttctccctccactttactctctagtgttcgtgttcggtctgcttggcaatagcgtggtggtgctcgtgctgttcaagtataagcggctgcggagcatgacagacgtctatttgctcaatctggccatctctgacttgctgttcgtgttcagcctgccattttggggctattatgccgctgaccagtgggtgttcggacttgggttgtgcaaaatgatctcctggatgtacctggtgggcttctacagtgggatttttttcgtgatgctcatgtccattgacaggtatctggccatcgttcatgccgtgtttagcttacgcgctcggacactgacgtatggggtgattacaagtcttgctacttggtccgtcgcggtatttgctagtttgccgggtttcctgtttagcacctgctacacagagaggaatcacacctattgcaaaacaaagtacagcctcaactcaactacatggaaagttctgagctccctggaaataaacattctgggtttggttatacccttgggtatcatgctgttctgttactcaatgatcataaggactctccaacattgtaaaaacgaaaagaagaacaaagccgtaaagatgatctttgccgtggtcgttcttttcctgggattctggactccctataatatcgtcctgtttctggagaccctcgtggaactggaggtgctgcaggattgtaccttcgaacggtacctggattacgccattcaagccacggagactctggccttcgtccattgctgtctgaatcctatcatctacttcttcttgggcgaaaagtttcgtaagtacatcctccaactattcaaaacttgtcgtggtctgtttgtcctgtgtcagtactgtggactgttgcagatttattcagctgacaccccttcatcaagctacactcagtccacaatggaccatgatctgcatgacgccctctag

SEQ ID NO: 218042 - DNA, 1059 bp, synthetic construct
  misc_feature 1..1059: note = Description of Artificial Sequence: Synthetic coding sequence
  source 1..1059: mol_type = other DNA
atggactatcaggtgtcatctcccatatacgatattaattactacacctctgagccatgccaaaaaataaacgtaaagcagatagccgcacggctcctgccacctctgtactctctggtgttcatttttgggtttgtgggcaatatgctggttatcctgatacttatcaactgcaagagactgaaaagtatgactgacatttatctccttaaccttgccatttccgatctcttctttcttctcactgttccattctgggctcattatgctgcagctcaatgggatttcgggaacactatgtgccaactgctgaccgggctgtactttattggctttttctcgggaatcttttttattatcttgctcacgatagacagatatctggcagtagtccatgccgtctttgcattaaaggccagaacagtgacgtttggggtggtgacttccgtgattacctgggtggtcgccgtctttgcctcattgcccggaataatctttacaaggagtcagaaagagggtctccactacacttgcagttcacactttccctacagtcagtatcagttctggaaaaattttcaaacattgaaaatcgttatactcggattagtactgcctctgcttgtgatggtgatctgctacagtggcatcctcaagactctcctccgttgccgaaacgagaagaagagacaccgggcagttcgccttatctttacaatcatgatcgtgtattttctgttttgggctccatataacatcgtgctcctcctgaatacattccaggaattcttcggactaaacaattgtagctccagtaatagactggatcaagctatgcaggtgacggagacactgggaatgactcactgctgcataaaccccataatttatgcctttgtaggagagaaattcaggaactatctcctggtcttttttcagaagcatattgccaaacgtttttgcaagtgttgtagtatctttcagcaagaggcccctgaacgggcttccagcgtatacactaggtccacgggggagcaggagatatccgtcggattatag

SEQ ID NO: 218043 - DNA, 1059 bp, synthetic construct
  misc_feature 1..1059: note = Description of Artificial Sequence: Synthetic coding sequence
  source 1..1059: mol_type = other DNA
atggattatcaggtgtcatccccaatttatgatatcaattattacaccagcgagccctgccagaaaatcaatgtaaaacagatcgcagcacggctgcttcctcccttgtattcgcttgtttttattttcgggtttgtgggaaatatgctggtcatcctgatcctgattaattgcaagcgattaaagtcaatgaccgacatctacctcctgaacctcgcgatcagtgacctgtttttccttttaaccgtgcccttttgggcgcattacgccgcagcacaatgggacttcgggaacacaatgtgtcagcttctgactggactgtatttcattggctttttttccggcatctttttcatcatccttctgacaattgataggtatctggctgttgtgcacgccgtgttcgcactcaaagcaagaacggtgacatttggggtggtgacgtccgtgataacctgggtcgtcgctgttttcgcgtctttgcctgggatcatctttacacgtagccaaaaagagggactgcattatacctgcagcagccactttccatatagccagtatcagttctggaaaaattttcaaaccttaaagatcgtgattctcggtttagtgctgcctctccttgtgatggtgatctgttactcggggattcttaaaacactcctccgatgtagaaatgagaaaaaacggcacagggccgtgagactcatttttacaatcatgattgtatattttctgttctgggctccatacaatatcgttcttcttctgaatacctttcaagagtttttcgggttaaataattgtagttcatcaaacaggctggaccaggccatgcaagtcactgagaccttaggcatgacccattgttgcattaaccctataatctatgctttcgtaggagagaaatttagaaactatctgcttgtgttttttcagaaacacattgctaagcgcttttgcaaatgttgttccatctttcagcaggaggcccctgagagagcttcatccgtctacacacgctccacgggagagcaggaaatctccgtgggactgtag

SEQ ID NO: 218044 - DNA, 999 bp, synthetic construct
  misc_feature 1..999: note = Description of Artificial Sequence: Synthetic coding sequence
  source 1..999: mol_type = other DNA
cttcccaaaaatcagtgcgaagcaaatcggtccccaccaccagcctcggccctgctgaccggcgtacatctgtggttctgcaacatgctggtgattctgatattaataaattgtaagcgtttgaagtcaatgaccgatatttatctcctgaatcttgccatctccgacttgttttttctgctaactgtccctttttgggcccactacgccgcagctcagtgggattttggcaacaccatgtgtcaattgctgaccgggctgtacttcatcggcttttttagcggcatcttcttcataatcttactgacaatagatcggtacttggcggtggtacatgcagtgtttgcactgaaggccagaaccgtgacctttggcgttgttacaagtgtaataacatgggtggttgcggtgttcgcctctctgcccggtatcatatttacgcgatcacagaaggaggggcttcactatacctgcagttctcactttccgtacagccagtatcagttttggaaaaactttcagacactgaaaatcgtgattctgggtctggtcttgccgctgctcgttatggtcatttgctactcagggatactgaagaccctgctcagatgtaggaacgaaaagaaaaggcaccgcgcagtgcgcctgatttttactattatgatcgtatatttcctgttctgggcgccttacaatatagtgttgcttcttaatacttttcaggaattcttcggcctgaataattgctcctcttccaaccgcttggaccaggccatgcaagtgaccgaaacattgggaatgacccattgttgtatcaaccctattatctatgccttcgtgggagaaaagttccgcaactacctcctagttttttttcagaaacatatcgctaaaagattctgcaagtgctgtagtatatttcagcaggaagccccagaacgggcaagctcagtgtacacaagaagtactggggagcaggaaatctctgtgggactctag

SEQ ID NO: 218045 - DNA, 1059 bp, synthetic construct
  misc_feature 1..1059: note = Description of Artificial Sequence: Synthetic coding sequence
  source 1..1059: mol_type = other DNA
atggattatcaggtgtcatctcccatctatgacatcaactattacacctctgagccgtgtcaaaagatcaatgtgaagcagattgctgcgcgacttctcccaccgctgtactctctagtgtttatttttggattcgtcggtaacatgctggtgatcctcatactgatcaactgcaaaaggcttaagagcatgaccgacatttacttgctaaacctggccatcagtgacctcttctttttgcttaccgtacccttctgggctcattacgctgcagctcagtgggactttggcaatacgatgtgtcaactgctgaccggtctctacttcattggattttttagtggcatcttctttattattttgctgaccatcgaccgttatctcgccgtcgtacatgctgtttttgcactcaaagctaggaccgtgaccttcggggttgtgacatccgttatcacatgggtagtcgccgttttcgccagccttccagggatcatctttacacggagtcaaaaggagggtctccactacacatgctcgagccactttccctattcccagtaccagttctggaagaactttcagacccttaagattgtaatactcggactggttctcccgctgcttgtgatggtcatttgctacagtggtatcctgaaaactttattacggtgcagaaatgaaaagaaaaggcaccgagccgtccgactgatttttactataatgattgtgtacttcctattttgggcgccttataatatagtcctccttcttaacacctttcaggagttttttggacttaacaattgcagctcctccaatagactcgatcaggccatgcaagtcaccgagacactgggcatgacccattgttgtataaaccctatcatatatgcgttcgttggcgaaaagttcaggaattacctgctcgtattttttcaaaaacatatcgcaaagcgtttttgcaagtgctgcagcatctttcagcaggaggcccctgaacgagctagttctgtctataccagatccactggggagcaagaaatttcagtggggctgtag

SEQ ID NO: 218046 - DNA, 1125 bp, synthetic construct
  misc_feature 1..1125: note = Description of Artificial Sequence: Synthetic coding sequence
  source 1..1125: mol_type = other DNA
atgtcaggggagtcgatgaatttctcagacgtgtttgattcatctgaggactatttcgtgtccgtcaacacctcttattatagtgtcgactcagagatgttgctgtgttcacttcaagaagtcagacaattcagtcggctgttcgtgcctattgcctatagtcttatttgcgtgttcggattgttgggtaatatcttggtggtgataacattcgccttctataaaaaagcacgttcgatgaccgacgtatacctgctcaatatggctatcgcagatatcctttttgtcctcacccttcccttctgggctgtgagccatgctaccggggcatgggtcttctctaatgcaacttgcaagctcttgaagggaatttacgccatcaacttcaactgcggaatgcttctcctcacatgtatatcgatggatcgctacattgccatagtccaagctactaagagcttccgtcttcgatctcggaccttgccccgttccaagattatttgtttggtagtctggggactgtctgttattatctcgtccagcaccttcgtatttaatcagaagtacaatactcaagggtctgacgtctgtgagccaaagtatcagaccgtgtcagaaccgattcgatggaaattattgatgcttggcctggagctcctgtttggcttcttcattccactcatgtttatgattttctgctacacttttatcgtgaagacactggtccaagcccagaactcaaagcgtcacaaggccattcgcgtcatcatcgcggtggtgctcgttttcctcgcctgtcagatccctcacaatatggtcctcttggtcacagctgctaacctggggaaaatgaatcgcagctgtcagtcagaaaaattgatagggtacacaaagaccgtaaccgaggttctggcttttctacactgctgtctgaatcccgtgctctacgcattcattggccaaaaattccgcaactactttcttaaaatcctgaaagatctctggtgcgtgcggaggaaatacaaatcgagcggattctcctgtgctggacgctattccgagaacatttcccggcagacttcagagacggctgataacgataatgcttcatccttcacaatgtag

SEQ ID NO: 218047 - DNA, 1125 bp, synthetic construct
  misc_feature 1..1125: note = Description of Artificial Sequence: Synthetic coding sequence
  source 1..1125: mol_type = other DNA
atgagcggtgagtcaatgaatttcagtgacgtgtttgactcaagcgaagactatttcgtttcagtaaacaccagttactacagtgtggactccgaaatgttactatgctcgctacaggaggtgcgccagttcagtcggttgttcgttcccatcgcctatagcctgatatgtgtattcggacttctgggaaacatccttgtagtgatcaccttcgccttctataaaaaagcaaggtctatgactgatgtgtacctgcttaatatggcaattgccgatattcttttcgtcctaaccctgcccttttgggctgtctctcatgcaaccggcgcttgggtgttctcgaatgccacgtgtaaactgcttaagggaatttacgcgatcaattttaattgtggcatgctcctcctgacatgtatcagcatggatcggtatattgccatcgttcaggcaaccaagtcttttagattgagaagcagaacactgccaagatcgaagattatatgtctggttgtctggggactttctgtcattatttcaagtagtactttcgtgtttaaccagaaatacaacacccagggatctgacgtttgcgagcctaagtaccagactgtgtccgagccaatccgctggaaattgctcatgcttggcctggaacttctctttggatttttcataccactcatgttcatgatcttttgttatacattcatagtaaagactctcgtgcaggcccagaattctaagcgacacaaagcaattcgcgtaattatcgccgtagtgctggtgtttctggcatgccagatcccacataacatggttctgttggtgacggcagcaaacctgggtaagatgaatcgatcctgccagtcggagaagcttattggctacaccaagaccgtcacagaggtccttgccttcctacattgctgcctgaatccggtgttatacgcattcattggacagaaattccgcaattatttccttaagatcttgaaggacctgtggtgcgttagacgaaagtataagtcaagtggctttagctgtgcaggacggtactccgagaatattagtagacagacatctgagacggctgacaatgacaacgcatccagcttcacgatgtag

SEQ ID NO: 218048 - DNA, 1125 bp, synthetic construct
  misc_feature 1..1125: note = Description of Artificial Sequence: Synthetic coding sequence
  source 1..1125: mol_type = other DNA
atgtccggagagtcaatgaatttttctgatgtcttcgattcatcagaagattatttcgtatcagtgaatacctcatattattccgtcgactcagagatgctgctgtgctccctccaggaggtccgtcagttcagccgactgttcgtcccaattgcctattctttgatttgcgtgtttggactgctgggcaacatcttggtcgtgatcacattcgcattttacaagaaggcccgtagcatgacagacgtctacctgctgaacatggcaatcgcagacatcctgttcgtcctgaccctccctttttgggcggtttcccacgctactggcgcttgggtgttctctaatgctacgtgtaaactgctgaagggcatttacgcgattaattttaactgtggaatgctgctgctcacctgtatatcaatggacaggtatatcgccattgttcaagccaccaagagtttcaggctgaggagtcgcacattgcccagaagtaagattatttgtctcgtggtgtggggtctgtcagtcatcatctcaagtagcacctttgtgtttaaccagaaatataacacacagggctccgatgtctgcgaaccaaagtaccagaccgtgtccgagccaattcgatggaaactgttaatgctgggcctggagcttctgtttggctttttcatccccctgatgttcatgattttttgttacacctttatcgttaaaactctggtccaggcgcagaacagtaaacgccacaaggccatccgggtcattattgcggtggtgcttgtgttcttggcctgtcagattccacacaacatggtgctgttggtgactgctgcgaatctgggtaaaatgaacaggagctgtcaaagcgagaagctgatcggctatactaagacagtcacggaggtgctagccttcctgcactgctgcttgaatccggttctatatgcctttatcggccagaagttccgaaattattttcttaaaatccttaaagatctctggtgtgttagacgaaagtataagtcttcagggtttagctgcgccggacggtactccgaaaacatcagtaggcaaacttccgaaacagctgataatgacaatgcttcttcctttaccatgtag

SEQ ID NO: 218049 - DNA, 1137 bp, synthetic construct
  misc_feature 1..1137: note = Description of Artificial Sequence: Synthetic coding sequence
  source 1..1137: mol_type = other DNA
atggatctcgggaagcctatgaagagtgtgctggtggttgccctcttggtgatttttcaggtgtgcttgtgccaggacgaagtgacagatgattatattggcgataacactactgtagactatacattgtttgagagcttatgtagcaagaaggatgtgcgaaactttaaggcctggtttctcccgataatgtactccatcatttgtttcgtggggcttcttggcaatggactagtggtgctcacctatatctacttcaaaagactgaagacgatgactgacacctatctgcttaaccttgcagtggcagatatactgttccttttaactcttcccttttgggcttattctgcggctaaaagctgggtcttcggtgtgcatttttgtaaacttattttcgccatttataaaatgtcgtttttttccggcatgctgcttctgctttgtatttcaattgaccgttacgttgccattgtgcaggctgtgtctgcccatcgccacagagcacgggttctcctgattagcaaactcagctgtgtagggatctggatactcgctaccgtgctatcgattccagaactgctttattctgatctgcagcgtagcagctccgaacaggccatgagatgcagccttatcaccgagcacgtggaagccttcatcaccatccaggtggcccagatggtcataggttttctagtcccgctgctggcaatgtctttctgctatctcgtgattattaggaccctactccaggcccgaaacttcgagcgaaataaagccattaaagtaattatcgcggtcgtggtggtgttcatcgtttttcaacttccctacaacggggtcgtgcttgcccagaccgtggccaatttcaatattacatctagcacgtgcgagctgagtaaacaattaaatatcgcttatgacgtaacctactctctggcatgtgtgaggtgttgcgtcaacccgttcctgtatgctttcattggcgtaaaatttcgtaatgacctctttaagctctttaaagatctcggctgcctctcccaggaacaactccgccagtggtcttcctgtcgacatattcgtcgctcatccatgtcagtggaagccgagaccacaactaccttttctccctag

SEQ ID NO: 218050 - DNA, 1068 bp, synthetic construct
  misc_feature 1..1068: note = Description of Artificial Sequence: Synthetic coding sequence
  source 1..1068: mol_type = other DNA
atggattatacactggacttgtcggtgactacagtcacagactactactaccctgacatattcagttccccgtgcgacgctgaacttatccaaaccaacggcaaattactgctggctgtgttctactgtctcctgtttgtgttcagtttattgggcaattctctcgtgatactcgtcctggtcgtgtgtaagaagcttcgcagtatcacagacgtttacctgctcaatttagccctatcggatctgctgtttgtgttcagctttcctttccagacatactatctgttggaccaatgggtttttggaactgttatgtgcaaggtcgtgagcgggttttactacattggtttttactcttctatgttcttcatcaccttgatgagcgtggacagatatctggccgttgtgcacgctgtgtatgcattgaaggtgcggacaattcgtatgggcacgactctgtgcctcgcggtttggctgaccgcaatcatggcaactatccctctgttagtattctaccaggtcgccagcgaggacggtgtcctgcagtgttactccttctataaccagcagaccctgaagtggaagatctttacaaactttaaaatgaatatccttgggctcctgatcccgttcacaatcttcatgttctgctatatcaagattctgcaccagttaaagcgatgccagaaccacaataaaaccaaggccataaggttagtgctgattgtggttattgcctccctacttttctgggttccttttaacgtggtcctgtttctgaccagcctgcattctatgcacatcttagacggctgctcaatatcacagcaactaacatacgccacgcatgtgacagaaataatctcatttacccattgctgtgtcaacccagtgatctatgcctttgtgggcgaaaagtttaaaaaacacctgagtgagattttccagaaaagttgttcacagattttcaactacctcggtaggcagatgccaagggagtcgtgcgagaagtcttccagttgccagcagcactctagtcgaagttccagcgtggactatattctctag

SEQ ID NO: 218051 - DNA, 819 bp, synthetic construct
  misc_feature 1..819: note = Description of Artificial Sequence: Synthetic coding sequence
  source 1..819: mol_type = other DNA
atgaggaatttgttcaggcagatgacctactacttgctagatcaatgggtgtttggcaccgtaatgtgcaaggttgtgagcggcttttattatatcgggttttatagctccatgtttttcatcaccttaatgagtgtcgatcgatatctagctgtggttcacgcagtgtatgccttaaaagttagaaccatacgtatgggaaccaccttatgcctggcagtgtggctgaccgccatcatggcaaccatccccctcctcgtgttttatcaggtggccagtgaagatggagtactccagtgctactccttctataatcagcagaccttgaagtggaaaatatttactaactttaagatgaatatcttgggattactgatccccttcacgatttttatgttttgctatattaagattctacatcagttgaagagatgtcaaaatcataataaaactaaggcaatccgtctggtcctaatcgtcgtgatcgcctccctgctgttctgggtgccgtttaatgtcgtgttgttccttacaagtctgcactccatgcatattctggatggatgcagcataagtcagcagctcacatacgctacacatgtgaccgaaataatcagctttacccattgttgtgtcaatcctgtgatctacgcctttgttggcgaaaaattcaaaaaacacctgtctgaaatcttccagaaaagctgcagccagatttttaactatctgggacgtcagatgcccagagaaagctgtgagaagagctcttcatgtcagcagcattctagccggtcttcatccgttgactatatcctgtag

SEQ ID NO: 218052 - DNA, 1074 bp, synthetic construct
  misc_feature 1..1074: note = Description of Artificial Sequence: Synthetic coding sequence
  source 1..1074: mol_type = other DNA
atggctgatgactatggcagtgagtctactagcagtatggaggattatgttaattttaatttcacagatttctactgcgagaagaacaatgtgcggcaatttgcctcgcactttttgccacctctgtattggctcgtgttcatcgtgggggctttagggaattctcttgtcatcttggtgtattggtattgcacacgtgtgaaaaccatgacggacatgttcttgcttaatctggccatcgctgatctgctttttctggttaccctgcctttctgggcaatcgcagctgcagatcagtggaagtttcagacctttatgtgtaaagtcgtgaactctatgtacaaaatgaatttctattcatgcgttctgctcatcatgtgcatcagcgtggaccgctacatcgctatcgctcaggcaatgagggctcatacttggcgggaaaagagactattatatagcaaaatggtgtgtttcactatttgggtactagcagccgcactatgcattccagagatcctgtatagtcagatcaaggaggaatcagggattgccatatgtaccatggtttacccttccgatgagtccaccaaacttaagtcagcggttcttaccctcaaagtaattctgggctttttcttgccctttgttgtaatggcttgctgttatacaatcatcattcatacattgatacaggcaaagaaaagctccaagcacaaggccctcaaagtcactataactgtcctgacagttttcgtgctgagccagttcccttataattgcatcttgctggtccagaccatcgatgcttatgccatgtttattagcaactgtgcggtgtctacaaacattgacatctgcttccaggtcactcaaaccatagcgttctttcatagttgcctcaacccggtcctgtatgtattcgttggcgagcgatttaggagagatctggttaagactttaaaaaacctgggatgcatttcacaggcccagtgggtctcattcactcgccgtgaaggcagccttaaattgtcttccatgcttttggagaccacctctggggctctgtccctgtag

SEQ ID NO: 218053 - DNA, 1110 bp, synthetic construct
  misc_feature 1..1110: note = Description of Artificial Sequence: Synthetic coding sequence
  source 1..1110: mol_type = other DNA
atgacccccactgattttacaagccccatcccaaacatggccgatgattatggctccgagtccaccagtagcatggaggactacgttaacttcaattttacagatttctattgtgagaagaataacgttagacagttcgccagccattttctgccccctctgtactggcttgtattcattgtaggcgctctgggtaactcattagtcatactggtgtactggtattgcacacgcgtcaaaaccatgactgatatgttcctgctaaatttagctatcgcagacctcctctttctcgtcacattgcctttctgggcaatcgccgctgccgaccagtggaaatttcagacttttatgtgcaaagttgtgaattcaatgtacaagatgaacttttactcctgcgtgttactaatcatgtgcatctccgtagatcggtacatagccattgcacaggccatgcgtgcacacacgtggcgagagaagaggttgctgtattcaaaaatggtttgttttaccatctgggttctggccgcagccctgtgcatccccgaaatcttatattcacaaattaaagaggagtcgggtatagcgatctgtaccatggtatacccaagcgacgaatcaaccaaactgaaatctgccgtgctgactctgaaggtcatcctaggcttcttcctgccattcgtcgtgatggcctgctgttatacgattatcatccacacactgatccaggctaagaaatccagtaaacacaaagccctgaaggtgaccatcacagttttgactgtgtttgttctgagtcagttcccatataactgcattttgctcgtgcagaccatcgacgcttatgccatgttcatatccaattgtgcagtctccaccaacattgatatatgctttcaagtcacccagactattgcattctttcattcttgcctaaacccggtcctgtacgttttcgttggagagagattcagaagagacctggtaaaaacgctcaaaaacctagggtgcatttcacaggcccaatgggtgtctttcactcggcgagaaggcagcctgaaactgtcttcaatgcttctggagaccactagtggggcactttcactgtag

SEQ ID NO: 218054 - DNA, 1074 bp, synthetic construct
  misc_feature 1..1074: note = Description of Artificial Sequence: Synthetic coding sequence
  source 1..1074: mol_type = other DNA
atggccgacgattatggcagcgaatcaacgtcctccatggaggattacgtaaatttcaactttacggacttttattgtgagaaaaataacgtgcgccagttcgccagccacttcttgcccccactgtactggctcgtgttcatcgtgggagcactcggtaacagcttggtcatcctggtgtactggtattgcacacgcgtcaaaacgatgacagacatgtttctcctgaatcttgcaatcgctgacctgctgtttttggtgactcttcctttttgggccattgccgctgcagatcaatggaagttccagactttcatgtgtaaggtagtgaattctatgtataagatgaatttctactcatgtgtcttgctgatcatgtgcatcagtgtcgaccgctacatcgccatagctcaggccatgagggcacatacgtggcgcgagaagagattactgtactcaaaaatggtgtgtttcacaatttgggtgctcgcggctgctttgtgtattcctgaaatactatattcacagatcaaagaggaaagtggcatcgctatctgcacaatggtttacccaagtgacgagtcgaccaagttaaagtctgccgttctgactctgaaggttatcctaggcttcttcctaccttttgtggttatggcttgctgctacaccataattatacacaccctgatccaggctaaaaaaagctctaagcacaaagctctcaaagtgaccatcacggtgctcaccgtgtttgtactttctcaattcccttacaattgtatcctcctcgttcagacaatcgacgcttacgcaatgttcatctccaactgcgccgtgtccacaaacatcgacatctgtttccaggtgacccagacaattgcattctttcactcttgcctcaatccggtactctatgtctttgtgggggagaggttcagacgcgacctcgtgaagacactgaaaaatctcggatgcattagtcaagctcagtgggtatcattcactaggagagagggatcactgaaactcagcagcatgctcctggagaccacatctggcgctctcagtctgtag

SEQ ID NO: 218055 - DNA, 1053 bp, synthetic construct
  misc_feature 1..1053: note = Description of Artificial Sequence: Synthetic coding sequence
  source 1..1053: mol_type = other DNA
atggcactggagcagaaccagtcaacagattattattatgaagagaatgagatgaatggaacgtacgattactcccaatatgagcttatatgcatcaaggaagatgtgagggaatttgctaaggtgttcttacccgtgtttctaactatcgtttttgtgatcggcctcgccggaaattccatggttgtggctatctacgcctattacaagaaacagcggaccaaaaccgacgtctacatccttaacctcgccgtggctgacctgttgctactcttcacccttcccttctgggcggtgaacgctgtgcacggctgggttcttgggaaaatcatgtgtaaaataacatctgctttgtataccctgaacttcgttagtgggatgcagtttctggcgtgcatctcaatcgatcgttatgtagcagtgactaaggtcccctcgcagagtggagttgggaaaccctgctggatcatatgtttttgtgtgtggatggctgcgatcctactctccatcccccagttggtgttctacactgtcaatgataatgccagatgcatcccaattttcccaagatacttaggcaccagtatgaaagctcttattcagatgttagaaatctgtatcggattcgttgtgccctttcttatcatgggcgtgtgctacttcatcacggcacgcacactcatgaagatgcctaatattaagattagtagacctctgaaagtgctgctgaccgtggtgattgtgtttattgtgacacagttgccttacaacattgtcaaattctgtcgggctatcgatatcatctattccctgattacctcctgtaatatgagcaaacggatggacatcgctatccaggtgactgagtccatcgcactctttcactcctgtctgaaccccatcttatatgttttcatgggtgcatctttcaaaaactatgtgatgaaagtagctaaaaaatatggctcttggcgtcgacagcgtcaaagtgtcgaagaattcccatttgattccgaagggcctaccgaaccaacatctacttttagtatctag

SEQ ID NO: 218056 - DNA, 825 bp, synthetic construct
  misc_feature 1..825: note = Description of Artificial Sequence: Synthetic coding sequence
  source 1..825: mol_type = other DNA
atggccctagagcaaaaccagtctacagactactactatgaggagaacgaaatgaatgggacctacgattactctcagtatgaattgatctgcatcaaggaagatgtcagagagtttgcaaaagtattcctcccagtgttcttgacgatcgtttttgtcattggacttgctggaaacagtatggtagtagccatctacgcgtactataaaaaacaaagaactaagaccgatgtgtacattctgaacctggcggttgccgatctgctgctgttgtttaccttgccattttgggcagtaaacgctgtccacggttgggtgttagggaagataatgtgcaagatcacgagcgccctttacacattaaatttcgtgagcggcatgcagttcttggcctgtatttctatcgatcgatacgttgcagtgaccaaggtgccctctcagagcggcgtcggcaagccatgttggatcatctgcttttgcgtgtggatggcggctatactgctttccattccacagctcgttttttacactgtgaacgataatgccagatgtattcctatcttcccgagatatctcggtactagcatgaaagcccttatccaaatgctggagatttgtattggatttgtggtgccattcctaatcatgggggtttgttatttcataactgccaggacactgatgaagatgccaaatataaaaatttcgcgtccattgaaagtcctcctgactgtggtgattgtattcattgtgacccagctgcccttcgcctggatccacatgaatgatgcattcccctccaataagacgagtgccctgttttag

SEQ ID NO: 218057 - DNA, 1071 bp, synthetic construct
  misc_feature 1..1071: note = Description of Artificial Sequence: Synthetic coding sequence
  source 1..1071: mol_type = other DNA
atgatttacacacgatttctgaagggcagcctgaagatggcaaattataccttggcccctgaagacgagtacgacgtgctgatcgaaggggagttggagtcagacgaggcggaacaatgtgacaagtatgacgctcaggcactcagcgcccaacttgtaccctcactgtgctcagcagtcttcgtgatcggcgtcctcgacaatttgctggtggtgttgatcttggtgaaatataagggtttgaaacgcgtcgaaaacatttatctgctgaacctggcggtatcgaatctgtgtttcctgctcactctcccattttgggcccacgccggaggagatccaatgtgcaagattttaataggtctctacttcgtggggctgtactccgagacatttttcaattgtctgcttactgtgcagaggtatctggtattcttacacaaaggtaattttttctctgctcgaaggagagtgccttgcggtatcatcacctccgtcctcgcatgggtaacagccatccttgctaccctcccagagttcgtggtttataagcctcagatggaagatcagaaatacaaatgcgctttcagccgcaccccttttttgccggctgatgagacattctggaaacacttcctcactctgaaaatgaacatttctgttttagtgctgcccctttttatctttacctttctgtatgtgcagatgaggaagactctccgtttccgagagcagagatattcactgtttaagttagtcttcgccatcatggttgttttcctcttaatgtgggccccatacaacatcgccttcttcctttccacctttaaggagcacttttccctctccgattgtaagtcatcttacaacctggacaagtctgttcacattacaaagctgatcgctactacccactgttgtatcaacccactgctttacgcattccttgacggcacctttagtaagtatctgtgtcgctgctttcacctgagatcaaacaccccactgcagcctcggggacagagtgcccagggtacatcccgtgaagagcctgaccattctaccgaggtatag

SEQ ID NO: 218058 - DNA, 1035 bp, synthetic construct
  misc_feature 1..1035: note = Description of Artificial Sequence: Synthetic coding sequence
  source 1..1035: mol_type = other DNA
atggcgaactatactttagcacctgaggatgaatacgacgtgttaattgaaggcgagttggagagtgacgaagccgagcaatgtgacaaatacgatgcccaggctttatctgcccaacttgtgccctctctgtgcagcgctgtcttcgtcattggggttttggacaatctgctggtggtgctgattctggtcaaatacaaagggctaaagagagtggaaaacatttatctgcttaatctggctgtgagcaacctatgttttttgttaaccctgcccttctgggcacatgctggcggtgatcctatgtgtaaaatcctgatcggtctgtatttcgtggggctctactcagagacattcttcaactgcctgttgacggtgcagcgttacctggtcttcctgcataagggcaatttctttagcgctagacggagggtgccatgtgggattattacttctgtcctggcctgggtgactgccatccttgctactctgcctgagtttgtcgtctataagccccagatggaggatcagaaatacaaatgcgccttttctagaactccctttctgccggcagatgagactttttggaagcactttctcactctgaagatgaacattagtgtgctcgtgctgccactattcatctttacgttcctgtacgtccagatgcggaagacgcttagattccgggagcaacggtacagcctgtttaaactggtgttcgctattatggtcgttttcctgctcatgtgggcgccttataatattgcctttttcctgtccacgttcaaggaacacttttcactgagcgattgtaagtcaagctacaacctggacaaatcagtgcacattactaaactaatcgcgaccacacattgttgtattaatcctttgctctacgcatttctcgatggaacattctccaagtacctctgcaggtgtttccatctcaggtcgaacactcccctgcagcccaggggacagtctgcccagggaacttcacgggaggaacccgatcacagcacggaagtttag

SEQ ID NO: 218059 - DNA, 1035 bp, synthetic construct
  misc_feature 1..1035: note = Description of Artificial Sequence: Synthetic coding sequence
  source 1..1035: mol_type = other DNA
atggccaattacaccctggcaccagaggacgagtacgacgtactcatcgagggtgagctcgagtccgacgaagccgagcagtgcgacaagtacgatgcccaggcgctcagcgcccagctggtaccctctctgtgcagtgccgtgttcgtcatcggcgtcctggataacctgctcgtcgtgcttatactcgtgaagtacaagggcctgaaaagagttgagaacatttatctcctgaatctggcggtcagcaatctatgcttcctcttgacactgcccttctgggcccacgccggtggagatccgatgtgtaagatcctgatcggattgtacttcgttggtttgtacagtgaaacatttttcaattgtcttctgacagttcagaggtacctggtttttcttcataaaggtaatttctttagcgcgcgaaggcgggttccctgtggtatcatcacaagtgtattagcctgggtcaccgccatcctggctacattgccagaatttgttgtgtataagccacaaatggaggatcagaagtacaaatgtgccttcagtcgcaccccatttctgcctgctgatgaaaccttttggaagcatttcttgactctcaagatgaacatcagcgtgctggtcctgcccttgtttatcttcaccttcctgtatgtgcagatgcgtaagacactgcgctttcgggaacagcgctacagcctgttcaagttggtgttcgctattatggttgtttttttactgatgtgggccccatataatatcgccttctttctttctaccttcaaagagcacttcagcctttcagattgtaaatcttcctataatctggacaagagcgtccacataaccaagcttatagctacgacccattgttgtatcaatccgctgctctacgcttttcttgacggcacattcagtaagtatctgtgcaggtgttttcacctcaggagcaacacgccgctacaaccaagagggcagtctgcccagggtacctcgcgagaggagcccgaccatagtactgaagtctag

SEQ ID NO: 218060 - DNA, 1035 bp, synthetic construct
  misc_feature 1..1035: note = Description of Artificial Sequence: Synthetic coding sequence
  source 1..1035: mol_type = other DNA
atggctaactacaccctggcgcctgaagacgagtatgatgttcttatagaaggcgagttagaaagcgatgaggcagagcaatgcgacaagtacgatgctcaggctctgtctgcccagttggttccctccctttgtagtgccgtcttcgtgatcggggtgctcgacaacttactggtcgtcctcattctcgtaaagtataaaggcttaaagagggtggagaacatctacctgctaaacctcgccgtcagcaacctgtgcttcctcctgaccctgccgttctgggcccacgccggtggggacccaatgtgcaagatcctgatcggactgtattttgtggggctctactccgaaaccttctttaactgcctgctgacagttcagcggtacctggtgtttttgcacaaagggaatttcttttccgcccgaagaagagtgccgtgtgggattataacctccgtcctcgcctgggtgacagctattctcgccacattacctgaattcgttgtgtacaaaccacaaatggaagatcagaaatacaagtgtgcgttttcccgtaccccctttctgcctgctgatgagactttttggaaacattttctgactctcaagatgaacatatctgtcctggtattaccactttttatttttacatttttgtacgtgcaaatgaggaagaccttgcgttttagggagcagcgctactcactgttcaagctggtgtttgctattatggtggtctttctgctcatgtgggccccttacaatattgccttttttttgtccacattcaaggagcacttctcactgtccgactgcaagtcttcctataacctcgacaagtcagtgcatatcacgaaactgatcgccaccacacactgctgtattaatccactactttacgcgtttctcgacgggactttctccaagtacctgtgtaggtgcttccatcttcgatctaacaccccactgcaacccagggggcagagcgctcaggggacgtcccgcgaagagccagatcattctaccgaggtgtag

SEQ ID NO: 218061 - DNA, 654 bp, synthetic construct
  misc_feature 1..654: note = Description of Artificial Sequence: Synthetic coding sequence
  source 1..654: mol_type = other DNA
atggcaaattacaccctcgcccctgaagacgaatatgacgtgctgattgagggggagcttgagtccgatgaagccgagcagtgtgacaaatacgacgctcaggctttgagcgctcagctagtgccctccctgtgtagcgccgtcttcgtcattggagttctggacaatttattggtggtgctaatcttagtcaagtataaaggactgaagcgcgtggagaacatctaccttctcaacctggctgtcagcaatttatgttttcttctgaccctcccattctgggcacacgctggcggagacccaatgtgcaaaatcctgattggtctctattttgtggggctgtactccgagacatttttcaattgccttttgacagtgcagcgctacctggtctttttgcacaaagggaactttttttccgccaggcgtcgggtgccctgcggaattatcaccagcgtcttagcttgggtgactgccattctggccacactacctgaatttgtggtgtataagccacaaatggaagaccagaagtacaagtgtgcgttctctaggaccccatttctgcctgctgatgagactttttggaaacacttcttaaccttgaagatgaatatatcagtgctggttttaccactctttatcttcacgtag

SEQ ID NO: 218062 - DNA, 1194 bp, synthetic construct
  misc_feature 1..1194: note = Description of Artificial Sequence: Synthetic coding sequence
  source 1..1194: mol_type = other DNA
atggcccctatctccctatcttggctccttcgattggctactttctgtcatttgaccgtcctgctggctggacagcaccacggtgttacaaagtgcaacataacttgttcgaaaatgacatctaagataccagtagccttgctcattcactatcagcagaaccaggcctcgtgtggcaagcgggctattattctagaaacgcgacaacatcgtctgttttgtgctgatcccaaggagcaatgggtgaaagatgctatgcagcacctggacaggcaggccgcagcactcacaagaaatggcggtactttcgaaaaacagattggcgaagttaagccccgaaccacaccggctgctggaggcatggatgaatccgtggtgctcgaacctgaggccacgggtgagtcctcttctctcgagccaactcctagtagccaagaagctcagagggcattggggacaagccctgagctgccaaccggcgtcaccggctcatctggcactcggctgccgccaactcctaaagcacaggacgggggacccgtgggaactgaactgtttcgggtacccccagtgtcgactgctgcaacttggcagtcaagcgccccacatcagcccggtccgtccctgtgggcagaggccaagacatcagaagcgcctagcacacaggacccctcaacacaggccagcacggcttcatcaccagctccagaggaaaacgctccctcggaaggtcaacgggtttggggccagggtcagagccccaggcccgaaaattctcttgagagagaagaaatgggacctgttcctgcccatacagacgcgttccaggactgggggccaggcagcatggcccacgtgagcgttgtgcctgtgagttctgaaggaaccccgagcagagagcctgtggcctctggatcttggacgccaaaggccgaggagccaattcacgccacaatggatcctcagagattgggcgtccttatcacccccgtaccagacgcccaggccgctacacgtaggcaggcagtcggcctcctggcattcttgggcttgctcttctgcctgggcgtggccatgttcacatatcagtctctgcaaggctgccccaggaagatggcaggagaaatggccgaagggctacgatatatacctcggtcctgtggcagcaacagttacgtgctggtccctgtttag

SEQ ID NO: 218063 - DNA, 1164 bp, synthetic construct
  misc_feature 1..1164: note = Description of Artificial Sequence: Synthetic coding sequence
  source 1..1164: mol_type = other DNA
atgcgagaaccccttgaggcctttaagctcgccgacctcgactttcggaagagttccctcgcttcgggctggaggatggctagcggtgcatttacaatggaccagtttccagagtctgtgacggagaatttcgagtatgacgaccttgccgaagcgtgctacatcggggacatagtagtcttcggcaccgtttttctgagtattttttatagtgtgatttttgccatcgggctggtcggcaacctactcgtggtgtttgcactgaccaactctaaaaagccaaagtccgtgaccgacatctacttgttgaatttagccctgagcgatctgcttttcgttgccacactcccattttggactcactatctgatcaacgagaaggggttacacaacgcaatgtgtaaatttaccacagccttcttctttattgggtttttcggttctatcttttttatcaccgtaatttcgatcgacagatacctggccatcgtcctcgctgccaactctatgaacaatcgtactgtgcaacatggcgttacgatctctctgggagtgtgggctgctgcgatcctggttgcggctccccagttcatgttcaccaaacaaaaagagaacgagtgtcttggcgactatccggaagtgctgcaggaaatctggcccgttttacggaacgtcgaaacaaactttctaggcttcctgttacctctgttgataatgtcttattgctattttcgtatcatacagacacttttctcgtgtaagaatcataagaaggccaaagccattaagctcatcctcctggtcgtgatagtgtttttcctgttttggacaccatataatgtgatgatctttctagagaccctaaaactatatgacttttttcccagctgtgatatgcgcaaggatttgcggcttgcactgagcgttacagagactgtggccttctcacattgctgcttgaacccactaatatacgcttttgccggtgagaagtttagacgttatctgtatcacttgtacggtaagtgtctcgcggtcctgtgcggtagatctgtgcacgtggacttctctagttctgagagccagcggagccgtcacggctctgtgctttcctccaatttcacctaccacacctcagatggagacgcactgctgctgctctag

SEQ ID NO: 218064 - DNA, 1068 bp, synthetic construct
  misc_feature 1..1068: note = Description of Artificial Sequence: Synthetic coding sequence
  source 1..1068: mol_type = other DNA
atggaccagtttcccgaaagcgtcacagagaactttgaatatgatgacttggcggaggcctgctacattggcgacattgtggtctttggaaccgtctttctgtccattttttattccgtgatattcgcaatcggccttgtcggcaacctgctcgttgtgttcgctctgaccaattccaagaagcctaaaagcgtgaccgacatatacttattaaacttggccctgtcagatttgctcttcgtagccacgctgcccttctggacacactatctcatcaacgagaagggtctccacaatgcaatgtgcaaattcactaccgctttcttctttattggcttctttggatccatattctttattactgttatctcaattgaccgataccttgcaatcgtactggcagccaactcaatgaataataggactgtgcaacatggagtgacaatcagcctgggagtttgggccgctgctattcttgtagctgcaccacagttcatgtttaccaaacagaaggagaacgagtgtttgggcgactatccagaggtgctgcaagagatctggcctgtgctgcgcaacgtggagactaactttttgggttttttactgccactgctcatcatgtcctattgctatttccgcattatacagacactattctcatgcaagaaccataaaaaagctaaagcaattaaactgattctgctggtcgttatagtgttcttcttgttctggaccccctataatgtgatgatcttcctcgaaaccctgaagctctacgatttcttcccctcgtgtgacatgcggaaggacctcaggctggccctgtccgttactgaaaccgtggctttttcccactgttgtctcaacccgttaatctacgcctttgccggagaaaaattccgaaggtacctctatcacctgtacggaaagtgcctcgctgtgctgtgtggcagatccgtgcacgttgatttttccagcagcgagtctcagcggtcccggcatggctcagtgctttctagtaacttcacctaccacacctcagacggcgatgcactgctattgctatag

SEQ ID NO: 218065 - DNA, 321 bp, synthetic construct
  misc_feature 1..321: note = Description of Artificial Sequence: Synthetic coding sequence
  source 1..321: mol_type = other DNA
atggaccagtttcctgagagtgtgacggagaatttcgagtatgacgacttagccgaggcctgctacatcggggatattgtggtcttcggaacagttttcctctcaatcttctattcagtgatttttgccatcggcctggtaggtaatctcctggttgtgtttgccctgacaaactcaaagaaacccaaaagcgttacggatatttacctcctgaacctggccctgtcagacctgctcttcgtagccactctgcccttttggacccattacctcatcaacgaaaaaggtttacacaatgccatgtgtaagtttactacttag

SEQ ID NO: 218066 - DNA, 501 bp, synthetic construct
  misc_feature 1..501: note = Description of Artificial Sequence: Synthetic coding sequence
  source 1..501: mol_type = other DNA
atggatcagtttcccgaatctgtcacggaaaacttcgaatatgatgacctggccgaggcttgttacatcggcgacattgtagtcttcggaaccgtgtttctgtcaatcttctattccgtgatctttgcaataggcctcgtgggaaatctgttggtcgttttcgccctcaccaacagtaagaagcctaagtcggtgacagacatctatctcctgaacctcgccttgtccgacctgttatttgtggctaccctgcccttttggacccactacctgatcaatgaaaaaggcctgcacaacgccatgtgtaagttcaccacggcattttttttcatcgggttctttgggtctatattttttataacggtgatctccattgacagatatctggcaatcgtgctggccgcaaactccatgaataaccgaaccgtgcagcacggcgttactatatctttgggagtctgggccgctgctatcttggtggcagccccacagtttatgtag

SEQ ID NO: 218067 - DNA, 1092 bp, synthetic construct
  misc_feature 1..1092: note = Description of Artificial Sequence: Synthetic coding sequence
  source 1..1092: mol_type = other DNA
atggcatcaggcaaagcatttacaatggatcagttcccagaaagcgtgaccgagaacttcgaatatgacgacctagctgaggcctgttatattggggacattgtggtgttcggcacagtcttcctgagcatattctactccgtcatcttcgcaatcggcctggtggggaatcttctggtggtgtttgctctcactaacagcaaaaagccaaagagcgtgaccgatatctatctgctcaatttggctctcagtgacctgttgtttgtagctactctgcctttctggactcattacctaatcaacgaaaaaggcctgcacaatgccatgtgtaagtttacaactgctttttttttcataggtttttttggttcaatcttctttataactgtgataagtatagaccgatatctggctatagttctcgctgcgaattcgatgaacaaccggacagtccaacacggggtgaccatttcgctcggggtgtgggcagcagccattctggttgccgctccccagtttatgttcaccaagcagaaagagaatgaatgcttaggggactatcctgaagtgctacaagagatttggccagtgctgagaaacgtcgagacaaacttcttgggtttcttgctacccttattgattatgtcttattgctatttccggatcatccagacgctgttcagttgcaagaaccataagaaggccaaagctatcaagctcatcctgcttgtagtgatagtgtttttcctgttctggacaccctataacgtgatgattttccttgaaactcttaaactttacgatttctttccgtcatgcgatatgaggaaagatctacgcttggcgctgtccgtaaccgagacggtagccttcagccattgttgtctcaatcccctgatctacgcttttgctggagagaagttccggcgatacctgtatcacctttacggcaagtgcctggcagtactgtgtggcaggagcgtgcacgtcgacttcagttcgagcgaatcgcaacgctcccgacacggatccgtgctaagcagtaatttcacatatcacacatccgacggcgacgcgctattgctgttgtag

SEQ ID NO: 218068 - DNA, 1068 bp, synthetic construct
  misc_feature 1..1068: note = Description of Artificial Sequence: Synthetic coding sequence
  source 1..1068: mol_type = other DNA
atggatcagttccccgaatccgttaccgaaaatttcgaatacgacgacctggccgaggcttgttacattggggacatcgtagtcttcggtactgtgttcctaagcatcttctactccgtgatcttcgcgatcggtcttgtgggcaacctccttgtcgtattcgcacttaccaattctaagaaacccaagagtgtaaccgacatctacttgctgaacctggccctgagtgatctgcttttcgtagctacgctgcctttttggacacactatctgataaatgaaaagggtctacataacgcaatgtgtaagttcacgacagcattcttcttcattgggttttttggatccatcttttttataaccgtgatttctattgataggtatctggccatagtgctggcggcaaactctatgaataacagaactgttcagcacggggtgactattagtcttggggtctgggcagccgcaatcctggtcgctgctccacagttcatgttcaccaaacaaaaggagaacgaatgtctgggagactacccagaggttcttcaggagatctggccagttctaaggaatgtagagaccaactttttaggctttctcttaccactgcttatcatgtcttactgctattttcggatcatccaaacattattcagttgtaaaaaccataagaaagccaaggccatcaaactcattctgttagtggtcatagtgttttttctgttttggacaccatacaacgttatgatcttccttgaaactttgaaactatatgacttctttccatcttgcgacatgaggaaagatctccggctggccctcagtgtgacggaaacagtggctttctcccactgttgcctcaacccactcatctacgcctttgccggtgagaaatttcggcgatacctgtatcatctgtatggcaaatgtctcgcagtcctgtgtggtcgctctgtgcatgtggactttagttcttcagaaagccagcgatcacgccacggctctgtgctgtcctctaacttcacttaccatactagtgacggggacgcgctgctgttactttag

SEQ ID NO: 218069 - DNA, 1068 bp, synthetic construct
  misc_feature 1..1068: note = Description of Artificial Sequence: Synthetic coding sequence
  source 1..1068: mol_type = other DNA
atggaccagtttccggagagcgtgaccgagaatttcgagtacgacgacttggccgaggcctgctacatcggtgacatagtggtgtttggaacagtgttcctctccatcttctattcggtgattttcgcgatcggcctggtagggaatctgctggtggtgttcgcattgaccaatagtaagaaacctaagtccgttaccgatatatacctactcaatttggcccttagtgacttgttatttgtcgccactctaccattttggacccattaccttatcaatgagaagggccttcataacgctatgtgcaaatttactacggcctttttcttcattggattctttggttccattttctttattacagtgatatcaatcgataggtatctggccattgttctggcagctaacagcatgaacaatcgaactgtgcaacacggcgttactatctctctcggggtgtgggccgcagctatactggtggccgcaccacagtttatgtttaccaaacagaaggagaacgagtgtctgggtgactatccagaagtccttcaggagatttggcctgtactgcggaacgtggagaccaacttcctaggctttctgctgcccctcctgattatgtcatattgctacttccgcatcatccagacactgttctcatgcaaaaatcacaaaaaagcaaaagctattaagttgatcttgctggtggtgatcgttttctttctgttttggactccttacaacgtgatgatcttcctggaaaccctcaagctgtacgatttctttccaagctgcgacatgagaaaggatctgagattagcgctttctgtcactgaaaccgtggccttcagccactgttgtctcaatcctcttatatatgcctttgcgggtgagaaatttcgccgatacctctatcatctctatggcaaatgtctggcggtgctgtgtggaagaagtgtgcacgtggacttctcaagcagcgagtcacagaggagccgacatgggagcgtgctgtcttcgaacttcacctaccacacatctgatggcgatgccttgctcctcctctag

SEQ ID NO: 218070 - DNA, 324 bp, synthetic construct
  misc_feature 1..324: note = Description of Artificial Sequence: Synthetic coding sequence
  source 1..324: mol_type = other DNA
atggctagagccgctctaagcgccgctccaagtaatcccaggctgctgcgagtagctttgctgctcctgctcctggtggccgcaggcagaagggccgcaggagcctctgtcgccaccgagttaaggtgccaatgcctgcagaccttgcaagggatacatcctaagaacatccaatctgtgaacgttaaaagtccaggcccacactgcgcacagacagaggtgatagcgacgctgaaaaacggcagaaaagcatgcttgaaccctgcctctcctatcgtcaagaagatcattgagaagatgctgaactccgataagagcaactag

SEQ ID NO: 218071 - DNA, 285 bp, synthetic construct
  misc_feature 1..285: note = Description of Artificial Sequence: Synthetic coding sequence
  source 1..285: mol_type = other DNA
atgtctgtcaaggggatggctatcgcgctggctgttatcctctgtgcaacggtcgttcagggtttccccatgtttaagagggggaggtgcctttgcattggacctggtgtgaaagctgtgaaggtcgcagacatcgaaaaagctagtattatgtatccatcaaataactgtgataagatagaggtgataatcacactaaaagaaaataaggggcagcgatgcttgaaccccaagagcaaacaggctagactaatcatcaaaaaagtggagcgaaagaacttctag

SEQ ID NO: 218072 - DNA, 285 bp, synthetic construct
  misc_feature 1..285: note = Description of Artificial Sequence: Synthetic coding sequence
  source 1..285: mol_type = other DNA
atgagtgtgaagggcatggcgattgctttagccgtgattttgtgcgctaccgtcgttcaggggttccccatgttcaaaagagggaggtgcctctgtatcggacccggagtcaaggcagtcaaggtggctgatatcgagaaagccagcattatgtacccatccaacaattgcgacaagatagaagttattattacattgaaagaaaacaaggggcagcgctgtctgaatccaaagagcaaacaggccagattaatcatcaaaaaggtggaacggaagaatttttag

SEQ ID NO: 218073 - DNA, 336 bp, synthetic construct
  misc_feature 1..336: note = Description of Artificial Sequence: Synthetic coding sequence
  source 1..336: mol_type = other DNA
atgtccctgttgccaaggagggcaccacctgtttccatgcgactgctcgcggcagccttgctcctgctgctgctggcactttacactgctagggtggatggctccaaatgcaaatgttccaggaaggggcctaagattcggtacagcgatgtcaaaaagctggagatgaagcctaaatacccgcattgcgaggaaaagatggtgattattacaacaaagtctgtgtctcgatatcgcggtcaggagcactgccttcaccctaagttgcaatctacgaaaagattcattaagtggtacaacgcctggaacgagaaaagacgggtctatgaggagtag

SEQ ID NO: 218074 - DNA, 300 bp, synthetic construct
  misc_feature 1..300: note = Description of Artificial Sequence: Synthetic coding sequence
  source 1..300: mol_type = other DNA
atgcgtttgctcgccgctgcactactgctgctgctgttggctttgtacacagccagggtggatgggtcaaaatgtaagtgtagtaggaagggacccaaaatacgctactccgacgtaaagaaactcgagatgaagcctaagtacccccactgtgaggaaaagatggttataatcactactaagagtgtgtccagatacagaggccaagagcactgtctgcacccaaagctgcaaagcaccaagagattcatcaagtggtataacgcctggaatgagaagcgtcgcgtctatgaagagtag

SEQ ID NO: 218075 - DNA, 822 bp, synthetic construct
  misc_feature 1..822: note = Description of Artificial Sequence: Synthetic coding sequence
  source 1..822: mol_type = other DNA
atgtccggcagccaatccgaggtcgcacctagcccccagagcccccgatctcctgaaatggggagagacctgagacccggttcccgcgtgctccttctgttgctgcttctactgctggtctatctgacccaaccaggaaatggcaatgaggggtccgtgaccggcagctgctactgtgggaagcgaatcagcagtgactctccacctagtgtgcagtttatgaaccggcttaggaagcatctccgagcgtatcataggtgcctttattatactcggttccagctgttgtcgtggagtgtgtgcggaggaaacaaagatccttgggtccaggagctgatgtcctgtctggatctgaaagagtgtggccatgcatactccgggattgtggcgcaccagaaacacctcctgcctacatctccccctatcagccaggcctccgagggcgcaagctccgacatccacacaccagcccaaatgctgttatctactttgcagtcaactcagagacctaccctccctgtcggtagcctgtccagcgataaggagctgaccagacctaacgagacaacaatccacaccgccggacactctctggcagccggtccagaagccggagaaaaccagaagcagcccgaaaaaaatgctggcccaaccgcccgaacctcggccactgtacccgtgctctgcttactggcaatcatctttatactgaccgccgctctttcatacgtcctctgtaaaaggcgcagaggccagagcccccaatctagccctgacctgcccgtgcattacattccagtggctcctgacagtaacacgtag

SEQ ID NO: 218076 - DNA, 822 bp, synthetic construct
  misc_feature 1..822: note = Description of Artificial Sequence: Synthetic coding sequence
  source 1..822: mol_type = other DNA
atgtctggcagccagagtgaggtcgctccgtcacctcagagcccgaggtctcccgaaatgggaagggacctgcgcccaggatcaagagttctgctcctccttttgctgcttctgttagtgtaccttactcagcccggaaatggaaacgagggtagtgtgacaggttcctgttattgcggaaaaagaatatcatctgactcccccccaagcgtccagtttatgaatcgactgaggaagcatctgagggcatatcataggtgtctctattacactaggttccagctgttatcttggtcagtttgtggcggaaacaaagatccatgggttcaggagctgatgtcctgcctggatctcaaggagtgcggacatgcatatagcggaatcgtggcacaccagaagcacctgctgccaaccagcccgccaatctctcaagcttctgaaggcgcttcctctgacatccatactccagctcagatgttgctcagtaccctgcaaagcacccagaggccgaccttgcctgtgggctcactctcatctgacaaagagctaacacgacccaacgagaccacgatccacacggctggacattcactggcggcaggtcctgaggcaggagagaaccagaaacaaccggaaaagaacgctggtccaacggcaaggactagcgcaaccgtccccgtgctgtgtctgctggccataatttttatcctgacagctgccctatcatatgtcttgtgtaagcgcagacgcggtcagagcccacaatcttcccctgatctgccagtccactacatcccagtggcccctgactctaacacctag

SEQ ID NO: 218077 - DNA, 360 bp, synthetic construct
  misc_feature 1..360: note = Description of Artificial Sequence: Synthetic coding sequence
  source 1..360: mol_type = other DNA
atgaaggttcttatttcatctcttctgctattgctccccctcatgctgatgtccatggtgagctcaagcttgaaccctggagtggccaggggccaccgcgaccgcggacaggcttcccgcagatggctacaggagggcggacaggaatgcgagtgtaaggattggttcctcagggcaccacgcaggaagttcatgacagtgtccggtttgcctaaaaaacagtgcccctgcgatcattttaaaggtaacgtgaagaaaacccggcatcagcggcaccaccggaagccaaataaacactctcgggcttgccagcagtttctgaaacagtgccaactcaggtctttcgctctgcccctatag

SEQ ID NO: 218078 - DNA, 360 bp, synthetic construct
  misc_feature 1..360: note = Description of Artificial Sequence: Synthetic coding sequence
  source 1..360: mol_type = other DNA
atgaaggttctgatcagctctcttctcctcctactgccgctgatgctcatgtcgatggtgtcctcttccctcaaccccggtgtagctcgaggacacagagatcgcggtcaggcctcacgtaggtggttgcaggaaggtggccaagagtgcgaatgcaaggattggtttttgcgcgcaccccgtagaaagtttatgacagtaagcggactccctaaaaaacagtgcccatgcgaccattttaaggggaatgtcaagaaaacccgccatcaaagacaccaccggaaacccaacaaacattcgcgggcttgtcagcagttcttgaagcagtgccaactgcgctcatttgcactgccactttag

SEQ ID NO: 218079 - DNA, 324 bp, synthetic construct
  misc_feature 1..324: note = Description of Artificial Sequence: Synthetic coding sequence
  source 1..324: mol_type = other DNA
atggcacgggcaacattatcagctgcgccttcaaacccgagactgttgcgggtggcgctgctgttgctgcttctagtggccgcttcacgtagagcggcaggtgcgccactggccactgaactccgatgccagtgcctgcaaactctgcagggcattcatctgaaaaacatccaatctgtgaaggtaaaatctcctggaccacattgcgcccagacggaggtaattgccacgctgaagaacggccaaaaggcctgtctgaacccagcctctccaatggtgaagaagatcattgagaaaatgctgaaaaatggcaagtctaactag

SEQ ID NO: 218080 - DNA, 324 bp, synthetic construct
  misc_feature 1..324: note = Description of Artificial Sequence: Synthetic coding sequence
  source 1..324: mol_type = other DNA
atggcccacgcaaccttgtcggctgctcccagtaacccaaggctactacgggtggcgctgcttttactgctgctcgtggctgcctcgcggagggcggctggcgcttccgtggtgacagagttgcgttgtcaatgcctgcagacactgcagggtatccacctgaagaatatccaaagtgtaaatgtcaggagccctggccctcactgcgcccagactgaggtcatagctacgttgaagaacggaaagaaggcatgccttaacccggcttcccctatggtgcagaagattatcgaaaagatattgaacaagggctctactaactag

SEQ ID NO: 218081 - DNA, 345 bp, synthetic construct
  misc_feature 1..345: note = Description of Artificial Sequence: Synthetic coding sequence
  source 1..345: mol_type = other DNA
atgagcttgctctcctcccgcgcagctagagttccaggaccatcgagtagtctgtgtgccttactcgtgcttctcctgctactgactcagcccggtccaattgcctctgccggaccagccgctgcagtcctccgcgagctcagatgcgtctgcttgcagactacccagggcgtacatccaaagatgatttccaacctgcaggtttttgccataggtccacagtgttcgaaagtggaggtggtggcctcccttaagaatgggaaggaaatatgccttgaccccgaggctccattcttgaagaaagttatccagaagatcctcgatggaggcaacaaggagaattag

SEQ ID NO: 218082 - DNA, 1053 bp, synthetic construct
  misc_feature 1..1053: note = Description of Artificial Sequence: Synthetic coding sequence
  source 1..1053: mol_type = other DNA
atgtctaacatcacagacccacagatgtgggatttcgatgatcttaattttacgggcatgccgcctgctgacgaagactactctccctgtatgttggaaaccgaaaccctaaacaaatatgttgtaatcatcgcttacgccttggtgtttctgttgagcctcctgggcaattctctggtaatgctggttattttgtattcaagggtgggacgctcagtgacagacgtttatctgctgaatctggctctcgctgacctcttgtttgccctgactctgcccatttgggccgcttcgaaggtcaacggctggatatttggaacttttctctgtaaagtggtctccttgctcaaggaagttaatttctacagtgggattctcctcctggcatgtatctcagtcgataggtacctggctatcgtacatgccacccgtaccctcactcaaaagaggcacttggtgaaatttgtatgtctcggatgctgggggctttcaatgaacctgtccttacctttctttctgttccggcaggcataccatcctaataactcttcccctgtctgttacgaagtcctggggaatgatacagccaagtggagaatggtgttacgcatcttgccccacacctttggatttatcgttccccttttcgtcatgctcttttgttacggtttcacgctgcgcactctgttcaaggcccacatgggccagaagcacagagcaatgagagtgatctttgctgtggtactgatctttctgttgtgctggctgccatacaacttggtgctgctcgccgatacgcttatgcggactcaggtaatacaggaaagctgcgaaaggcgtaacaacatcggcagggctctggacgcgacagagatccttggattcctgcatagttgtctcaaccctatcatctatgctttcattggccagaattttaggcatgggtttctcaagatcctcgccatgcacgggttagtgtccaaagaattcctcgccagacacagggtgacctcttacacctcttcatccgtaaatgttagctcaaatctatag

SEQ ID NO: 218083 - DNA, 885 bp, synthetic construct
  misc_feature 1..885: note = Description of Artificial Sequence: Synthetic coding sequence
  source 1..885: mol_type = other DNA
atgtctaacatcactgacccacagatgtgggatttcgacgacctgaactttacaggtatgccacctgcagacgaggattactcaccctgtatgctggaaacagagacactgaacaagtacgtcgtgatcatcgcgtatgccttggtttttctcctctctcttttggggaactcactcgtgatgctggtcatattgtacagcagagtggggaggagcgtcaccgacgtgtatctcttaaaccttgccatcgtgcatgcaacaagaactctgacccagaaaaggcacctggtgaaattcgtatgcctgggatgctggggtttgtctatgaatcttagtctgccttttttcctgtttaggcaggcttatcatccaaacaactccagcccggtctgctacgaagttctaggtaacgacacggcaaaatggcgaatggtacttcggatccttcctcacaccttcggcttcattgtgcccttattcgtgatgcttttctgctacgggttcacactgagaacactcttcaaagcacatatgggccagaagcacagggctatgagggtgatcttcgctgtagtattgatcttcctcttgtgttggctgccctacaacctggtgctgctggcagataccctcatgaggactcaggtgattcaggagagttgtgagcgcaggaataatattggtagagcgctcgacgctacagaaattctcggcttcctgcattcctgcctgaatccaatcatctatgctttcatcggacaaaactttcgtcacggattcctaaagatactagccatgcacggccttgtgtctaaagagttcctcgccagacaccgggtgaccagttacacgagcagtagtgtgaacgtgtcgagcaacctctag

SEQ ID NO: 218084 - DNA, 804 bp, synthetic construct
  misc_feature 1..804: note = Description of Artificial Sequence: Synthetic coding sequence
  source 1..804: mol_type = other DNA
atggtgctcgaggtgagcgaccatcaggttctgaatgatgcggaagtcgcagctttgttagaaaacttctcatccagttatgactacggagaaaacgaatccgatagctgctgtacctctccaccatgtccccaagacttttccctgaactttgaccgggcttttcttccggcactctacagcttactcttcctgcttggattactcggaaatggcgctgtagctgccgtcctgctgtcccggaggacagctctttcctcaacagatactttcctcctgcaccttgcggtagcagacacactgttggtgctgacactgcctctctgggccgtagatgcagcagtgcagtgggtattcggcagtgggctgtgtaaagtcgccggagctctgtttaacattaacttctacgctggggctctgctgctggcatgcatctcttttgacaggtatctgaacatcgtgcacgcaacgcaactctatcgtagaggccctcccgctagagtgactctgacgtgtctggccgtctggggcctctgcctgctctttgccctgcctgacttcattttcctaagtgcacaccatgacgaacgactgaacgccacccattgccagtataactttccacaggggtcttcttctggatctggctgcgggtgctgctcctgtgcttgggctgcgccaacaagagaagggtcacggggatctcataggctgcccgcaggcatccatccaggcctgcggcctcagagacctcctacccgtgcctgtgaggcgggtatccgagcccctctctcacccacatag

SEQ ID NO: 218085 - DNA, 1248 bp, synthetic construct
  misc_feature 1..1248: note = Description of Artificial Sequence: Synthetic coding sequence
  source 1..1248: mol_type = other DNA
atggaactgcgcaaatatggccctggaaggctggcagggacggtcatcggcggagctgcacagtccaaaagccaaactaaatcagattctatcactaaagagttcctccctggcttgtacacagccccttcaagcccttttcccccttcccaggtgagcgatcaccaggtcctcaatgatgcagaagttgccgctctactagagaacttcagctcgagctatgattatggcgagaacgagtccgacagctgctgcaccagtccaccttgtcctcaggatttttccctgaactttgatagagctttcttgcctgccctctacagtctcctcttcctgctgggcctgttaggaaatggtgccgttgctgccgtgctcttgtcccgcaggaccgctctgtcaagcactgacaccttcttgctacaccttgcagttgccgacactctccttgtactcactctccccctctgggctgtcgacgctgcggtgcagtgggtgttcggcagcgggctgtgcaaagtggcaggagcactgttcaacattaatttttacgcaggcgctctactgctggcctgcattagctttgatcgatacctgaatatcgtgcacgccacacagctttaccggagaggaccgccagcgagagttacactcacctgcttggccgtttggggattatgtctgctcttcgccttacccgatttcattttcctctcagctcatcacgatgaacgccttaacgcgacccattgccaatataacttcccacaggtcggaaggactgccctgcgcgtgttacaactagttgccggatttttgttgccattacttgtgatggcatattgctacgcccatatccttgctgtcctgcttgtgtcccggggacagcgaagactcagagcgatgcgtctggtggttgtggtggtggtcgcttttgcgctgtgctggactccatatcacctggtggtcctcgttgacatccttatggatctcggagccttggctagaaattgcgggagggaatctagagtcgatgtggccaaaagcgtgacttccggcctaggatatatgcactgctgccttaaccctttgctctacgcttttgtcggggtgaagtttagggagcgtatgtggatgctgctattgcggttggggtgtcccaatcagcggggtctgcagcgccagccttcatcctcaaggagggattccagctggagcgaaacctcagaagcttcttactccggcctatag

SEQ ID NO: 218086 - DNA, 1107 bp, synthetic construct
  misc_feature 1..1107: note = Description of Artificial Sequence: Synthetic coding sequence
  source 1..1107: mol_type = other DNA
atggtcctggaggtctccgatcaccaggttctgaatgacgctgaagtcgcggcactcctggaaaacttctcgtcctcctatgactatggcgagaatgagtccgattcttgttgcacttcccccccatgtccgcaggacttttctctcaatttcgacagagcgttcctgcccgctctctattccctgctgttcctactgggactgctgggcaatggcgcagtggcggctgtactgctgagccggagaacggcattatcctctactgatacattcttgcttcacctggccgtcgctgacacattactcgtccttacacttcctctttgggctgtcgacgccgcagtgcagtgggtcttcgggagcgggctttgtaaggttgcaggggctctattcaatattaatttttacgccggagccctactgctggcttgcatatcttttgaccgttaccttaacattgtgcacgctactcagttatacagaagaggccctccggcaagagtgacattgacttgcctggccgtgtggggactgtgtttgctatttgcactgcctgactttatcttcctaagcgcacaccacgatgagcgtctgaacgctactcattgtcagtacaatttcccacaagtgggcaggacagccctccgggtgctgcaacttgtcgcagggtttcttctccctctcctcgtgatggcctactgttacgctcacatcctcgccgtgctcctagtcagtagggggcagaggagactgagggccatgagactagtggtggtcgtcgtcgtggcctttgccttatgctggaccccgtaccacctggtggttctggtggacatcctgatggatctgggcgctctggcaaggaattgtgggagagagtcacgcgtcgatgtggctaagtcagtaaccagtgggctaggatatatgcattgctgtcttaacccactgctttatgctttcgtgggcgtaaaatttcgcgaacgtatgtggatgttactgctacggcttggttgtccaaatcaacgcggtctgcagcgccaaccatccagttctagacgagactcctcttggagcgagacatccgaggctagttattcggggctgtag

SEQ ID NO: 218087 - DNA, 1119 bp, synthetic construct
  misc_feature 1..1119: note = Description of Artificial Sequence: Synthetic coding sequence
  source 1..1119: mol_type = other DNA
atgaattatccccttacgcttgagatggacctcgagaatctagaggatctgttttgggagctcgatcgcttggataactacaacgatacatcactggtggaaaaccacctgtgccctgccacggagggacccctcatggctagcttcaaagctgtttttgtaccggtggcctactctctgatattcctgctgggcgtcatcggcaacgtactcgtgttagtgatactcgagcgacatcgtcaaacgcgaagcagcacagagacgttcctgtttcacctggcggttgccgacctgctgctggtgtttattctcccctttgcagttgccgaaggctctgtgggttgggtcctgggcacctttttatgtaagaccgtaatcgctctgcacaaagtgaacttttattgtagtagcttgttgctcgcctgcatagcggtagatcgatacttggccatagtacacgctgttcacgcctaccgacatcggcgactgctgagcatccatattacctgcggcacgatttggctggtgggcttccttctggctctgcccgaaatcctcttcgccaaggtctctcagggccatcacaataatagtctgccacggtgcactttttcacaggaaaaccaggccgagacccacgcgtggttcacctcaagatttttataccacgtggcgggattcttacttccaatgctcgtgatggggtggtgctacgttggagtcgtccaccggctccgtcaggcacagaggcgaccacaaagacagaaggcagtgcgggtggcaattctggtgacatcgatctttttcctgtgctggtctccttaccacatcgtcatcttcttggatactctcgctcggctcaaggccgtcgacaacacctgcaaattgaatggtagtcttcccgttgcaattacgatgtgcgagtttctgggtttagctcattgctgcctcaatcccatgctttatacatttgctggcgtgaaattcaggagcgatctgagcaggctgttaactaagttgggttgcaccgggccagcatctttgtgtcagttatttccctcgtggagaagaagtagtctgagcgaatctgagaacgctactagcctgaccaccttctag

SEQ ID NO: 218088 - DNA, 1029 bp, synthetic construct
  misc_feature 1..1029: note = Description of Artificial Sequence: Synthetic coding sequence
  source 1..1029: mol_type = other DNA
atggcagaacacgattatcacgaggattatgggttctccagcttcaacgactcgtcacaggaggagcatcaagattttctgcaattctccaaagttttcctgccttgcatgtacctcgttgtatttgtgtgcggtctcgtgggaaactcattagtgctagtcatttctatcttttaccataagctgcaaagcctcacggacgtgttcctcgtcaatctccccctggcagatttagtttttgtgtgcacgttgcctttctgggcctatgccggaatccacgagtgggtcttcgggcaagtcatgtgcaagtctttgttaggcatctacactattaatttctacacttctatgctgattctcacttgcattaccgtcgatcggttcatcgtggtggtgaaagccactaaggcttacaaccaacaggccaagcgcatgacttgggggaaggtgacttccctgttgatctgggttataagtctgcttgttagtctgccccagataatctatgggaatgtgttcaatctggacaaactgatctgcgggtatcatgacgaagcaatctcgacagtcgtattggccacccaaatgacactgggattcttcctcccgctgctcaccatgatcgtgtgctacagcgtcatcattaagacactgttacacgccggaggattccagaaacacagatcactcaagattattttcctcgtcatggccgtgtttctgttgacccagatgccgtttaacttgatgaagtttataagatctactcactgggaatattatgcaatgacatccttccactataccattatggtcaccgaagctatcgcttatctgcgggcatgtcttaatcccgtattgtacgccttcgtgtccctcaagtttcggaagaatttttggaagttggtgaaggatatagggtgccttccataccttggcgtgagccatcagtggaaatcgtccgaagacaacagtaagactttttcagcaagccacaacgtagaagctacttcaatgtttcaactgtag

SEQ ID NO: 218089 - DNA, 1029 bp, synthetic construct
  misc_feature 1..1029: note = Description of Artificial Sequence: Synthetic coding sequence
  source 1..1029: mol_type = other DNA
atggctgaacatgattaccacgaggattacggctttagctctttcaatgattctagccaagaagaacaccaagatttcctgcagttctcaaaggtgttcctcccttgcatgtacttagtggtgttcgtgtgtgggttagtgggcaatagtctggttctagtgatatctattttttatcacaagctccaatccctgacagacgtgttcctggttaacttgccactggctgacttagttttcgtatgcacattaccgttttgggcatacgccggtattcatgagtgggtcttcggccaagttatgtgcaagtcattgctgggcatctacactattaacttctatacctctatgttaatccttacctgcattaccgtcgataggttcattgtggtggtgaaagctacaaaagcctacaaccagcaagccaagcgcatgacttggggtaaggtgacaagcctactgatttgggtaattagcctgctggtgtcgctcccacagatcatatatggtaatgtgttcaatctcgataaactgatctgtggataccacgatgaggcgatatctaccgtcgtgctcgcaacccaaatgaccctggggttttttctgcccttgttaactatgattgtctgttattcggtcatcattaagaccttgttacatgcgggaggatttcagaagcatagatcgctgaagattattttcctggttatggccgtatttctgctaactcagatgccttttaatctcatgaagtttatccgatctacccactgggagtactacgccatgacctcctttcactacactattatggtcactgaggccattgcatatcttcgtgcttgcctgaaccccgtgctttatgcctttgtcagcctcaaattcagaaaaaatttctggaagttggtcaaagatatcggctgcttaccctacctgggcgtgtcacaccagtggaagtcctccgaagacaatagcaaaacattttccgcctcccacaatgtggaggccacatctatgtttcagctgtag

SEQ ID NO: 218090 - DNA, 1029 bp, synthetic construct
  misc_feature 1..1029: note = Description of Artificial Sequence: Synthetic coding sequence
  source 1..1029: mol_type = other DNA
atggctgagcacgactaccacgaggactatggcttcagcagtttcaatgactcaagccaggaagagcaccaggacttcttgcaatttagtaaagtcttcctgccttgtatgtacctggtcgtgtttgtgtgcgggctcgtaggtaacagcttggtgctggtgatatccattttctaccacaaattgcagagtctgacagatgtgtttcttgtgaaccttccactggccgacctggttttcgtgtgcaccctccctttctgggcttatgccggaattcatgagtgggtgtttggacaggtgatgtgcaaaagtttactgggaatttataccataaatttctacacctccatgcttatactaacttgcatcactgtggatagattcattgtggtggtcaaagccacaaaggcctataaccagcaggcaaagcgcatgacctggggaaaagtcacttccctgctcatctgggtgatctcacttctagtgagtctgccgcaaatcatctacggtaacgtgttcaacttagataagctcatttgtggataccacgatgaagctatttccaccgtggtgctggctacgcagatgaccttaggattcttcctcccactgctgacaatgatagtttgctatagtgtcatcattaagactttactccacgccggaggctttcagaaacacagaagccttaagataatcttcttggtaatggcggtgtttctcctgacgcagatgccgttcaatctgatgaagttcatacgcagcacccattgggagtattacgccatgacctccttccattacaccattatggtgactgaggcgatcgcatatctgagggcctgtctgaaccctgtactgtacgcttttgtgtccctgaaattccgaaaaaacttttggaaattggtgaaggacattggctgtctgccttatctcggggtatcccaccagtggaagagcagcgaagacaactctaaaactttcagcgcttcacacaatgtcgaggcaacctctatgtttcagctctag

SEQ ID NO: 218091 - DNA, 1029 bp, synthetic construct
  misc_feature 1..1029: note = Description of Artificial Sequence: Synthetic coding sequence
  source 1..1029: mol_type = other DNA
atggccgagcacgactaccatgaagattatggcttttcttcctttaatgactccagccaggaggaacaccaggacttccttcagttcagcaaggtgtttctgccttgcatgtaccttgtggtgtttgtgtgcggcctagtaggcaattccttggtactggtgatttcaatattttaccataagctacagagcctgacagatgtgtttctggttaatctacccctggccgacctggtcttcgtgtgtacactgcccttttgggcctatgctggaatccatgaatgggtctttggacaagtgatgtgtaaaagcctgttgggcatttacaccatcaatttctatacctctatgctcattctgacttgcatcacagtagatagattcatcgtggtggtgaaggctaccaaggcctataatcagcaggccaaaagaatgacttgggggaaggtgacctccctgctgatctgggtgatttccttgctggtgtcgttaccgcaaatcatctatggaaatgtgtttaaccttgacaaattaatatgcggctatcatgacgaggcaatctcgacagtggtgcttgccacccagatgactctgggcttcttcctgcccctgctcaccatgatcgtttgctacagcgtcatcataaagaccctgcttcatgcgggtgggtttcagaaacacaggtccctgaagatcattttcctagtgatggccgtgttcttacttacccagatgccattcaacttgatgaagttcattcggtccacccactgggagtattacgctatgacaagctttcattatacaatcatggtgaccgaggcaatcgcttaccttcgcgcttgtcttaaccctgtcctgtacgcgtttgtcagcttgaaattccggaagaacttctggaaactggtgaaggacataggctgccttccctatctcggggtcagtcaccaatggaagtcgtccgaagacaactccaagactttcagcgcatctcataacgttgaggctacatccatgtttcagctgtag

SEQ ID NO: 218092 - DNA, 1089 bp, synthetic construct
  misc_feature 1..1089: note = Description of Artificial Sequence: Synthetic coding sequence
  source 1..1089: mol_type = other DNA
atggatctccatctatttgactattcagagccgggtaacttctctgatattagctggccctgcaattcctccgattgtattgtagtggacactgttatgtgccctaatatgcccaacaagtctgtcctgctatacactctgtcattcatttatatattcatattcgtgattggaatgattgcaaatagcgttgtagtctgggtcaatattcaggcaaagaccacggggtacgacacacattgttacattcttaatttggcaattgcagacctatgggtggtgctgaccatccctgtgtgggtggtaagcctcgttcaacataatcagtggcctatgggtgaactgacgtgtaaggtaacccatctaatattttccataaatctcttcgggtccatattcttccttacatgtatgtcagtggatcgctatctatctattacatactttacaaacacgcccagctcgaggaagaaaatggtgaggcgagtggtctgcattttagtttggcttctcgctttctgcgtgtctttacccgacacgtactatctgaagaccgttactagtgcctcgaacaacgaaacttactgccgctcgttctatcccgagcactctattaaggaatggttaatcgggatggagcttgtttctgtcgtccttgggttcgctgtccccttttcaattatcgctgtcttttatttccttctcgctagagcaatttctgcctcttccgatcaggaaaagcatagctctcggaagatcatattctcttacgtagtggttttcctggtctgttggctgccatatcacgtcgcagtattactagacattttttcgatcctacactatatcccttttacttgtcgactggaacatgccctctttactgccctccacgttacccagtgcctgagcttggtgcactgttgtgtgaaccctgtcctgtatagttttattaaccgcaattatcggtacgagctcatgaaggcctttatcttcaagtacagcgccaagacaggcttaacgaagcttattgacgcctccagggtatcagagaccgaatacagcgctcttgaacaatccaccaagtag

SEQ ID NO: 218093 - DNA, 636 bp, synthetic construct
  misc_feature 1..636: note = Description of Artificial Sequence: Synthetic coding sequence
  source 1..636: mol_type = other DNA
atggacctgcaccttttcgattattccgagcctggcaacttctctgacatttcatggccatgcaattcaagcgactgtattgtggtcgatactgtgatgtgccccaatatgccgaacaaaagtgtcctgttgtacaccctgtcgttcatctatatcttcatctttgtgatcgggatgatagccaactccgtggtggtgtgggttaacatccaggccaagactacaggctacgacacacactgctatatcctgaacctggcgatcgcagacttgtgggtcgtgctgactatcccggtgtgggtggtgagccttgtgcagcacaaccagtggcctatgggggaattaacgtgtaaggtgactcatctcattttttccatcaacctcttcggatccatctttttccttacctgcatgtctgtggacaggtacttatccataacttattttaccaatactccgtcaagtcgtaagaagatggtgcgccgtgtggtctgtatccttgtgtggttgctggccttttgtgtttctctgcctgatacatattatttaaaaaccgtcacctctgcgtccaacaatgaaacttactgccgcagtttctatcctgaacattccatcaaggagtggttgatcgggtag

SEQ ID NO: 218094 - DNA, 1155 bp, synthetic construct
  misc_feature 1..1155: note = Description of Artificial Sequence: Synthetic coding sequence
  source 1..1155: mol_type = other DNA
atggccgctacagcctcccctcagccactcgcaaccgaggatgctgactctgagaactctagtttttattactatgattaccttgacgaggtagcctttatgctttgccggaaagatgctgtcgtgtctttcggcaaggtctttctccccgtattctatagtctgatctttgtcctgggcctgagcgggaatttgctcttactcatggtactcttgcgctacgtccccaggcgtcggatggtcgagatataccttcttaacttagctattagtaacctgctgttcttagtaacgctgccgttctggggcatctctgtagcctggcattgggtttttggtagcttcctgtgtaaaatggtaagtactttgtacacgataaatttctactctggtatctttttcatctcatgcatgtcactggataaataccttgagatcgttcatgcacaaccctaccatagattgagaacaagagctaaatccctgcttctggccaccattgtgtgggccgtaagtctggctgtgagtattccagatatggtttttgtgcagactcacgagaacccaaaaggggtttggaattgtcatgcagactttggcggtcatgggactatttggaagctgttcttgcgtttccaacagaatctgctgggtttcctgctgcccttgctggctatgatattcttttactcacggatcggttgtgtccttgttcgactccgaccggctgggcagggccgtgcgttgaagatagccgcagcgctggtcgtcgcctttttcgtactctggtttccatacaacctgactctgtttttgcacactttactcgacttgcaggtgtttggcaactgcgaggtgagccagcacctcgactacgcactccaggtgactgagagcatcgctttcctgcactgttgcttttcaccaattctgtatgctttctcttcccatagattccgtcaatacctcaaggcattcctagcagcagtgcttggctggcatctggctcccggtactgcacaggcttctctttcttcatgcagcgaatctagcattttgaccgcccaagaagagatgaccggtatgaatgatctgggcgagaggcagagtgaaaattaccctaataaagaggatgtcgggaacaaatccgcttag

SEQ ID NO: 218095 - DNA, 1155 bp, synthetic construct
  misc_feature 1..1155: note = Description of Artificial Sequence: Synthetic coding sequence
  source 1..1155: mol_type = other DNA
atggctgccactgcttctcctcagcccttagccaccgaagacgccgactctgaaaatagctccttctactactacgattacttggatgaggtagccttcatgctctgccggaaagatgccgttgtcagcttcggaaaagtttttttacctgtcttttactcactgatcttcgtgctgggcctctcaggaaatctacttttgctcatggtcttacttcgatacgtcccccgacgacggatggtggaaatctatctgctcaatctggcgatctccaacctgttgttcttagtcaccctgccattctggggaattagtgttgcctggcactgggtatttggatccttcctgtgcaagatggtgtccacactttacactattaacttttacagcggtatcttttttatatcttgtatgagtcttgataaatatctggagatcgtgcacgcacagccctaccacaggttgaggacccgggcaaaatcattgctactcgcgacaattgtttgggcagtgtctctggctgtatcaatacctgatatggtttttgtccaaactcacgaaaatcccaaaggcgtatggaattgccacgctgacttcgggggacacggcaccatatggaagttatttctgagattccagcagaaccttctgggtttcctgctccccctcctggccatgatatttttctattctaggatcggatgcgtgcttgtgcgactgcgtccagcaggtcagggtagggccctgaaaatcgccgcagcactggtggttgcctttttcgtattatggtttccttataacctcactttatttctacacactctgctcgacctgcaggtgtttgggaactgtgaagtgtcgcagcatctcgactacgcactgcaggtcaccgaaagcatcgcgttcctacattgttgcttttctccaatcctgtatgctttctctagccaccgctttcggcagtatctcaaggcctttctggccgctgtgctcgggtggcacttagcccctgggacagcccaggcctccctgagcagttgtagtgagtcgtcaattctaactgcgcaagaggaaatgaccggtatgaatgacctgggcgagcgtcagtcagaaaactaccccaataaggaggacgtgggtaacaaatctgcctag

SEQ ID NO: 218096 - DNA, 1155 bp, synthetic construct
  misc_feature 1..1155: note = Description of Artificial Sequence: Synthetic coding sequence
  source 1..1155: mol_type = other DNA
atggctgcgactgcatcaccacaaccgctcgccacagaggatgctgacagtgagaacagttccttttattactatgactatttagacgaagtggcgtttatgttgtgtaggaaggatgccgtcgtgtctttcggtaaagtcttcctgcctgtcttctatagcctgatttttgtgttgggtctctctggcaatctcctgctgcttatggtcttgctaagatatgtccctcgacgcagaatggtggagatctatttacttaatctggccatatcaaatctactttttcttgtgactctcccattctggggcattagcgttgcctggcattgggtgtttgggagcttcctgtgtaagatggtttcaactctatatacaattaatttctactctggtatttttttcataagttgcatgtccttggacaagtacctcgaaattgtccacgctcaaccatatcatcgactgagaacccgggctaaatcactccttcttgccacaattgtgtgggctgttagcctggcggtgtcgattccggacatggtctttgtgcagacccacgaaaatcccaagggagtttggaactgtcacgctgactttggaggccacggaacaatctggaagctctttctaagatttcagcagaacttgctcggttttttgctgccgcttctggccatgatcttcttttacagtcgcattggttgcgttctagtgcgcttgagacctgccggtcaaggcagggcactgaaaatcgctgcggcactggtggtggcgttcttcgtcctgtggttcccttataatttgactctatttctccatactctcctggaccttcaggtgttcggcaactgtgaggtgtctcaacatctggattacgcgctccaagtcacagaaagcatcgccttcctgcattgttgcttttccccgattctgtacgccttctcctcacaccggtttaggcagtacctcaaggccttccttgcagctgtgcttggatggcatttagcgcctggaactgcacaggcgtccctcagcagctgcagcgaatcctccatcttgaccgcccaggaggagatgacggggatgaacgacctgggtgagcgccagtccgaaaactaccctaataaggaggacgtaggaaataagtcagcatag

SEQ ID NO: 218097 - DNA, 1122 bp, synthetic construct
  misc_feature 1..1122: note = Description of Artificial Sequence: Synthetic coding sequence
  source 1..1122: mol_type = other DNA
atgcggatggaagacgaagactacaacacctctatctcgtatggcgatgagtacccggactacttggactctattgtagtgcttgaagacctctctcccctcgaagcgagagtaacccggatcttccttgtcgtcgtgtattcaatcgtttgcttcctggggatactgggcaacggccttgttattatcattgcgacctttaagatgaagaaaacagtcaacatggtctggtttttgaacctggctgttgctgatttcctctttaatgtcttcctgcccattcacatcacatatgccgcaatggactaccactgggtcttcggcaccgcaatgtgcaagatatctaactttctcctcattcacaacatgtttacaagtgtgtttctgctgacaataatcagctccgaccgatgcatcagcgtgctgttgcctgtgtggagccagaatcaccgaagcgtgagacttgcatacatggcatgcatggtgatctgggtgctcgctttctttcttagtagccccagtctggtgttccgagacaccgcaaatctgcatggtaagattagttgctttaacaatttcagtctctcaacaccagggtcaagttcctggccaactcactcccagatggaccccgtgggttattccaggcatatggtcgtgactgtgactaggttcttatgcggtttccttgtgcccgtacttataattactgcctgctatctcaccatcgtatgtaagttacagagaaacaggctggccaaaactaagaaacccttcaaaattatcgtgactattattattaccttcttcctgtgttggtgcccttatcatacgctcaatctcctggagctccatcacacagcaatgcccggaagtgtctttagcctcggtctccccctggccacagccttggcaattgctaactcctgcatgaatccaatactttatgtctttatgggccaggacttcaaaaaatttaaagtggctcttttcagccggttggtcaatgccctgagtgaagatacagggcatagctcttacccatcccataggagttttaccaagatgagctctatgaatgaacgcactagcatgaatgagcgggaaactggtatgttgtag

SEQ ID NO: 218098 - DNA, 1116 bp, synthetic construct
  misc_feature 1..1116: note = Description of Artificial Sequence: Synthetic coding sequence
  source 1..1116: mol_type = other DNA
atggaagacgaagattacaatacaagcatctcgtacggggatgaataccccgactatcttgatagtattgtagtgctggaggatctgtcaccactcgaagctagagtgactaggatatttctggtggtagtgtatagcattgtatgctttctggggattctgggcaacgggttggtgattattatcgccaccttcaagatgaagaaaaccgttaatatggtctggtttctgaacctggctgtcgctgacttcctgtttaatgtgttcttgccgattcacatcacgtatgcggcaatggactatcactgggtttttggaaccgcaatgtgtaaaatctccaattttcttttaatccataatatgtttaccagtgtgtttttacttacaatcatttcttctgaccggtgtatatccgtgcttttacccgtctggtcccagaaccataggtcagttcgccttgcatacatggcatgtatggttatctgggtgctcgctttcttcctgtcgagcccttctctggtgttcagagacactgcaaacctccatgggaagataagctgctttaataattttagtctgtcgactcccggtagctcgagctggcccacacactctcagatggaccctgtgggatattcccggcatatggtcgtgactgttacaagatttctctgcggcttcctcgtcccggtgctgattatcacagcgtgttatctgacaatcgtgtgtaagctgcagcggaacagactcgctaaaacaaagaaaccgtttaagattatcgttacgatcataatcacattctttctgtgttggtgcccataccataccctgaaccttttagagctacatcacactgcgatgcctggttctgtgttcagcctagggctgcctctcgccactgccctggctattgctaactcatgtatgaatcctattttgtacgtgtttatggggcaggactttaagaagtttaaagtcgccctgttcagtcggctcgtaaatgccctctctgaggacacagggcatagttcctatcccagccacagatcattcactaagatgtcgtccatgaatgaaagaacctcgatgaacgaacgcgagacgggcatgctgtag

SEQ ID NO: 218099 - DNA, 1122 bp, synthetic construct
  misc_feature 1..1122: note = Description of Artificial Sequence: Synthetic coding sequence
  source 1..1122: mol_type = other DNA
atgcgaatggaagatgaggattacaatacaagcatatcatacggagacgaatatccagattacctggactcgatcgtggtgcttgaggacttatcacctctggaagctagggtgacaaggatatttcttgtcgtggtatattcaattgtctgctttcttgggatcctgggcaatggtttggtgattatcatagctacgtttaagatgaaaaagactgttaacatggtgtggtttctaaatctggccgtcgcagatttcctgttcaacgtgttcttacccatccacatcacgtatgcagccatggactaccactgggtgtttggaactgcgatgtgtaagatttcaaacttccttctcattcataacatgttcacaagcgtgtttcttctgactatcatatctagtgaccgctgtatctctgtgctgctgcccgtctggtctcagaaccacagaagcgtgagattggcttacatggcatgcatggtgatctgggtactggccttctttttaagctccccatctttagtgttcagagacaccgccaacctgcacggcaagatctcatgtttcaacaatttctctctgagcacgccgggtagctcctcatggcctactcattcccagatggatcccgtgggttacagtcggcacatggtggttaccgtaactcggttcctctgtggcttcttggtaccagttcttataattaccgcctgttacttgactatcgtgtgtaagctgcagagaaatagattggccaaaacgaagaagccctttaaaatcatcgtgacgatcataatcacctttttcctttgctggtgtccatatcatacattgaatctgctcgagctacaccacactgcaatgcccggaagcgtcttcagcctgggcctgcccttggctactgccctagcaattgcaaacagttgcatgaaccccatattgtacgtgtttatggggcaagatttcaagaagttcaaagtggctctgttcagccgactagtgaatgccctatccgaagacaccggtcactccagctaccctagccaccgtagcttcaccaagatgtcctcgatgaatgagagaacttctatgaatgagagggaaacagggatgctatag

SEQ ID NO: 218100 - DNA, 432 bp, synthetic construct
  misc_feature 1..432: note = Description of Artificial Sequence: Synthetic coding sequence
  source 1..432: mol_type = other DNA
atgagaatggaagacgaggattataacacttctatcagttatggcgacgagtaccccgattatctggattccattgtcgttcttgaggatctgagtccgttggaagcccgagtcactaggatattcctcgtcgtggtgtactctattgtatgttttctcgggatcctcgggaacggactggtgatcataatcgccacattcaaaatgaagaagaccgtaaacatggtatggttccttaatcttgcagtggcagacttccttttcaacgtgtttctccctatccacatcacatatgccgctatggattatcactgggtattcggaaccgccatgtgcaagatcagcaacttcctgctgattcacaacatgtttaccagtgtgtttctgctgaccataattagtagcgacagatgtattagtgtgctgctctag

SEQ ID NO: 218101 - DNA, 1122 bp, synthetic construct
  misc_feature 1..1122: note = Description of Artificial Sequence: Synthetic coding sequence
  source 1..1122: mol_type = other DNA
atgcgcatggaggacgaggactacaacacgtctattagctatggggacgagtatcccgattacctggactctatcgtggttctggaagacctttcacctctagaggccagagtgaccaggatttttctggtggtggtttactcaattgtctgtttcctcggcattctggggaatggcctggtaataatcattgcaacctttaagatgaagaagacagtgaatatggtctggtttctgaatttggcagtcgctgacttcctttttaatgtatttctgcccatacacattacctacgcagcgatggactaccattgggtgttcggaacagcaatgtgcaaaattagcaattttctgcttatccacaatatgttcacatccgtcttcttgctgacgatcatcagtagcgatcgctgcatcagcgtgcttctgcctgtgtggtcacagaatcacagaagcgttcgcctggcctatatggcctgcatggtgatatgggttttggcctttttcctatccagcccctcgttggtgtttagggataccgctaacttgcacgggaaaatttcttgcttcaacaatttctccctgagcacccctgggtcttcgtcctggcccacacacagccagatggaccctgtgggctacagccgtcatatggttgtgaccgtcacccgcttcctgtgtggatttctggtacccgttctgatcatcactgcctgttatcttaccattgtctgcaaattacagcgaaataggctcgcaaagacgaagaagccatttaagatcatcgtcaccatcattatcacatttttcctctgctggtgcccgtaccatacactcaatttgctggaactccaccacaccgctatgcccggaagtgtgttctcccttggtttacccttagccacagccctagccattgctaacagttgtatgaatccaattctgtatgtcttcatggggcaggacttcaaaaaatttaaggtcgcacttttcagtaggttggttaatgctctttctgaagacactggacattcttcttatccttcccaccgctccttcacaaaaatgagcagcatgaatgaaaggaccagcatgaacgagcgcgagaccgggatgttatag

SEQ ID NO: 218102 - DNA, 444 bp, synthetic construct
  misc_feature 1..444: note = Description of Artificial Sequence: Synthetic coding sequence
  source 1..444: mol_type = other DNA
atgcggatggaggatgaagattacaatacttcaattagctacggggacgagtatcccgattatctggacagtattgtcgtgctcgaggacctgagcccgttagaggctagggtaacccgaatttttctggtggtggtctactctattgtatgtttcttgggcattctgggaaacgggcttgtgattatcatcgcgacatttaagatgaagaagactgtaaacatggtctggttcctcaacctggcggtggctgatttcctgttcaatgtatttctgcctatccacatcacatacgccgctatggattatcattgggtattcgggacagctatgtgcaagatctcaaacttcttgttgatccataacatgttcacctcagtgtttctactcaccatcatctcctcagatagatgtatttcagtactgctgcccgtctggtcctag

SEQ ID NO: 218103 - DNA, 1116 bp, synthetic construct
  misc_feature 1..1116: note = Description of Artificial Sequence: Synthetic coding sequence
  source 1..1116: mol_type = other DNA
atggaggatgaggactacaatactagtatctcttatggggacgagtaccctgactatctggactcaattgtggttctcgaggacttatctccactagaagcgagggtcaccagaatattccttgtggtggtatactccatagtgtgtttcctcggaatcctggggaatggcctcgtcataatcattgccacgttcaagatgaagaagacagttaacatggtgtggttcctgaatctggctgtcgccgacttcttattcaatgtattcctgcctatccacatcacatacgctgcaatggattaccactgggtattcggtactgcaatgtgcaagatcagcaactttttgttgatccacaatatgttcaccagcgtgtttctgctcacaatcatatcgtctgaccgctgcatttcagttctgcttcctgtgtggagccaaaatcaccgaagtgtgaggctggcctatatggcatgtatggttatttgggtccttgccttctttctgagctccccatcgctggtcttccgcgacactgccaatctgcacggaaaaattagttgcttcaacaacttctcactttcaaccccaggctcttctagctggcccacacatagccagatggatcctgtgggatattccaggcacatggttgttaccgtcacgagatttctgtgcggctttctggtgcctgtgttaataatcaccgcgtgctacctgaccatcgtgtgtaagctgcagcgtaacagactagcaaaaactaagaaaccctttaaaatcatcgtcacaattatcatcactttcttcctgtgctggtgtccttaccacacgcttaatctgttagaactgcaccatacagcgatgcctggctccgtcttcagcctcggacttcctctggctaccgctctggcaatagccaatagttgtatgaatcccatattgtatgtctttatgggtcaggacttcaagaaattcaaggtggctctgttcagcaggttggtcaacgccctctccgaagatacagggcattcatcttaccccagtcatcggtcattcacgaagatgtccagtatgaatgagcggacctcaatgaatgagcgggagacgggaatgttatag

SEQ ID NO: 218104 - DNA, 1005 bp, synthetic construct
  misc_feature 1..1005: note = Description of Artificial Sequence: Synthetic coding sequence
  source 1..1005: mol_type = other DNA
atgccttcaaaggaatcctggtctgggaggaagacaaaccgtgccgcagttcataaatcaaagcaggaaggcagacagcaggatctgctaattgctgcactgggaatgaaacttggcagccccaaaagctccgtgacgatatggcagccactgaagctattcgcctacagccagctgacaagcctcgtgcgacgtgctaccctgaaagaaaatgaacaaatccctaagtacgaaaaaatccacaactttaaggtgcacacatttagaggcccacactggtgcgagtactgtgctaactttatgtggggtcttatcgcccaaggggtcaaatgtgcggattgcggtctgaatgttcataagcagtgcagcaagatggtgccgaatgattgtaaacctgatctgaaacatgtgaagaaagtttattcctgcgatcttactaccctggtaaaggcccacactaccaagcggcctatggtggttgatatgtgtattcgggagatagaatctagaggacttaatagcgaaggcctttacagagtttcaggtttctccgatctgatcgaagacgttaaaatggcctttgatcgcgacggtgagaaggcagacatctctgtcaatatgtatgaggatatcaacattatcaccggcgcactgaagctgtatttccgggacctccctattcctcttataacatatgacgcttatcctaagttcatcgaatctgcgaagatcatggacccagacgagcaactggagaccctacacgaagcactgaagctgcttcctcccgctcactgtgagaccttgagatatctaatggctcacttgaagagggtgactctgcacgagaaggagaaccttatgaatgcagaaaatttgggcatcgtgtttggtcctaccttgatgcgttccccggagctcgacgcaatggcagctctcaacgatatccgctaccagcggctggtcgttgagttgttaatcaaaaatgaggacatactgttttag

SEQ ID NO: 218105 - DNA, 1302 bp, synthetic construct
  misc_feature 1..1302: note = Description of Artificial Sequence: Synthetic coding sequence
  source 1..1302: mol_type = other DNA
atggcattaaccctttttgataccgacgaatatcgccctccagtgtggaagagttacctgtaccagctgcaacaggaggctcctcatcctcggagaataacgtgcacctgcgaagtcgagaacagaccgaagtattatggcagagagtttcatgggatgatatctcgtgaagcagcagaccaacttctgatcgtggccgaagggtcatatctcattagagaatcacagaggcagcccggtacttataccctggctctgcgtttcggcagccagacgaggaattttcgcctctattatgatggcaagcacttcgtgggcgaaaagaggtttgagtctatccacgatctcgtgactgatggcctaattaccctctatatagagacaaaggcagccgaatacatcgctaagatgactatcaaccccatttatgaacatgtgggctacactaccttgaacagagagcccgcatataagaagcacatgcctgtgctcaaagagactcacgacgaaagggacagtaccgggcaggacggcgtatcagagaaacgggtgcataccttcagaggccctcactggtgcgagtactgcgccaatttcatgtgggggctgatcgcccaaggcgttaaatgcgcagactgtggcctcaacgtgcacaagcagtgtagcaagatggtgcctaacgattgtaagcctgacctgaaacatgtgaagaaagtgtactcttgcgatttgacaaccctggtgaaagcccacactacgaagcgacctatggtggtcgatatgtgtataagagaaattgagtctaggggactcaatagtgagggactgtaccgcgtttctggcttttctgatttgatcgaagatgtcaagatggcatttgatagagatggcgaaaaggcagatatttcggtgaacatgtatgaagacatcaacatcatcaccggcgcactgaaactctacttcagagaccttccaattcccctgattacatacgacgcctatcctaagttcatagagagtgccaaaatcatggatcccgacgaacagctggagaccctgcacgaagcattgaagcttttacctcctgcccattgtgagacactgcgctatctaatggcccacctcaagagagtcaccttacacgagaaggagaatttgatgaacgccgagaacctcggcattgttttcggcccaacgctaatgagaagccctgagcttgacgcgatggccgcactaaacgacatcaggtatcaaaggctggtggtcgaactgttgatcaagaacgaggacattctgttttag

SEQ ID NO: 218106 - DNA, 1380 bp, synthetic construct
  misc_feature 1..1380: note = Description of Artificial Sequence: Synthetic coding sequence
  source 1..1380: mol_type = other DNA
atggcgctcacgctgtttgacaccgatgaatatagacctcctgtttggaagtcctacctgtaccagttacagcaggaggccccacatcctcgtcgcattacttgtacgtgtgaggtagaaaatcgtcccaaatactacggtcgagagtttcacgggatgatttcccgagaggccgctgaccaacttctgattgtcgctgaaggaagctatctcatccgagagagccaacgccaacccggaacctacactttggcacttaggttcggcagccagacaagaaacttccgcctgtactatgacggaaaacatttcgtgggggagaagcgcttcgaatctattcacgacctggtgactgatggcttaattacactctacattgaaaccaaggccgcagaatatattgcaaaaatgaccataaatcccatatatgaacatgtaggttacaccactctgaatcgagagcccgcttacaagaagcatatgcccgttttgaaggaaacacacgatgagagggacagtacaggtcaggatggcgtttccgagaagagactgactagtctggtccgccgagccaccctgaaggagaacgaacagatcccaaagtatgaaaagattcacaattttaaggtgcataccttccgcggtcctcactggtgtgagtactgcgcgaactttatgtggggtcttatcgctcagggggtaaagtgtgccgactgcgggctgaatgtacataaacagtgctccaaaatggtgccgaacgattgcaagcccgacctgaaacacgttaaaaaagtgtactcttgtgacctgacaactctcgtcaaagctcacaccactaaacgcccaatggttgtggatatgtgtatcagggagattgagtccaggggcttaaacagcgaagggctgtatagggtgtcgggttttagcgacctaatcgaggacgtgaagatggccttcgatcgggatggggagaaagctgacatctcagtaaatatgtacgaagacatcaacattattaccggtgcgttgaaactctatttccgcgatttacccatccccctaatcacatacgacgcttacccaaagttcatcgagtccgccaaaatcatggaccccgacgaacagctggagacccttcatgaagccctcaaattactcccaccggctcactgtgaaactctgagatacctgatggcccatctcaaaagggtcacccttcacgagaaggaaaatcttatgaacgccgagaacctgggaattgtgttcggtcctaccctcatgcggagccctgagctggatgcaatggcagctctgaacgacatcagataccagagactggtggtagaattgctcattaaaaatgaagacattctgttttag

SEQ ID NO: 218107 - DNA, 1167 bp, synthetic construct
  misc_feature 1..1167: note = Description of Artificial Sequence: Synthetic coding sequence
  source 1..1167: mol_type = other DNA
atgaccgctagcgtcctcttgcaccctcggtggattgagcctacagtcatgttcctctatgacaacggaggcggattggtggctgacgagcttaacaagaacatggagggggcagccgctgccgcagcggcagcggctgccgctgctgctgcaggggcaggtgggggtgggttcccacaccccgctgccgctgcagccggtggcaatttttccgttgcggctgctgctgcagccgcagcggctgctgctgccaaccaatgtaggaaccttatggcccatccggctccgctggctcccggagctgcatcagcttattctagtgcccctggagaagctcccccaagcgcggctgctgccgcagctgcagcagccgcagctgctgccgctgcggcagcggctagtagtagtggcggacccggaccagccggtccagcaggcgctgaagcagccaaacagtgtagtccttgctcagcggcagcacagtcctcttcgggtccagccgctttgccctatggttacttcgggtctggctattacccctgcgctaggatgggtcctcacccgaacgctatcaaatcctgcgcccagccagcctctgctgccgcagcggcagccttcgcggacaagtatatggatactgccggacccgcagccgaggagttctctagccgagcaaaggaatttgcattttatcaccaggggtatgctgctgggccttaccatcatcaccagcctatgccaggctatcttgacatgcccgtcgtgccagggcttgggggtcccggagagtcgcgtcacgagcctctgggcctgcccatggaatcctatcaaccttgggctttaccaaacggttggaacggccagatgtattgtcccaaggaacaggcgcaacctccccatttatggaagagcacactgcctgacgttgtgtcccacccaagcgatgcctcttcctatcgccgtgggcgtaagaagagagtaccttacaccaaggtgcaactaaaagaactggagagggaatatgctactaacaagttcatcacgaaggacaaaaggaggagaatttctgctactacaaatctgagtgagaggcaggtcacaatatggtttcagaaccggagggtgaaggagaaaaaggtcatcaataaactcaaaactacatcatag

SEQ ID NO: 218108 - DNA, 999 bp, synthetic construct
  misc_feature 1..999: note = Description of Artificial Sequence: Synthetic coding sequence
  source 1..999: mol_type = other DNA
atgttctcggaagagctctggttagagaacgaaaagaaatgtgctgtggttaggaaaagtaaacagggtagaaagagacaggaactgttggccgtggctttcggggtgaaggtcggcgtgaaagggggatttctgtggccacccttaaagcttttcgcttgcagccagatctcgtcccttgtgaggcgagcggcactgacacataatgacaatcactttaactatgaaaagactcacaatttcaaagtgcacacttttcgaggccctcattggtgtgagtattgtgcaaactttatgtggggtctgattgcgcagggagtgagatgtagtgactgcggcctcaacgtgcataagcagtgctccaagcacgtgccaaacgactgccagcccgacttgaaacggataaagaaggtctattgctgcgatttaactactttagtgaaggcacataatacgcaacgccctatggtggtagacatctgtattcgtgaaatcgaggccagaggattgaaatccgagggactatacagagtgtccggcttcacagagcacatagaggatgtcaaaatggcatttgaccgggatggggaaaaagccgatattagtgcaaacgtgtaccccgatattaatataatcacaggggcacttaagctttatttccgtgatctccccattccagttatcacctacgacacgtactcgaaatttatagacgcagccaaaatttcgaacgctgatgagaggctggaagccgtacacgaggtgctcatgctgctgccccctgctcattacgagacgctccggtatttaatgatccacctaaagaaggttactatgaatgagaaagacaactttatgaatgccgagaacctcggcatcgttttcggtccgaccctgatgcgcccacccgaggactccaccctgaccactttgcacgacatgcgttaccagaaattaatcgtgcagatcctgatcgagaacgaggacgtgcttttctag

SEQ ID NO: 218109 - DNA, 525 bp, synthetic construct
  misc_feature 1..525: note = Description of Artificial Sequence: Synthetic coding sequence
  source 1..525: mol_type = other DNA
atggccgcttccagcaattcctctctcagcggcagtagcgtcagctctgtttattcggagccgaggtccccaagagagctccctaagtacgccgaagagtaccagccacctatatggaagagttacttgtatcaactccagcaggaagccccaagaccgaaacggataatctgcccgagggaggtggagaaccgcccaaagtattacggccgagagtttcacgggatcatctctagagaacaggccgacgaactgctgggaggggtggaaggcgcttacatccttcgcgagtcacagcggcagcccggttgctacactctggccctccgatttggcaatcagactctgaattataggctgtttcatgacgggaaacattttgtcggtgaaaagcgctttgagagtattcatgatctcgttactgacgggttgataacattgtacatcgagactaaggctgcagaatatatttccaagatgacaactaatccaatttatgagcacatcggatatgcaactctttag

SEQ ID NO: 218110 - DNA, 825 bp, synthetic construct
  misc_feature 1..825: note = Description of Artificial Sequence: Synthetic coding sequence
  source 1..825: mol_type = other DNA
atgttttccgaggagctttggctcgagaacgaaaagaagtgtgcagtcgtgcgaaagagcaaacagggacgcaaacgccaggagctgctcgccgtggcttttggcgtcaaagtgggtgtgaaaggaggctttctgtggcctcccctcaagttgttcgcttgctcccaaatctcaagtttagtccggagggctgcactgactcacaatgataatcatttcaattacgaaaagacacacaatttcaaagttcacaccttccgcggaccacattggtgtgagtactgcgccaacttcatgtggggtcttattgcacagggcgtgaggtgtagtggcctgaaaagcgagggattgtaccgcgtcagcggtttcaccgagcatatcgaagatgtcaagatggcttttgatcgggacggtgagaaggccgacattagcgccaacgtgtacccagacatcaacataatcacgggcgcattaaaattgtattttagagacctcccgatccctgtgatcacgtacgatacgtattcgaagtttatcgacgcagccaaaatttctaacgcagacgagagactcgaagctgtgcacgaggtgcttatgctgctgcctcctgcccactacgaaaccctccgatacctgatgatccacctgaaaaaggtcactatgaacgagaaagacaattttatgaacgctgagaacctcggtattgtttttggacctacactgatgagacccccagaggactctacgctaactacactgcacgatatgcggtatcaaaaactgatagtccagatccttattgagaatgaggacgtcctgttctag

SEQ ID NO: 218111 - DNA, 864 bp, synthetic construct
  misc_feature 1..864: note = Description of Artificial Sequence: Synthetic coding sequence
  source 1..864: mol_type = other DNA
atgtttagcgaggaattgtggcttgaaaatgagaagaagtgtgctgtagtgaggaaaagcaaacaggggagaaagagacaagagctgctcgcagtagcctttggtgtgaaggttcacacattccgaggacctcattggtgcgagtactgcgcaaatttcatgtggggactgattgcacagggggttagatgcagcgactgcggcctaaacgtccacaaacagtgcagcaagcatgttcctaacgactgtcagccagatctgaaacggatcaagaaggtgtattgctgcgatctgacaactcttgtgaaagcacataacactcaaaggcctatggtagttgatatctgcatccgggagatcgaggctcgtggactgaaatctgaagggctgtacagagtatccgggttcaccgagcacattgaggacgtcaagatggctttcgaccgggatggagaaaaggccgacatttctgcaaatgtgtaccctgatattaatatcattactggggctctgaagctgtactttcgggatctgccgatccctgtgatcacttatgatacatactctaagttcatcgacgcagccaagataagtaacgctgatgagcgtctcgaggccgttcacgaggttttaatgttgttgcctccagctcattatgagactctcaggtatctgatgatccaccttaaaaaagtcactatgaatgagaaggacaatttcatgaacgccgaaaacctgggcattgtatttgggcctactctaatgcgtccacccgaagactcaacactgacaactctgcacgacatgcgttatcagaagctcatcgttcaaatactgatagaaaacgaagacgtgctcttctag

SEQ ID NO: 218112 - DNA, 579 bp, synthetic construct
  misc_feature 1..579: note = Description of Artificial Sequence: Synthetic coding sequence
  source 1..579: mol_type = other DNA
atggccgctagcagcaactcttctttgagtggttccagtgtctcaagtgacgccgaagaatatcagccaccaatttggaagtcttacctctatcagctccagcaagaagcgcctcgacccaaacgtatcatctgccccagagaggtagagaatagacccaaatactatggccgagagtttcatgggattatcagccgggaacaggctgacgagttactgggaggcgttgaaggagcttatatcctgagggaatcccagcggcaacctggatgctacaccctggcgcttcgcaaccccacaaagatatcaaatgccgatgagaggcttgaggcagtgcacgaagtcctcatgctcctgccgcctgctcattacgagactctacgctacctaatgattcacctcaaaaaagttacaatgaatgaaaaagataacttcatgaatgcagagaatctaggcatcgtctttgggcctacccttatgaggcccccagaagactcaacattgacaactctacacgacatgcgttatcagaagctgatcgtacagattctaatcgagaacgaagatgtcttattctag

SEQ ID NO: 218113 - DNA, 861 bp, synthetic construct
  misc_feature 1..861: note = Description of Artificial Sequence: Synthetic coding sequence
  source 1..861: mol_type = other DNA
atgttcagcgaggagttgtggctggaaaacgaaaagaagtgtgccgtggtgcgcaagtcaaagcaggggagaaagagacaggagctcctcgccgtggcctttggagttaaggtgggggtaaagggcggttttctgtggccacctttgaaactgtttgcctgttcacaaattagctctttagtgaggcgggctgccctgacccacaacgacaatcactttaactacgagaaaactcacaattttaaagtgcataccttccgaggtcctcactggtgcgagtactgcgccaattttatgtggggactgattgcccagggtgtacggtgctcagactgtgggctgaacgtacacaagcagtgcagcaagcacgtgcccaacgactgccagccggatctcaagagaatcaaaaaggtttactgttgcgatctcacaacactcgtgaaggcccacaacacccagaggcctatggtcgtggacatttgcattagggagatcgaggcaagaggcctcaagtccgagggcttataccgggtgtccggcttcaccgaacatatagaagatgtcaagatggccttcgatcgagagatcagtaatgccgatgaaaggctggaggccgtccatgaggtgctcatgctactgccacccgctcactatgaaactctgcgatacctgatgatccatttaaaaaaagttaccatgaatgaaaaggacaactttatgaatgctgaaaatcttggaatcgtattcgggcctacattgatgagaccaccggaagatagtactttgaccacactacatgacatgcgctatcagaagctgattgtgcagatcctaatcgagaatgaggatgtgctgttctag

SEQ ID NO: 218114 - DNA, 1446 bp, synthetic construct
  misc_feature 1..1446: note = Description of Artificial Sequence: Synthetic coding sequence
  source 1..1446: mol_type = other DNA
atggctgcctcctcaaattcatccctgagcggatcttctgtgtcttccgtgtattcagaacctcgctccccgagggaactccccaaatatgctgaagaataccaacccccaatttggaagagctatctgtaccaactgcaacaagaggctccacggcctaagcggattatttgtcctagggaggtggaaaatcggccaaagtattatggcagagagttccacggaataatctctcgcgagcaggcagatgaactgctgggtggcgtggagggagcatacatcctgcgcgaaagtcagcgtcagccaggttgttataccctcgcattgcgctttggaaaccaaacgctcaattaccggctgtttcatgatgggaaacactttgttggagagaagagattcgagagtatccatgaccttgttacagatggacttatcacgctgtacattgaaaccaaagccgctgaatacattagtaaaatgactactaacccaatttatgaacatataggttatgccaccctgcttcgggaaaaggtatctaggcggctgtctagatcaaagaacgaaccacggaagactaacgtaacgcacgaggagcacaccgctgttgagaagatcagttcactagttagaagggccgcactgacacataatgataaccacttcaattacgaaaagacccacaatttcaaggtgcacacattccggggaccccattggtgcgagtactgtgccaactttatgtggggactcattgcccagggtgtccggtgctctgactgcggcttgaatgtgcacaagcagtgctcaaaacatgtccctaacgactgtcaacctgacctgaagaggataaaaaaggtgtattgttgtgacctgactaccctcgtcaaggctcataatacacagcggccaatggtggtggacatttgtattcgagagatcgaggccaggggcctcaaatccgaaggactgtaccgcgtaagcggatttaccgagcatattgaagacgtcaagatggcatttgatagggatggggaaaaggctgacatcagtgctaacgtgtatcctgacatcaatatcattacaggcgctctgaagctgtacttccgcgatctgccaatcccagtaattacgtacgacacatactctaagttcatagacgcagccaagatctcaaacgccgacgaaaggctcgaagccgttcatgaggtgttgatgctcctcccacccgctcattatgagaccctcagatacttgatgattcatctgaagaaagtgaccatgaacgaaaaggacaactttatgaacgccgagaatttagggattgtcttcgggcctaccctgatgagacctccagaggactcaacattgacgacactgcacgatatgaggtaccaaaagctcatcgtgcagatcctgatcgagaatgaagatgtgctcttctag

SEQ ID NO: 218115 - DNA, 975 bp, synthetic construct
  misc_feature 1..975: note = Description of Artificial Sequence: Synthetic coding sequence
  source 1..975: mol_type = other DNA
atggccgctagctcaaactcctctttgtcgggctcctccgtgagttctgatgctgaggaataccaaccccctatttggaagtcttatctgtaccagctgcagcaggaagcgcctagacccaagagaatcatctgtcctagagagatcagtagcctcgtacgtcgcgctgccctgacacacaatgataatcactttaactacgaaaagacccataatttcaaggtgcatacctttaggggaccccactggtgcgaatattgtgctaatttcatgtgggggcttatcgcgcagggcgtccggtgttccgactgcggcctgaatgttcacaaacagtgctctaagcacgtccccaatgactgtcagccggatctcaagagaattaagaaagtgtattgctgcgatttgaccaccctcgttaaggcccacaacactcagcggccaatggttgtggatatctgtatccgtgagattgaggcacgcggactaaaatctgaagggctgtacagggtttccgggtttactgaacacattgaggatgtgaagatggcgtttgatagggacggagagaaggctgacatatccgcaaatgtttacccagacatcaacatcattacaggtgcgcttaagttgtatttccgggatctgcctatcccggtgataacctatgatacttacagtaagttcatcgacgctgccaaaatttcaaatgccgatgaaaggctggaggccgtgcacgaagtgctgatgttgctgcccccagcgcattacgagaccctgaggtacctgatgatccacctgaagaaggttacaatgaacgagaaggacaatttcatgaacgctgagaatttgggtatcgtgtttggaccaaccttaatgcgaccaccagaggactccacccttactacactgcacgacatgcgctaccagaagctcatcgtacagattctgatcgagaacgaagatgtgctgttctag

SEQ ID NO: 218116 - DNA, 1632 bp, synthetic construct
  misc_feature 1..1632: note = Description of Artificial Sequence: Synthetic coding sequence
  source 1..1632: mol_type = other DNA
atgacccagacgcatcgggctaagtcagccagcagctgccccaatctgctcgtccctgagacatggcctcaccaggtcagcgcctcccatgcagggaggtccaaacaaccacagggcggtattttgaagatcaatgaagaacacagaagaggcgcaatacaagaccttctggcatcccccggtttcacctttggcaaacgggtggtgttcgactctcactgcctaaagcggcaacataccttcgctgatggcctccattctagctgcacgtcaaacgcggaagagtaccagccgcctatttggaagagttatctgtatcaactgcaacaagaagcacctcggcctaaaaggataatctgtccccgagaagtcgagaaccgcccaaaatattatggtagagagtttcacggaatcatctcacgcgaacaggccgatgagctgcttgggggagtggagggggcatacattctgagagaatcccagcggcagcctggttgttacaccctcgccctccgctttggcaaccagaccctcaattatcgcctcttccacgacggcaagcactttgtgggggaaaagaggttcgagtctatccacgacctcgtgaccgatggcctgatcacactatatattgaaaccaaagctgccgaatatatctcgaaaatgaccacaaaccccatttatgagcacattggctacgccaccttgttacgcgagaaggtgtcgcgtcgcctgagcagaagtaaaaatgagccaagaaaaacaaatgtgacccacgaagaacacaccgcagtggaaaaaatcagcagcctggtgcgaagggccgctctaacccacaatgataatcatttcaattacgaaaagacccacaacttcaaggtacatacattccgtggaccacactggtgcgagtattgtgcgaacttcatgtggggtctaattgcacagggtgttaggtgctccgattgtgggctcaacgtccataaacagtgttccaagcacgtaccaaacgattgtcagccagacctcaaacgcatcaagaaggtctactgctgcgatcttaccactctcgtgaaagcacacaatactcagaggccgatggtggtggatatatgtattcgagagatcgaagccagggggctgaagtcggaaggactgtatcgtgtatctggcttcactgaacacatcgaagacgtcaaaatggcttttgatcgtgacggtgaaaaggcagatatcagcgcgaatgtctatccagacattaatattatcaccggagcgctgaagctgtatttcagagacctaccgataccggtgatcacgtatgacacttacagcaaatttatcgatgccgctaagatttccaatgcagatgaaagactcgaggccgtccacgaagtccttatgttactccctccagctcattatgaaaccctccgttatctgatgattcacctcaaaaaagtgacaatgaacgagaaggataacttcatgaatgccgaaaacctgggtattgtgttcggacctacactgatgcggccacctgaagattcaaccctgaccacactccacgacatgagataccagaaactgattgtccagattcttatcgagaacgaggacgtgctgttttag

SEQ ID NO: 218117 - DNA, 1362 bp, synthetic construct
  misc_feature 1..1362: note = Description of Artificial Sequence: Synthetic coding sequence
  source 1..1362: mol_type = other DNA
atggatgccgaggagtaccagcccccaatctggaaaagttacctatatcagcttcagcaggaggctcccaggccgaaacggataatctgtccaagggaggtagagaacaggccaaagtactacggtagggaattccacggcattatcagtcgcgagcaggccgatgaattgttaggcggagtggagggcgcatatatcctcagggaatcccagcgccagcctggatgttacaccctggccctgcggttcgggaaccagaccctgaactacagactctttcatgatggaaaacattttgtgggagagaagaggttcgaaagcatacatgatttagtgacggatgggttgattacactctacattgagactaaggctgccgaatacatttcaaagatgactacaaatcctatctatgaacacatcgggtatgccactctgttgagggagaaagtttccaggcgactgagtaggtccaagaacgaaccgagaaagacgaatgtgacgcacgaagagcacaccgctgtagagaaaatctcttccctggttcgtagagctgcactgacccacaatgataatcactttaattacgaaaagacccacaattttaaagtccataccttcaggggaccccattggtgcgagtattgcgctaattttatgtggggacttatcgcacagggagtcaggtgctcagattgtggcctcaatgtgcacaaacagtgttccaagcacgttccaaacgactgtcaacctgacttgaagaggatcaagaaggtgtattgctgtgacttaacaaccctagtgaaagctcacaatacacagcgtcccatggtcgtagacatctgtatacgggagatagaagcgagaggactgaagtccgagggtctgtaccgcgtgagcgggtttacagaacacattgaggatgtcaagatggcgttcgacagagatggagagaaggctgatatctctgctaatgtttacccagatattaatatcatcaccggggctttaaaattatatttcagggacctgcccattcccgtaatcacatacgacacctacagtaagttcatagacgcagccaagatttctaatgctgatgaacgattggaggctgtgcacgaggtgctgatgctgctcccccctgcccattacgaaactctacggtatctgatgatccatctcaaaaaagtgacaatgaacgagaaagacaattttatgaatgccgaaaacttgggaattgtctttggccctacactgatgagaccaccagaggattccacactgacaacgttgcacgatatgcggtatcaaaagctgatcgtacaaattcttatcgagaatgaagatgtccttttctag

SEQ ID NO: 218118 - DNA, 1152 bp, synthetic construct
  misc_feature 1..1152: note = Description of Artificial Sequence: Synthetic coding sequence
  source 1..1152: mol_type = other DNA
atgggagtgaaggcctcccagacaggctttgtggttcttgtcttgttgcagtgctgctccgcctacaaactcgtgtgctactatactagttggtctcaatacagggagggcgacggatcatgcttcccagatgcactagacagatttctgtgtactcacattatctatagtttcgctaacatatccaacgaccacattgatacttgggaatggaacgacgtgaccctgtatggcatgctcaatacattaaagaaccggaaccccaatctgaaaacacttctgagcgtcggtgggtggaatttcggctctcagcggttttccaagattgcctcaaacacacaatccaggcgcacatttatcaagtccgtccccccatttcttagaacccatggtttcgacggcttggacctggcttggctgtatcctggcagacgagataagcagcacttcactaccctcataaaggagatgaaagccgagttcattaaagaagcccagccaggaaagaaacagctgctgctgagcgccgcactgtctgccggaaaagtgacaatcgactcctcatacgatattgccaaaatcagccagcatctggactttatctccattatgacatacgattttcacggggcatggcggggtacgactggacatcactctccgctgttccgcggacaggaggatgcctcacccgacagattctccaatacggactatgccgtcgggtacatgctgaggcttggcgcaccggcaagtaagctagtgatgggcatacctacctttggacgatcattcacattggccagtagcgagaccggtgttggagcacctatttcgggacccggtattccgggtagattcacaaaggaagcaggaaccctcgcctactacgaaatctgcgacttccttcgaggggcaacggtccaccggatattgggtcagcaggtgccctacgccaccaaaggcaaccagtgggtcggatatgacgatcaggagtcggttaagtcaaaagtgcagtacctgaaggaccggcagctcgccggtgccatggtgtgggccttggatctggacgactttcagggcagcttttgcggccaggacctgagattccctttgactaatgctatcaaggacgctctcgctgctacttag

SEQ ID NO: 218119 - DNA, 459 bp, synthetic construct
  misc_feature 1..459: note = Description of Artificial Sequence: Synthetic coding sequence
  source 1..459: mol_type = other DNA
taactgctgctctccgccgcactgtcagctgggaaggtgaccatagacagcagctacgatattgcaaagatctcccagcacctggattttatatcaatcatgacatatgacttccacggcgcatggaggggtacaaccgggcaccattcgcccctattccggggacaggaagacgcctcacccgaccgatttagcaataccatctgcgactttctgcggggtgccactgtccatcggattttggggcagcaggtgccgtacgccacaaagggtaaccagtgggtaggctacgatgaccaggaaagcgtgaagtctaaggttcagtatctcaaagatagacaactcgccggtgccatggtttgggctctggacttagatgacttccaggggagtttttgcggccaagatttgagattccctcttaccaatgctatcaaggatgcactggcggcaacgtag

SEQ ID NO: 218120 - DNA, 306 bp, synthetic construct
  misc_feature 1..306: note = Description of Artificial Sequence: Synthetic coding sequence
  source 1..306: mol_type = other DNA
atggtgagcacccctgagaatcgacaaactttcataacaagcgttatcaagtttctgcgtcagtacgagtttgacgggctagatttcgattgggaataccccggatcccgcggaagcccccctcaggacaagcatctcttcactgtcctcgtgcagatgaggaaactcaagtaccgggaggatctctcgaaccttccaaagatcactcagcttgtgggtatcataacctcatctgcagtctggccacagagtccgcttctactgagcataacgctggggtgcccattgctgctcaggaatgcttag

SEQ ID NO: 218121 - DNA, 1431 bp, synthetic construct
  misc_feature 1..1431: note = Description of Artificial Sequence: Synthetic coding sequence
  source 1..1431: mol_type = other DNA
atgacaaagctgattcttttgactggcctggttttgatcctaaacctacaactgggcagcgcgtatcagctaacatgctactttactaactgggcccagtatcgccctggcttagggcgttttatgcccgacaacatcgacccctgcctgtgcactcacctgatctatgccttcgcgggaaggcaaaataacgagatcacaacgattgaatggaacgatgtgactttatatcaagcttttaacggactgaagaataaaaactcgcagctcaagacgttgttagccataggaggctggaacttcggcaccgcgccattcactgccatggttagcacccctgagaacaggcagaccttcatcacaagcgtgatcaaattccttcgtcaatatgaattcgacggcttagatttcgactgggagtacccaggatcccggggttcacctccacaggacaagcatctattcaccgtcctcgtgcaggagatgcgtgaagcttttgagcaggaggcaaagcaaattaacaaacctaggttaatggttacggcagcagtcgctgccggtattagcaacatccaatccggctacgagatacctcagttatcccaatatctcgattatatccatgtgatgacatacgatctccacgggtcatgggaaggctatacgggggaaaatagtcccctctataaataccctactgatacaggaagcaatgcttacctgaacgtagactacgttatgaactactggaaagataacggcgcaccagcagagaagctgattgttgggttccccacctacggccataatttcatcctctccaacccgagcaatacaggcatcggtgccccaacatccggagctgggcctgcaggaccatatgcaaaggagtcagggatctgggcatattacgaaatatgcacatttttgaagaatggggctacgcaggggtgggacgcacctcaggaggtaccatacgcataccagggtaacgtttgggtagggtacgacaacattaagagcttcgatattaaggcccaatggctcaagcacaacaaatttggcggtgccatggtctgggccatagacctggacgattttacagggaccttctgcaatcaaggaaagttccccctaatctccacactgaaaaaggcactgggcctgcaatcagcctcctgcacagcgcctgcccagcctattgagccgatcaccgcggctccttcaggtagtggcaacggtagcggcagcagcagctctgggggttcaagcggcggttccggattctgtgcagtgcgcgcaaacggcctataccccgtggcgaacaaccgtaacgcattttggcattgtgtcaatggcgtgacataccaacaaaactgccaggccggactcgtgttcgataccagctgtgattgctgcaactgggcatag

SEQ ID NO: 218122 - DNA, 948 bp, synthetic construct
  misc_feature 1..948: note = Description of Artificial Sequence: Synthetic coding sequence
  source 1..948: mol_type = other DNA
atgcgggaagccttcgagcaagaagcgaagcaaatcaataaacccagactcatggtgactgcggcagtggctgccggtattagcaacattcagagtggatacgagatccctcagctttcccaatatctggattatatccacgtgatgacttatgatctccacggttcctgggaagggtataccggagaaaatagcccactgtacaaatatccgactgatactggcagcaacgcctaccttaatgtggactacgtaatgaattattggaaagacaacggagctcccgctgagaagctgatcgttggatttccaacatacgggcataattttattctgtctaacccttcgaatacaggtattggtgccccaacctctggggcaggccctgcagggccttacgctaaagaatcaggcatttgggcatattacgaaatctgcacattcctaaaaaacggggcaacgcagggatgggatgccccacaggaagttccctacgcatatcagggtaacgtgtgggtggggtacgataacattaaatcatttgacattaaggcccagtggctgaaacacaataaattcggaggtgctatggtctgggccatcgacctggatgattttaccggcactttttgcaaccagggtaaattcccactcatctctacccttaaaaaagccctcgggctgcagagcgcttcatgtacagccccagcccagcccattgagcctattaccgccgctccatctggctcaggcaatggcagcggcagtagtagctccggcggttcgtctggcggttccgggttttgcgcggtgcgggcaaatggcctgtatccggtcgccaataaccgcaacgccttttggcactgtgtgaatggcgttacatatcagcagaactgccaggctggacttgtgtttgacacatcttgtgactgttgcaattgggcatag

SEQ ID NO: 218123 - DNA, 1431 bp, synthetic construct
  misc_feature 1..1431: note = Description of Artificial Sequence: Synthetic coding sequence
  source 1..1431: mol_type = other DNA
atgacgaagcttatccttcttaccggtctggttctgattttaaacctgcagctcggatcagcataccagttaacttgttactttactaattgggctcaatatcggcctggactaggacgctttatgccagacaatattgacccctgtttgtgtacccacctgatatacgctttcgcaggcagacagaacaatgagatcaccaccatagaatggaatgatgtcaccctctatcaggcctttaacgggttgaaaaataaaaactctcagctaaagaccctgttggctatcggcggatggaactttggcacagccccttttaccgctatggtgtcaactcctgagaataggcagacctttattacttccgttattaagttccttcggcaatacgagtttgatggactcgatttcgactgggagtatcccggatcccgcggttcgcctccgcaagacaagcacctctttaccgtgctagtgcaagagatgagggaggcctttgagcaagaggcaaaacagataaataaacctcgactgatggtgactgcagccgtggccgctggaatctctaacattcaatcaggttatgaaatcccacagctctctcaatacttggattacatacatgtgatgacgtatgatttacatggcagctgggagggatataccggcgagaactctcctctctataagtatcctaccgacacaggttcgaacgcttatcttaacgttgactacgtcatgaactactggaaggacaatggcgctccagctgaaaagctgatcgtgggctttccaacttacgggcacaacttcattctgtcaaaccccagcaatacaggcatcggtgctcctaccagtggcgctggccctgccggaccttacgcgaaagagagtgggatctgggcgtattacgagatctgcactttcctgaagaacggagcaactcaaggttgggatgcccctcaggaagtgccctacgcctaccagggaaatgtctgggtcggctacgacaatataaagtcgttcgatattaaggcacagtggctgaaacacaacaaatttggtggagccatggtttgggccatcgacttggacgattttacgggtacattctgtaaccagggaaagtttcctctgatctccaccttgaaaaaagccttaggccttcagtcagcctcctgcacagcaccagctcaacccatagagcctattacagccgcaccatcaggctcaggcaacggaagtggaagcagctccagcggagggtctagcggagggtcaggattctgcgcagtgagagcaaatggactgtaccccgtcgctaataataggaacgcgttctggcactgcgtgaacggggtcacctatcaacagaactgtcaggcaggcctggtattcgacacgtcatgcgactgctgcaactgggcctag

SEQ ID NO: 218124 - DNA, 1263 bp, synthetic construct
  misc_feature 1..1263: note = Description of Artificial Sequence: Synthetic coding sequence
  source 1..1263: mol_type = other DNA
gagacttcatctagcgtgcacgagcaggtcgccgactcgggagcacaggccgtggcgtttcagtccggtggtgaaagtagcatcgtgtggaacagccagctgaaaacgctgttggctatcggagggtggaacttcggaaccgcccctttcaccgcaatggtgtccaccccggagaacaggcagaccttcatcacctctgtgattaagttcctgcgccagtacgagttcgatggcttagattttgactgggagtaccccggaagtcggggaagtcccccacaggataagcatctttttactgtgctggttcaggaaatgagagaggcattcgaacaggaagctaagcagattaacaagccaagactgatggtcactgctgccgtcgccgcagggatatcaaacatccagagtggctatgagatcccacagctgtcccagtacttggattacattcacgtgatgacatatgatctgcatggcagctgggagggttacaccggagagaattctccactgtataagtatcctacagacactggtagcaacgcgtacctcaacgtggactacgtgatgaactactggaaagacaatggagctccagcagaaaaacttatcgttggctttcccacctacgggcacaacttcattctctctaatccctccaacacggggatcggcgcacctacatcaggtgccggtcctgccggtccttacgcaaaggagagcggtatctgggcatactatgaaatttgtacttttttgaagaatggcgctacacagggctgggacgccccacaggaggtgccatacgcttatcaaggcaacgtttgggttggctatgacaatatcaaatcattcgacatcaaagcccagtggctgaaacacaataaatttgggggtgctatggtatgggccatagatctggatgattttactggcaccttttgcaaccaggggaaatttcctctaatctctactctgaaaaaggctcttggcctgcaatcggcatcatgcactgcgcctgcccagcctattgaacccataacggccgctccatccggctctgggaacgggtcaggaagctccagctccgggggatcatctggcggaagcggattctgtgccgtccgcgctaacggtctatacccggtcgcaaataatcggaatgccttttggcattgcgtcaacggagtgacataccagcagaattgccaggcgggtctggtgttcgatacctcctgcgattgctgtaattgggcatag

SEQ ID NO: 218125 - DNA, 1107 bp, synthetic construct
  misc_feature 1..1107: note = Description of Artificial Sequence: Synthetic coding sequence
  source 1..1107: mol_type = other DNA
atggtctcaacccctgaaaatagacaaacctttataacaagcgtgataaagttcctcaggcaatatgagtttgacggactcgatttcgactgggaatacccgggttcaaggggctcccctccacaggacaaacatttgtttaccgtattggtgcaggagatgcgagaagccttcgaacaagaggcgaagcagatcaacaagcctcggttgatggtgaccgccgcagtggccgctgggataagcaatatccagtccggatacgagataccacaactgtcacagtatctggactacatccatgtgatgacctatgatctgcacgggtcgtgggagggatatacaggagagaactccccgctgtataagtatcccaccgacacaggctctaacgcttacctcaacgttgattatgtgatgaactactggaaggataatggcgcacccgcagaaaaactcatcgtaggtttccctacctatgggcacaatttcattctgagcaatccatctaacacaggcatcggtgccccaaccagcggagcagggccagccggaccttacgccaaagagagcgggatttgggcttactacgaaatttgcacatttttaaagaatggcgctacacaagggtgggatgcccctcaggaggttccgtacgcataccagggtaatgtctgggtgggatatgataacatcaaatccttcgacattaaggcacagtggttaaagcacaacaaattcgggggtgccatggtctgggctattgaccttgacgacttcaccggaaccttttgtaatcagggaaaattccccctcatttcaacattaaagaaagctttaggtctccagagcgcttcttgcacagcccctgctcagcccatcgagccgattaccgcagccccatccgggtccggcaatggatcaggcagctctagctccgggggaagttccggcggatccggattttgcgcagtgcgcgctaacggcctgtatcccgtggccaacaaccggaatgcattctggcattgcgtgaatggagtgacgtaccaacagaactgccaggccggattggtgttcgatacaagttgtgactgttgtaattgggcctag

SEQ ID NO: 218126 - DNA, 948 bp, synthetic construct
  misc_feature 1..948: note = Description of Artificial Sequence: Synthetic coding sequence
  source 1..948: mol_type = other DNA
atgagggaggcttttgagcaggaagccaagcagatcaacaagccacggctcatggtaaccgccgctgtggctgctggcattagcaatatccaatctggttatgagatccctcaactgtctcagtacctggattatattcacgtcatgacctacgacctccatggatcctgggaaggctatactggcgaaaactctccactctataaataccccactgacactggttcgaacgcatacttaaacgtcgattacgttatgaactactggaaggataatggtgcccctgccgaaaaactaatagtcggatttcctacctatgggcataatttcatcctgtccaacccttccaacacaggaatcggagccccaaccagcggagcagggcctgcgggaccctacgccaaagagtctggaatttgggcatattatgaaatttgcaccttccttaagaatggggcaacccagggttgggacgcccctcaggaagtgccctacgcctaccaggggaatgtttgggtgggatacgataacattaagtcattcgatatcaaggcacagtggctgaaacacaataaattcggtggcgcaatggtgtgggctatcgacctggatgatttcactggcaccttttgcaaccaggggaaattcccattgataagcacccttaagaaagctctaggacttcagtccgcctcgtgtacggccccagctcagccaatcgagccaattacagccgctccatcaggcagtggtaatggctcaggatcttcatcctcaggaggctcctcaggtggatctggcttctgtgcagtccgcgcaaacggcctttatcccgtggccaacaaccgaaacgctttttggcactgcgttaacggcgtcacttaccagcagaactgccaagcgggacttgtgttcgacaccagttgtgattgctgtaactgggcttag

SEQ ID NO: 218127 - DNA, 948 bp, synthetic construct
  misc_feature 1..948: note = Description of Artificial Sequence: Synthetic coding sequence
  source 1..948: mol_type = other DNA
atgagagaagcttttgaacaggaagcaaagcagatcaataaaccacgccttatggtcaccgctgccgttgctgctggaatcagcaatattcagagcggctacgaaatcccccagttgagccagtacctggactatatccatgtgatgacatacgatcttcatgggtcatgggaagggtacacaggggagaattcacctctgtacaagtatccaactgatactggaagtaatgcttatctgaacgttgattacgttatgaactattggaaggataatggggcacctgccgagaagctgatcgttggtttccctacctacgggcacaattttatcctgtcaaacccatccaatacaggcataggggctccgacatccggcgctggccctgccggtccgtatgccaaggaaagcggcatttgggcctactatgagatctgtacattcttgaaaaatggcgctacccagggctgggatgctccacaggaggtgccttatgcttaccagggcaatgtctgggtggggtacgacaacatcaaatcattcgacataaaggcccaatggctcaaacataacaaatttgggggagccatggtgtgggccatcgacttggatgacttcactgggaccttttgcaaccaaggcaagtttcccctcatctctacccttaaaaaggccctgggtttgcagagtgcctcctgtacggcacctgcccagcccattgagcccatcactgcggcacccagcggatctggcaacggcagcggttcctctagttccggaggttcctccggcggaagtgggttttgcgctgttagagcgaatgggctgtaccccgttgcaaacaacaggaacgccttctggcactgtgtgaatggcgtaacataccagcaaaattgccaggcaggtctcgtgtttgacacgtcttgcgactgttgcaactgggcctag

SEQ ID NO: 218128 - DNA, 864 bp, synthetic construct
  misc_feature 1..864: note = Description of Artificial Sequence: Synthetic coding sequence
  source 1..864: mol_type = other DNA
atgcgcgaggctttcgagcaagaagccaagcagattaataaaccgcgactgatggttaccgccgctgtcgctgccggtatatccaacatccagagcggctacgagatccctcagctgtcacagtatctggattatattcatgttatgacctacgatctccatggaagctgggaagggtacaccggggaaaattccccactctacaagtatccaacagataccggctccaacgcatacctgaacgtcgactatgtgatgaattattggaaagacaatggagctcctgccgagaagttgatcgtggggttcccgacgtacgggcacaatttcattttatccaatccatcgaatactgggatcggagctcccacaagcggagccggacctgccggaccatacgccaaggaatctggcatatgggcctattatgagatctgtactttcctgaaaaacggtgcgacgcaaggctgggacgctcctcaagaagtcccatacgcatatcaaggaaatgtctgggtcggatatgacaatatcaagtcctttgacatcaaagcccagtggctcaagcataacaaattcggcggagctatggtttgggcgatcgacctggatgatttcactggcactttctgcaaccaaggtaaattccctttaatttcgaccttaaagaaggcactgggattgcaatctgccagctgtaccgcacccgctcagcccatcgagcctattaccgcagctccgagtggaagtggcaacggaagtgggtccagttcaagtggcggatcatcgggcggaagcggtttctgcgcggtgcgagccaatggtctgtatcccgtggccaataataggaacgcattctggtag

SEQ ID NO: 218129 - DNA, 1158 bp, synthetic construct
  misc_feature 1..1158: note = Description of Artificial Sequence: Synthetic coding sequence
  source 1..1158: mol_type = other DNA
atgagtcgccctcagttgcggaggtggaggctagtaagctctcctccaagtggtgtcccgggactggccctgcttgctctactggcactgcttgcgctccggctcgccgctggaaccgactgcccatgcccagaacccgagttatgccgaccaatacgccaccaccccgattttgaggtcttcgtattcgacgtgggccagaaaacgtggaaatcgtatgattggtctcagatcaccacagtggcgacattcggcaaatacgacagtgagctcatgtgttatgcgcactccaagggcgcaagggtagtactgaaaggcgacgtttccctgaaagatatcatagaccccgcttttagggctagttggatagcccaaaagctgaatcttgccaaaacacaatacatggacggaattaatatagatatcgagcaggaggtcaactgcctcagccctgagtacgacgccttgaccgccctcgtgaaagaaacgacggacagctttcaccgcgagattgagggctctcaggtgaccttcgatgttgcttggagccctaagaatatcgaccggagatgctataattacacgggtatagccgacgcctgcgatttcctgttcgtaatgtcttatgacgagcagtctcagatctggagcgagtgcattgctgccgctaacgcaccctacaatcaaacattaaccggctacaacgactacattaagatgtccattaatcccaaaaaactcgtgatgggtgtgccttggtacgggtacgattacacttgcttgaatttgtccgaagatcacgtgtgcacaattgctaaagtacccttccgcggagcgccatgttcagacgcagctggccgacaagtcccctacaagaccatcatgaagcagataaattcatctatttccgggaatctttgggacaaagaccagcgcgcaccatactacaattataaagatccagcagggcatttccatcaagtctggtatgataatccacaatccatctctcttaaagcaacatatattcagaattataggctgcgtggcattggcatgtggaacgcaaactgcctggactactcaggtgatgcagtggccaaacagcagaccgaagaaatgtgggaggtgctaaaacccaagctgcttcagaggtag

SEQ ID NO: 218130 - DNA, 2967 bp, synthetic construct
  misc_feature 1..2967: note = Description of Artificial Sequence: Synthetic coding sequence
  source 1..2967: mol_type = other DNA
atggagcagtctagaagccagcagaggggcggagagcagtcatggtgggggagcgatcctcagtaccagtatatgccattcgaacattgcacatcttacggactgccatcggagaacggaggcctgcagcacagattgagaaaagatgcgggaccacgacacaatgtgcatcctactcagatttacgggcaccataaggagcagttcagcgaccgcgagcaagatatcggcatgcctaaaaagacagggtctagttccaccgttgactcaaaggacgaggaccattactctaaatgccaggactgtattcatagactgggccaggtggtgcggcgtaaactgggggaggacggcatttttctggtgttgctcggcctattgatggccctggtttcgtggtcgatggattatgtgtctgctaagtctctgcaggcttataagtggagttacgctcagatgcagccgagcctgccgctccagttcctcgtgtgggtgacattcccccttgttctcatacttttttcagccctattttgccatctgatatctccccaggcagtgggatccggtatcccagagatgaaaaccatactccggggagtggtactcaaggagtacctaactatgaaagcatttgtagctaaagtggtggcgctgacagcaggcctcggctcaggcattccagtgggaaaagaggggcctttcgtgcatattgctagcatctgtgccgcagtgctgtccaagttcatgtccgtcttttgtggtgtttatgagcaaccatactactattccgacattcttacagtcggatgcgccgtcggggtcgggtgctgctttgggacaccgctcggaggcgtacttttctctattgaagtgacttctacttatttcgcagtgaggaattactggcgcggattcttcgccgctaccttttccgcctttgtgttccgcgttctagcagtatggaacaaggatgccgtaaccatcaccgcgctgtttaggactaatttcagaatggactttccttttgacttaaaggagctgccagccttcgccgcaatcggaatatgctgtggcttactgggggcagtgtttgtgtatttacacagacaggtaatgttgggcgtccggaagcataaggcattgagccagtttctggctaaacataggctgctctaccctggtattgtgacatttgtcatcgccagttttaccttcccacccggtatggggcagttcatggcaggcgaacttatgccaagagaagccatcagtacccttttcgacaacaacacgtgggttaaacacgccggtgaccccgagtcccttggccagtcagccgtgtggatccatccacgagtgaatgtggtgataattatctttctattttttgtgatgaagttctggatgtccatagtcgcaacgacaatgcctatcccatgcggaggatttatgccggtatttgtcttgggcgctgcttttgggcgtcttgttggcgagattatggcaatgctgttcccggatggcatcctctttgacgacattatctacaaaattttgcccggtggctacgcagtcatcggagcagccgcactgacgggtgccgtctctcatacagtctccactgcagtgatctgctttgaattaactggccagatcgcccatattttgcctatgatggtagctgttatcttggctaacatggtggcccagtctcttcagcccagcctctatgattcaattatacaagtgaaaaaactcccttaccttccggatttaggctggaaccagctctcaaagtacacaatttttgtggaggatatcatggtacgagacgtgaagtttgtgtcagcttcatacacttatggagaattgcgcaccctgctccagactaccacagtgaagacgcttcctttggtggatagcaaggacagtatgatactgctaggatcggtggagcgttctgaactacaggccctgcttcagaggcatctgtgcccagaacgaaggcttagggcggcacaggagatggcaagaaagctaagtgagctgccgtacgacggaaaggctaggctggccggagaaggacttcctggcgctccacccggtcgccctgagagcttcgccttcgtggacgaagacgaggatgaagatctgtctggcaaaagcgagttgcccccaagccttgccctgcatccatctacaactgccccactgagccccgaagaacctaacggccctctgcctgggcacaaacagcagccagaggcaccggagccagcaggccagcgcccaagcatttttcagagtcttctgcattgcttgctcggcagggcgagaccaactaaaaaaaaaactacacaagatagtacagacctcgtcgacaatatgagccctgaggagatcgaagcctgggaacaggaacaacttagccagcctgtgtgtttcgactcctgctgcatcgatcagagcccctttcagctggtcgaacagactacgctgcataagacacacacgctgtttagcctccttggtctgcaccttgcatacgtgacatctatgggcaagctgcgcggagtccttgccttagaggaattgcagaaagccatcgaggggcacacaaagtcaggagtccagcttcgaccgccattggcatcctttaggaatacaacaagcacaagaaagtctactggggctccacctagctccgccgagaattggaacttaccagaagacagacccggtgcaaccggaaccggagatgttatcgccgctagtcctgagacaccagttccaagtccctcacccgagccacctttaagtcttgctcctggcaaggtagaaggcgagctcgaagagctggagctggttgagtcaccaggactggaagaagagttagccgacattctgcaaggtccaagtctgagaagtactgatgaggaggacgaagacgagctgatcctgtag

SEQ ID NO: 218131 - DNA, 2697 bp, synthetic construct
  misc_feature 1..2697: note = Description of Artificial Sequence: Synthetic coding sequence
  source 1..2697: mol_type = other DNA
atggccgcagctgccgcagaggaagggatggagcctagggcactgcagtacgaacagacactgatgtacggcaggtacacgcaggatctgggagcattcgcaaaggaagaagccgctcggattcgattgggcggacctgagccgtggaagggacccccatccagccgcgctgctccagagctgcttgaatatgggcgaagcagatgcgctagatgccgggtgtgctccgtgagatgccacaagttcctagttagcagggttggggaagactggatctttctagtactcttgggtttgctcatggccttagtgtcgtgggttatggattatgccattgcagcgtgcctgcaagcacagcagtggatgagtagggggctcaatacttctatcttgctgcagtatttagcttgggttacttatccagtagtcctcattacctttagtgctggattcacacaaatcctggctcctcaggccgtaggttctggaattcccgagatgaagacgatcctccggggtgtggtgttaaaagaatatcttacactcaagaccttcatcgccaaagttatagggctgacttgcgccctgggatcagggatgcccctggggaaggagggcccatttgtccacattgcatctatgtgcgcggctctgctaagcaagtttctttcactcttcggaggtatatacgagaacgagtcacggaacacagaaatgttggcggcagcctgcgcggttggcgtcggatgttgttttgccgctcctattgggggagtgttgttcagcattgaagtgacctcaacctttttcgccgtgagaaattactggaggggatttttcgcggcaaccttctcagcctttatcttcagggtgctggcagtctggaaccgggatgaggaaaccattaccgccctcttcaagactagattccgattggacttcccgtttgatctgcaggagctgcctgccttcgctgtgattggaatcgcatccggcttcgggggagctttgtttgtgtatttgaaccgaaaaattgtgcaagtaatgagaaagcagaagaccattaaccgcttcctgatgcgcaagaggttgctctttcccgctttggtgaccctcctaatttcgacactaacgttccctccaggctttgggcagtttatggctggacagttgtcgcaaaaggagactttagtgactctgtttgacaaccgtacctgggtacgccagggactcgtggaagaactggagcctcctagtacctcccaggcctggaatcctccgagagctaacgtgttccttaccctggtcatttttatcctgatgaagttttggatgtccgcactggctacaacaatcccagtgccctgtggcgcatttatgcctgtgttcgtcattggtgcggcttttggcagactggtgggggaatctatggccgcatggtttcccgatggcatccacactgacagcagcacttacagaattgttcctggcggatacgctgtggtgggagctgctgcgcttgccggagctgttactcatacagtttcaaccgccgtcatcgtctttgagctaacagggcagatagcgcacatacttccagttatgatagcagttatccttgcaaacgctgttgcccaatcacttcaaccgtcactctacgacagcatcataaggataaagaaactcccttacctgcccgaacttggctggggaagacaccagcaatatcgtgttcgagtggaggacattatggtgcgagacgtgcctcacgttgctctgagctgtacttttcgggatctgcgtttagcactgcaccgcactaaaggtcgcatgcttgctctagtcgaatctccggagagcatgatcctgctcggttctatagaaagaagccaggtggtagccctgttaggggctcagctctcacctgccaggcgtcggcagcatatgcaagagcgcagggcaactcaaacttccccgctgtcagatcaggagggtccccctaccccagaggccagtgtgtgtttccaggtgaacacggaagactcggctttccccgcagcacggggagaaacacataagcccttgaagcccgctttgaagcggggacctagtgttacgaggaatctgggggaaagccccaccgggagcgccgaaagcgccggaatcgctcttcgatcactgttctgcgggtctccgccacctgaggctgccagcgaaaagctggagtcatgtgagaaacgaaaactgaaacgcgttagaattagtctcgcaagcgatgccgacctagaaggggaaatgagtccggaagaaatcctggagtgggaagaacagcagctagatgagcccgtaaactttagtgattgcaagatcgatcctgctccatttcaattagtagaacgcacaagtctgcacaagacacatacaatctttagcctgctgggtgtggaccacgcatatgtgacctctataggtcgcctcataggaatcgttacattgaaggagctgagaaaagctatcgaaggcagcgtcacagcccagggggtaaaggtgagaccccctctagcttctttcagggattctgccacctcctcttccgacacagagacgactgaagtgcatgctctgtgggggcctcatagccgacacggtctccccagggaaggtagtccctcagactcagacgataaatgccagtag

SEQ ID NO: 218132 - DNA, 381 bp, synthetic construct
  misc_feature 1..381: note = Description of Artificial Sequence: Synthetic coding sequence
  source 1..381: mol_type = other DNA
atgcgtaagcggctgctcttccccgcattggttacgttactcatcagtaccctcacatttcctccagggttcggtcaatttatggccggacagctctctcagaaggaaacactcgtaaccctgttcgacaaccggacctgggttcgtcaagggctggtggaagagctagaaccaccctccactagtcaggcttggaatcctcccagggctaatgtatttctgacacttgtcatcttcattctgatgaaacatctgggcgtatggtgggttaaggcatggctgccaggcagccaaatggaatttattaggaccgctgcccctactggtctgtgcctgggtgctactctctggagcggacagctgcgatggcaagagaggtag

SEQ ID NO: 218133 - DNA, 2601 bp, synthetic construct
  misc_feature 1..2601: note = Description of Artificial Sequence: Synthetic coding sequence
  source 1..2601: mol_type = other DNA
atggagtctgagcagttatttcaccgcggatattacaggaactcatataactcgattacatccgctagctccgatgaagaactgttagatggtgcaggagttattatggacttccagacatcagaggatgacaacttgctagacggcgataccgctgtaggaacccactacaccatgaccaacggcggatccattaatagttcaacccaccttctagacctcctcgatgaacctattcctggcgtcggtacctatgatgacttccacacaattgactgggtcagagagaagtgcaaagaccgcgagcgccatcgtagaataaattccaagaaaaaagaatcagcatgggaaatgaccaagagcctctacgatgcttggagcggttggctggtggttacattgaccggcttagcttcaggggcactcgcaggactcattgacatcgctgccgattggatgactgatctgaaggagggcatctgtctttctgctctgtggtacaaccacgagcagtgctgctgggggtccaatgagacaactttcgaagagcgcgacaagtgcccccagtggaagacctgggcggaattgatcataggccaggccgagggacctggttcatacattatgaactatattatgtatatcttttgggctctctcatttgctttcctggctgtcagcctggtgaaggtgtttgccccttatgcctgcggatcaggcatacccgaaataaaaaccatcttgagcggctttataataagagggtacttagggaaatggaccctgatgatcaagacaattacgttagtgttggccgtagcctcaggcctctccctcgggaaggagggaccactcgttcatgtggcatgctgctgcggcaatatattttcctatctatttccaaaatactccacaaacgaggctaaaaagcgcgaggtgctgagcgccgctagtgccgctggggtctcagtcgcattcggtgcccctattggcggagtgctcttcagcctcgaggaggtatcttactatttcccactcaagacactgtggcgaagttttttcgcggctctagtcgctgctttcgtactcaggtcaataaaccccttcggcaatagccggctggtgctgttttacgtggaataccacactccatggtatttatttgaactcttccccttcatactattgggcgtctttggaggcctttggggagcattcttcattcgcgctaacattgcatggtgtcgccgtcgcaagagcactaagttcgggaagtacccggtgctggaagtgattattgtggcagccattactgctgtgattgcttttcctaacccctacacccggctcaacacttccgagctgattaaagagctgtttactgactgtggacctctcgagagctccagcctctgcgattatcgcaacgatatgaacgcgagtaagatcgtagatgatatccccgataggccagccggaattggggtgtactcagccatttggcagctgtgcctcgcgctcatcttcaagattatcatgaccgtcttcacatttggtatcaaggtcccctctgggttattcatccccagcatggctatcggtgccatcgcaggaaggatcgttggcatagctgtggagcagctggcctactatcaccatgattggtttatctttaaggagtggtgcgaggtgggtgcagattgtattacacccggactgtatgccatggtcggcgctgcagcttgcctcgggggtgtgacaagaatgaccgtcagcctggtggtaatcgtctttgagctgactggaggcttagagtacatcgtgccgttgatggcagccgtgatgacatctaaatgggtaggagatgccttcgggagagaggggatctacgaagcgcacatacgccttaatggctaccccttcctcgacgccaaggaggagttcacacacacaaccttggccgctgacgtcatgaggccccgtagaaacgaccccccacttgctgtgctaacccaggacaatatgacggtcgacgatattgagaacatgattaacgagacttcctataatggatttcccgtcatcatgtccaaggagagtcagcggcttgtcggttttgccctgcgacgagacctcactatcgcaatcgaaagcgcaaggaagaagcaggagggcatcgtggggtcttcccgagtctgttttgcccaacacacaccctccctgccggcagagtcccctaggcctctgaagttgcgttctatcctggatatgtctccctttactgtgacagaccacacccccatggagatcgttgtggatatattcagaaagctgggtctgcggcaatgtctcgtcacacacaacgggatcgtgctgggcataattacgaagaagaacatcttggaacatctggaacagttgaaacaacacgtggaacctcttgctccaccatggcattacaacaaaaaaaggtaccctcccgcatacggtccagacggaaaaccaaggccccgatttaacaatgtgcaactgaacctaacagacgaggagcgtgaggagacagaagaggaggtgtacctgttgaacagcacaacgttgtag

SEQ ID NO: 218134 - DNA, 2376 bp, synthetic construct
  misc_feature 1..2376: note = Description of Artificial Sequence: Synthetic coding sequence
  source 1..2376: mol_type = other DNA
atggaatcggagcagttgtttcatcggggatactatagaaactcttataactccatcacctccgcctcttccgatgaggagctccttgacggagcgggagtgatcatggatttccagacctcggaagatgacaatctgcttgacggcgacaccgcggtcgggacgcactataccatgacaaacgggggaagcatcaactccagcacccatctactggacctgctggacgagcctatcccaggcgtcggtacctatgacgacttccatactatcgattgggtgcgtgagaaatgtaaggaccgggagcggcatcgcaggatcaactcaaagaagaaggagtcagcctgggagatgactaagtctctgtatgacgcctggagcgggtggctcgtggttaccctcaccggtttggcctccggagctctggccggtctgattgacatcgcagcagattggatgactgatctgaaagaaggtatatgcttatccgctctgtggtacaaccatgaacagtgttgttgggggtctaatgaaactacctttgaagagcgcgataaatgccctcaatggaaaacatgggcggagttaataattggacaggcggaaggaccaggaagctatatcatgaattatatcatgtatatattctgggccctgtcttttgccttccttgccgtatctctggtcaaagtttttgccccatacgcctgtggttccggtattcctgagattaaaacgattttatccgggtttataattcgcggatacttgggaaagtggaccctaatgatcaaaaccattacattggtattggccgttgcctcggggctgagccttgggaaagaaggaccgctggtccatgtcgcatgttgttgcggcaatatcttcagttacctgtttccaaagtatagcacgaatgaagccaagaagcgggaggttagttactacttccccctcaagacactctggcgatccttctttgccgctctggtcgcagcttttgttttaagatctattaatcctttcggaaactcaagactagtattgttctatgtggagtaccacacaccgtggtacttgtttgaactgtttccctttatcctcctcggggtgtttggaggtctgtggggggcttttttcatcagggctaatatcgcttggtgtcgacgcaggaaaagtacaaagttcggtaaataccctgtgctggaggtgatcatcgttgccgctatcacagccgtcatcgctttccccaacccgtatactagattgaacacctccgagctcatcaaggaactcttcacagattgcgggcctcttgaatcctcatccctgtgcgattaccgaaacgatatgaatgcgtcaaaaatcgtagacgatattcccgaccggcctgcaggcatcggggtttatagcgccatttggcagctgtgcctggcactcatctttaagattatcatgacagtgtttactttcgggatcaaggtgccaagtggcctgtttatcccttctatggccataggcgcaattgctggacgcatcgtgggcatcgcggttgaacaattggcctattatcatcatgattggttcattttcaaggaatggtgtgaggtcggagcagactgtatcacgcccggtttatatgcgatggtcggtgctgcggcttgcctaggcggtgttaccaggatgactgtatcactggtggtgatagtgttcgagcttacaggtggtttggaatacatcgtacctctgatggccgcagtaatgaccagtaaatgggtgggtgatgcgtttgggagggaaggaatttatgaagctcacatcaggcttaacggatacccttttctcgacgcgaaagaggagttcacgcataccaccctcgccgcagatgttatgcggccacggagaaatgatcctcccctagcggtgctgacacaggacaacatgacagtggatgacattgagaacatgatcaacgagacatcttacaatggcttccccgtgatcatgagtaaagaatcccagagactcgtcgggtttgcgcttagacgggacctgacaattgctattgagagcgccaggaaaaagcaagaggggattgtgggcagctctagagtgtgcttcgcacagcatacgccgtccctcccagccgagtcccccagacctctaaaactgcggagcattttggatatgtctccttttacagtgactgatcataccccaatggagatagtggttgatatcttccgcaagctgggcctgagacagtgcctggtgactcacaacggcagactcctggggatcatcaccaagaaagacattctgaggcatatggcccagaccgctaatcaggatcccgcttccatcatgtttaactag

SEQ ID NO: 218135 - DNA, 2406 bp, synthetic construct
  misc_feature 1..2406: note = Description of Artificial Sequence: Synthetic coding sequence
  source 1..2406: mol_type = other DNA
atggtgacattacagctcggtgagtcccattacgtagtccaggccggtctacagctgttgggatccagcaatccacccgctctggcaagccaggtggccgagatcaccggtacccactacactatgaccaacggcggttctatcaacagctctactcatttgctggacctgctggacgaacctatccctggcgtagggacatacgacgatttccacaccatagattgggtacgcgagaagtgcaaggacagagagcggcatagaagaataaactctaaaaagaaggagtctgcttgggaaatgaccaaatcattgtacgacgcatggtcaggatggcttgttgtgacgctgacaggattggcctcaggggcattggctggtctcatcgatatagccgctgactggatgactgacctgaaagaaggaatatgtctaagtgccctgtggtacaaccatgagcaatgctgttgggggagcaatgaaacaactttcgaggaacgcgataagtgtcctcagtggaaaacctgggctgagcttattattggtcaggcagagggccctggatcatacatcatgaattacattatgtatatcttctgggcattgagctttgcttttctcgcagtgtctcttgtgaaggtgtttgccccatatgcatgtggctctggcatcccagagatcaagaccatcctgtccggatttatcattcggggatatctcggtaaatggacactgatgatcaagactattaccctggtgctcgctgtcgcgtccggcctgtccctaggaaaggagggcccactggttcacgtcgcatgttgttgcggcaacatttttagctatctttttcccaagtactctactaatgaggccaaaaaacgggaggttttgagcgctgccagcgcagccggagttagcgtggctttcggcgcaccaatcggaggcgtactctttagtctcgaagaagtctcctattatttccctcttaagacattgtggaggagtttttttgccgcactggtggccgcatttgttctgcgatccattaatccctttggcaacagcagactggtgctgttttacgtagaataccataccccttggtacttattcgaacttttcccattcatactgttaggtgtgtttggtgggctttggggagccttcttcatcagagcaaacatcgcctggtgtagaagacgcaagtctacaaaatttgggaagtaccctgtgctggaggtgattatagtggcagcaataacggcagtgatcgcttttcccaacccatatacccggttgaatactagcgaactcattaaagagctgttcactgattgcggccctctggagagcagcagcctctgcgactacagaaatgacatgaacgctagtaaaatcgtagatgacattccggataggcctgccggtatcggtgtgtacagcgcaatttggcagttgtgtctggcactgatcttcaaaattattatgactgtattcaccttcgggataaaagtccccagtggtctgttcatcccaagtatggctatcggcgcaatcgctggaaggatagtggggatagctgtagagcaactggcctactaccaccacgattggtttattttcaaggagtggtgcgaggtgggagcggactgtattacgcctggactctacgccatggtcggtgctgctgcctgtctgggcggtgtaacccgcatgaccgtctctctggttgttattgtttttgagttaactgggggacttgagtatattgtgcctctgatggcagccgtgatgactagcaagtgggtgggagacgctttcgggagagaaggaatatatgaagcccacatccggctaaatggatatcctttcttggacgccaaagaggagttcacccatacaacacttgcagccgatgttatgaggcctagaagaaacgaccctccacttgctgtgttgacccaagataatatgactgtggacgatatcgaaaacatgatcaatgaaacatcttataatgggttccccgtcatcatgagcaaggagtcacagcggttggttgggtttgcactgcgccgagatttgactatcgccatcgaatccgcacgcaagaaacaagaggggatcgtggggtctagccgggtctgctttgcccaacacactccatccctgcccgctgagagcccaaggcccctaaaacttaggtccatcctggacatgtctccatttaccgtgacagatcacacaccaatggagatcgtggtcgatatctttaggaagttgggtctgcggcagtgcttagttacccataatggcagactgttgggaatcattaccaaaaaagatattttgcgacatatggcccagaccgctaaccaagatcctgctagtattatgtttaattag

SEQ ID NO: 218136 - DNA, 522 bp, synthetic construct
  misc_feature 1..522: note = Description of Artificial Sequence: Synthetic coding sequence
  source 1..522: mol_type = other DNA
atggaaagcgagcagctcttccaccgtggctattaccggaattcttacaattccatcacctctgcgtcttccgacgaagagctgctcgatggagccggagtgataatggattttcaaacatcggaagacgacaatcttttggatggcgacaccgcggtgggaactcattacacaatgacaaacgggggatctatcaactcctcaacacatctgttggacctgctcgacgaaccgatacccggagttggcacctacgacgactttcacacgattgactgggtgcgtgagaaatgtaaggacagggagaggcatcggagaattaactctaaaaaaaaggaatccgcttgggaaatgacaaaatcactgtatgacgcctggtccgggtggctggttgtgacccttacaggactggcatccggggctctggcaggtttgattgacatcgcagctgactggatgactgacctgaaggaggggatctgtttaagtgccctgtggtacaaccacgagcagtgttgttag

SEQ ID NO: 218137 - DNA, 420 bp, synthetic construct
  misc_feature 1..420: note = Description of Artificial Sequence: Synthetic coding sequence
  source 1..420: mol_type = other DNA
atggagagcgagcagctcttccatcgagggtactacagaaactcttataattctattacttccgcaagcagcgatgaggagctccttgatggcgcaggcgtaattatggacttccaaaccagtgaagacgacaacctccttgacggggacactgctgtggggacacactacacaatgaccaacggtggaagcatcaacagctcgactcatctgctggacttattagacgaacccattcctggcgtggggacatacgacgattttcacacgatcgattgggtccgcgagaaatgcaaggaccgtgagagacacaggaggatcaatagtaaaaagaaggagtctgcctgggagatgacgaagagtctgtacgacgcttggtctgggtggttggtggtgaccctcaccggtctagcctcgtag

SEQ ID NO: 218138 - DNA, 2457 bp, synthetic construct
  misc_feature 1..2457: note = Description of Artificial Sequence: Synthetic coding sequence
  source 1..2457: mol_type = other DNA
atggagtctgagcagttattccaccgaggttactaccgaaattcatacaacagcatcaccagcgcctccagtgatgaagaactgcttgacggggcaggtgttatcatggactttcagacatctgaagatgataacctgctagatggcgataccgctgtcgggacccattataccatgacaaacggcggatccatcaactcaagcacacacctgctggatcttctcgatgaaccaatcccgggagtcggtacttacgacgacttccataccatagactgggtccgggagaaatgtaaagatcgcgaaagacatcggcgtatcaatagcaagaaaaaggaatccgcctgggaaatgacaaagtcgctgtatgatgcgtggtctggctggctagttgtgacactcactggtctggccagtggtgctctggcgggtctgattgatatcgccgcagattggatgacagatctcaaggaaggaatatgcctttcagcactctggtataaccacgagcagtgctgctggggcagcaacgagactacctttgaggagcgagacaaatgcccgcagtggaaaacctgggctgagcttattatcgggcaggccgagggccctggatcttacatcatgaattacatcatgtacattttctgggctctatcattcgccttcctggctgtgtcactggtgaaagtatttgcgccttacgcctgcggctccggcattcccgagatcaaaaccatattaagcggattcataataaggggctatctcggaaagtggactttgatgattaaaacgattaccttggtcctggcagtggcatcaggcctcagcctggggaaagaggggcctctcgtgcacgtggcctgctgttgcgggaacatcttcagttatctgttcccaaaatacagtacaaacgaggctaagaagcgggaggtgctttcggctgcctccgcagcaggagtgtcagtggctttcggggcacctataggcggagtgttatttagcctggaggaagtgagctattattttccactgaagactctctggagatctttttttgcagcactggtcgccgcattcgtcctgcgaagcatcaacccttttggaaattctcgactcgtgttattttacgtcgaatatcatactccgtggtacctctttgagctttttccttttattcttttgggggtttttggcggactgtggggggctttcttcatccgggcaaacattgcctggtgccgaaggcgcaaaagtacaaaatttggcaagtatcccgttctggaggtgataatcgtcgccgcaatcacagctgtcatcgcctttccaaacccctataccaggctcaacaccagtgagctgattaaagagctgtttacagactgtgggccactcgagtcctcatccctgtgcgattacaggaacgacatgaatgcaagtaagatagtggatgacatacccgacagaccagctggcatcggcgtgtatagcgcaatatggcagctgtgcctggccctgatttttaagatcattatgaccgtgtttacctttggaattaaagtgccttctggtttattcatacctagcatggccattggcgctatcgccggaagaattgtcggaattgccgtcgaacagctggcctattatcaccatgattggtttatcttcaaagagtggtgcgaggtgggggctgattgcataacccccggactgtacgcaatggtaggagccgctgcctgtttggggggagtcaccagaatgacagtttctctggtggtgatcgtattcgagttgaccggagggttggaatatatcgtccccctgatggcagccgttatgaccagcaagtgggtgggtgatgcattcgggagagagggcatctacgaggcccacatcagattaaacggttaccccttcctcgatgccaaggaagaattcacacacaccactctggcagcagacgttatgagacctcgcagaaacgaccctcccttggctgtgctcacccaggataacatgaccgtggatgacattgagaatatgatcaatgagacatcatacaatggtttccccgtcataatgtccaaggagagtcagagactcgttggcttcgcgctgaggcgggaccttacgattgcgattgagtcagccagaaaaaagcaggaaggaatcgtggggtcctctcgagtctgcttcgcacaacataccccctctttacctgctgaaagtccaagaccactcaaactgcggtccattttagacatgtcacctttcactgttaccgatcacacccccatggaaattgtggtagacatttttaggaagctgggcctccgtcagtgtctggtgactcacaacggccgtctgttaggaatcatcaccaaaaaggacatattgcgtcatatggctcaaactgcaaatcaagatcccgctagcatcatgtttaactag

SEQ ID NO: 218139 - DNA, 576 bp, synthetic construct
  misc_feature 1..576: note = Description of Artificial Sequence: Synthetic coding sequence
  source 1..576: mol_type = other DNA
atggaatcggaacagctctttcatcggggttattatagaaacagttataattccatcaccagtgccagctccgacgaggaactcctggatggagccggagtaataatggactttcagacttcagaggatgacaatctgctcgacggggataccgcagtggggacccactacactatgacaaacggaggatcgatcaattcctcaactcacttgttagacttgttggatgaaccaattcctggtgtaggtacttacgatgactttcatacgattgattgggtgagagaaaaatgcaaagatagagaacgccaccgaagaattaatagtaagaagaaggagtctgcctgggagatgaccaagtcattatatgatgcctggagtggctggttggtggtaactctgaccggactggctagcggcgctctcgccggactgattgacattgccgctgactggatgaccgacctgaaagaaggcatctgcctgtctgccctctggtacaatcacgaacagtgttgctggggctccaacgaaactacctttgagaagaagaaaaaaaagaagaagaaagcatag

SEQ ID NO: 218140 - DNA, 2190 bp, synthetic construct
  misc_feature 1..2190: note = Description of Artificial Sequence: Synthetic coding sequence
  source 1..2190: mol_type = other DNA
atggtcaatgccggagccatgagtgggtcgggtaaccttatggatttcttggacgaaccgttccccgatgtgggcacctacgaggattttcacacgatcgattggcttagggaaaaaagcagggacaccgaccgacatagaaaaatcacttcaaaatccaaggagtccatttgggaatttataaagagtctcctggatgcttggagtgggtgggttgttatgctgcttattggtctgctggccggaacattggcaggcgttatcgatctggctgtggactggatgactgacctgaaagagggggtttgtctttctgccttttggtatagccacgaacagtgctgctggacgtccaacgaaacgacatttgaagaccgggataagtgccctctgtggcagaagtggtctgaactgctcgtaaatcagtccgaaggtgcttctgcgtacattctgaactaccttatgtatattctttgggccctcctgttcgcatttttggcggtgtccctggtgagagtgttcgctccttatgcctgtggctcaggaataccagagatcaagaccattctctccggcttcatcatccgcggttacctgggtaagtggaccctcctcataaaaacggtgactcttgtgctggtcgtgagcagcggcctgtccctaggtaaggaagggcctctggtgcatgtggcttgttgttgcggaaacttcttctcgtcacttttttcaaaatattcaaagaatgaggggaagaggcgagaagtcttatccgccgcagcagccgctggagtctctgtagcctttggggcacccatcggaggcgttttgttttctctggaggaagtgtcctattattttcctctgaagacgctgtggagatctttcttcgccgctttagtggctgcatttaccctgcgaagcattaacccatttggaaattctcgtctggtccttttctatgtggagtaccacacaccttggcgccgaaagaccacaaggttggggaaataccccgttcttgaggtgatagtggtgaccgctattaccgcaatcattgcttaccccaatccctacacaaggcagtctacttccgagctcattagcgagttgtttaacgattgcggtgccctcgagtctagccaactttgcgactatatcaacgacccaaacatgacaagaccggtagacgacatccctgaccgcccagcaggtgtgggcgtgtacactgcaatgtggcagctggctcttgctttaatctttaaaattgtcgttaccatctttacattcggcatgaaaatcccatccggactttttatcccatctatggccgtgggcgctatagcaggcagaatggttggaattggagtggaacagctggcctatcaccaccatgattggatcatttttagaaattggtgccgtccaggagccgactgcgtaacccccggactctacgcaatggtaggtgccgctgcttgtctgggtggggtgactagaatgactgtgtccctagtggtgatcatgtttgaactcacaggtggcctcgagtacatcgttcctctaatggctgctgctgtaaccagcaaatgggtggccgatgccttcggtaaggagggcatctatgaggcccatatccatctgaatggttacccttttttggacgtgaaagatgagttcacccaccgcacactggcaactgatgtgatgcgtcctagacgaggggaacctccgctgtctgtgctaacacaggacagcatgacagttgaggatgtagagacactgattaaggaaaccgattacaacggcttccccgttgttgtgtcccgagatagtgaaaggctgatcggattcgcacagcgaagagagcttatcctggccatcaaaaacgctcggcagagacaggaaggcatcgtgagcaacagcattatgtatttcaccgaggaaccacccgagcttcccgctaactccccccatcccctgaagttgcgtaggatcctgaatctgtcccccttcacagtgactgatcataccccaatggagacagtcgtggacatcttccgtaaattaggcctgcgccagtgtctcgtgacacggtccgggcgactgttggggatcattaccaaaaaggatgtgctccgtcacatggcacagatggctaatcaggaccctgaatcgatcatgttcaactag

SEQ ID NO: 218141 - DNA, 2283 bp, synthetic construct
  misc_feature 1..2283: note = Description of Artificial Sequence: Synthetic coding sequence
  source 1..2283: mol_type = other DNA
atggtaaacgccggagccatgtcagggagcgggaatctgatggacttcctggacgagccattcccagacgtcggcacctacgaggacttccatacaattgactggcttagagagaaaagtagggacactgacaggcaccgcaagattacttccaagtccaaagagagcatctgggagttcattaaatctcttttagacgcctggagcggctgggtcgtcatgctgctcattggcttgttggcaggaaccttggccggagtaattgatctcgcggtcgactggatgactgatctgaaagaaggcgtttgcctatccgccttctggtactcccacgagcagtgttgttggaccagtaacgagacaaccttcgaggaccgcgacaagtgcccgctgtggcaaaagtggtctgaactgctggttaatcagtccgaaggcgcatccgcttatatcttgaattatcttatgtatattctatgggctttgctcttcgcctttctggcagtgagcctcgtgagagtgttcgctccttacgcatgtggttcgggtatccctgaaatcaaaactattctgagtggttttatcatccggggatatctaggaaagtggaccctcttgattaaaacggttacactcgtgctagttgtcagcagcggcctgtcccttggcaaggaagggccactcgttcacgtcgcctgttgctgtgggaacttcttctccagtctgttttccaagtactctaagaacgagggtaaaaggcgcgaagtgctgagcgcggcagccgcagctggtgtcagcgtcgccttcggtgccccaatcgggggagttttattcagtctagaggaagtgtcatactactttcctctcaagacgctgtggaggtcttttttcgccgctctggttgcagcgtttaccctgagaagtatcaaccctttcggcaactcgcggcttgtgctcttctatgttgagtatcacaccccctggtacatggccgaactattcccgtttatactccttggcgtgtttgggggtctttgggggactctgtttatcagatgtaacattgcctggtgccgtcgtcgtaaaaccaccagactgggtaaatatccagtgctggaagtgatcgtggtgaccgcaataacagcaatcatcgcctatccaaatccatatacacggcagtctacatccgagctgatcagtgaactgtttaacgattgtggagccctggagagctcacaactttgcgactatatcaatgatcctaacatgacgaggcctgtcgacgatattcctgacaggcctgccggtgtcggagtgtacactgcaatgtggcagcttgccctagccctcatctttaagatcgtcgtgactatattcacgtttggtatgaagatcccaagtgggctcttcataccttctatggctgtcggcgctatcgccggacgaatggtgggaatcggtgtggaacaacttgcgtatcatcaccacgattggattattttcaggaattggtgtcgccctggcgctgattgtgtgacaccaggactctatgctatggtcggcgcagccgcatgcctgggaggagtgacgagaatgaccgtatctctcgtggtaattatgttcgaactgaccggtggacttgagtacattgtgcctctcatggcagcagctgtcacttctaagtgggtggctgatgccttcgggaaggaaggcatctatgaagcacatatacatttgaacggatatcccttcctcgatgttaaagacgaatttacacatcgtaccttagcaaccgatgtcatgcgtccccgacggggtgagcctccactcagcgttctgacacaggactccatgacagtagaagatgttgagacactgatcaaagaaaccgactataacggattccctgtggtggtctccagggattccgagaggttgattgggtttgcccagaggcgggagcttattctcgcaatcaagaatgccagacagaggcaagagggcattgtgtctaactctattatgtattttactgaggaaccccctgaattgcccgcaaatagcccacacccgcttaagctcaggagaatccttaacctgagtccatttaccgttactgaccataccccgatggagaccgtcgtcgatatcttcagaaagctgggcctgcgacagtgtctcgtgaccagatcgggaaggctgctggggataatcactaagaaagacgtcttgcggcatatggctcagatggcaaaccaggatcctgagtccatcatgttcaattag

SEQ ID NO: 218142 - DNA, 2001 bp, synthetic construct
  misc_feature 1..2001: note = Description of Artificial Sequence: Synthetic coding sequence
  source 1..2001: mol_type = other DNA
atgactgacctaaaagagggagtgtgtctgagcgctttttggtacagccacgaacaatgttgctggacttctaacgaaactacatttgaagaccgcgacaaatgtccactgtggcaaaagtggagtgaactgctcgtgaaccagtcagaaggggcaagcgcttatatcctgaattatttgatgtacattctgtgggcgctgctctttgcatttctggccgtcagtcttgttagagtgttcgcgccttacgcgtgtggcagtggcattccagagattaagaccatcctctctgggttcattattcgcggatatctgggaaagtggacactgctgatcaaaacagttaccctcgttctcgtagtgagctctggcctctctctggggaaggaggggccactggttcacgtagcctgttgctgcggaaattttttctccagtctgtttagtaagtatagcaaaaatgaaggcaaaagacgtgaggttttgtccgccgctgccgcagccggtgtatctgtcgctttcggtgcgcctatcggcggagttctttttagccttgaagaagtatcctattactttcctcttaagaccttatggagatctttctttgctgccctggtcgcagcattcacactgcgaagtattaaccccttcggaaatagccggctggtgctgttctatgtggagtaccatacaccctggtatatggcagagctgttcccattcatcctcctcggcgtcttcgggggattatggggtaccctgttcatccgctgcaatatcgcctggtgccgcaggagaaagacaacccggttagggaagtatccagtcctggaggttatcgttgtgacagccatcactgccattatcgcttacccaaatccttacacccgacaaagtaccagtgagctaatctctgaactgttcaacgattgcggagctcttgaatcgtctcaactctgcgattacattaacgatcctaacatgactaggcccgtggatgacatcccagaccggcctgccggtgtgggagtgtacaccgctatgtggcagcttgctctcgctcttatttttaagatcgttgtcaccatatttactttcggaatgaaaattccttctgggctcttcattccctccatggcggttggtgccatcgcaggtcggatggtggggatcggggtagagcagctggcctaccatcatcacgactggatcatctttcggaattggtgtcgcccaggagccgactgcgtgacaccaggattgtatgctatggtgggcgctgcagcgtgcttaggcggagtaaccagaatgaccgtgtcactggtggtcatcatgtttgaattaactgggggactggaatatatcgttcctttaatggcggcagccgttacaagcaagtgggtcgctgatgcttttggcaaagaaggaatttacgaagcacacattcacttgaatggatatcccttcctggacgtgaaggacgagtttacccatcggacactggccaccgacgtgatgcggccacggcgaggggagcctcctttgagcgtcttgacacaggacagcatgactgtggaagatgtcgagactttgataaaagaaactgactacaatggcttcccagttgtggtgtctcgcgactccgaacgacttatcggctttgctcaacggcgtgaactgattctggccataaaaaacgccagacagcgacaggaggggatcgtcagtaactcgataatgtatttcactgaggagcccccagagctgccagccaacagtccacacccattaaagctccgcagaattctgaacttatcccctttcacagtgaccgaccatacgcccatggaaacagtcgttgacattttccggaagctgggcctcagacaatgcctggtaaccagaagtggcaggctgttgggaattatcacgaagaaggacgtccttcgtcatatggcgcagatggctaatcaggatcccgaatcaatcatgttcaactag

SEQ ID NO: 218143 - DNA, 459 bp, synthetic construct
  misc_feature 1..459: note = Description of Artificial Sequence: Synthetic coding sequence
  source 1..459: mol_type = other DNA
atggtgaacgccggagcaatgagtgggtcgggcaacctaatggattttctggacgaaccctttccagacgttggtacttacgaggatttccatactatcgattggttgcgagagaagtcccgcgacaccgacagacacaggaagatcacaagcaaatctaaagaatctatttgggagttcatcaaaagcttgctggatgcctggtcgggctgggtggttatgctgctgatcggccttctggctgggactctcgcaggggtcattgaccttgccgtagattggatgacagatttaaaggaaggcgtctgtttgtcagcattctggtactcccacgaacagtgctgttggacctcaaatgagacaaccttcgaggacagggacaaatgcccactctggcagaagtggtccgagctactggtcaaccagtctgaagtgctctctgccgcagccgctgcttag

SEQ ID NO: 218144 - DNA, 2241 bp, synthetic construct
  misc_feature 1..2241: note = Description of Artificial Sequence: Synthetic coding sequence
  source 1..2241: mol_type = other DNA
atggacttccttgaagaaccgatccctggcgtcggaacgtatgacgacttcaatacaattgattgggtgcgagagaagtctcgggatcgagaccgacaccgcgagataacgaataaatccaaggaaagtacctgggccctgatccacagcgtgtccgacgcatttagcggctggctgcttatgctcctcatcgggttactgtcgggatccctcgctggactcatcgatatctccgcccactggatgactgatctgaaagaaggcatctgcacggggggattctggttcaaccatgaacactgttgctggaactctgagcacgtcacgtttgaggagagggataaatgtcccgagtggaattcatggagccagctgatcattagcacagacgagggcgctttcgcctatatcgttaactatttcatgtacgtcctgtgggctctgctgttcgcctttctagccgtctccttggtaaaggtgttcgccccatacgcctgtgggtcggggatcccagaaatcaagactatcttgtccgggttcattatacgagggtatctggggaagtggacgctcgtcatcaaaaccattacattggtgcttgcagtcagctcaggcttatcccttgggaaggaagggccacttgtccacgtggcctgctgttgtgggaacatactctgccattgcttcaacaagtacagaaaaaacgaggccaagagacgcgaagttctgagcgctgccgctgctgcaggcgttagcgtagcttttggagcccctatcggtggcgtgctattttcactggaggaggtgagttactacttccctcttaaaaccctgtggcggtccttttttgcggctctggtggcagctttcaccttaaggtccattaaccccttcggcaactcccgcctcgtgctgttctacgtggaatttcataccccatggcatctcttcgaattggtcccctttattctccttgggatctttggaggtttgtggggtgcgctcttcatcagaactaatatcgcttggtgtaggaaacgcaaaaccacccagctgggcaagtaccccgtcatcgaggtcctcgtagtgaccgctattacagccattctggcgtttcctaacgaatatacaagaatgagcacaagcgagttgatctcagaactgttcaacgactgcggtctgttagattcaagcaaactctgcgattacgagaatagattcaatacgtccaagggcggtgagctgccagacaggcctgctggtgtgggggtatatagtgcgatgtggcaactcgctctaaccctgattctcaaaatcgtgattactatcttcacttttgggatgaagatccctagcggcctttttatacccagcatggccgtgggggctatagctggccgtctcctgggggttggcatggagcagctggcttattaccaccaggagtggactgtctttaatagctggtgcagccagggcgcagattgcataacgccagggctctacgcaatggtcggagcagccgcatgtctcggaggagtaactcgtatgaccgttagtctggttgtgatcatgttcgaacttactggcggactcgagtacattgtgcccctaatggctgcagctatgacatcgaaatgggtagcagacgccctgggtagagagggcatctacgatgcgcacattcgactcaacggctatccttttctcgaggccaaggaagaatttgcccacaaaaccctagccatggatgtgatgaaaccacgtaggaatgaccccctgttgactgtgctgacccaggattccatgactgtcgaagacgttgaaacgatcatctcagagaccacctattcaggtttcccggtggtggtcagcagggagagccagcgactggtgggatttgtgttgcgtcgagatttgatcatttcgatcgagaacgcccgaaagaaacaggacggcgtagtgagtacgagcatcatctactttaccgagcactccccccctctacctccctatactcccccaacattgaagcttcgcaacatcttagatctcagccccttcaccgtgacagacctgacccccatggagatagtcgtggacattttccgtaagctgggactcaggcagtgcctggtcacacacaacggaagattgctaggcattattaccaagaaagacgtcttgaagcatatcgctcagatggcaaatcaggatccagattccatcctctttaactag

SEQ ID NO: 218145 - DNA, 2451 bp, synthetic construct
  misc_feature 1..2451: note = Description of Artificial Sequence: Synthetic coding sequence
  source 1..2451: mol_type = other DNA
atggcaatgtggcagggcgcaatggacaataggggatttcagcagggtagtttttctagctttcagaattctagctccgatgaggatctcatggatatccctgccactgcgatggacttttcaatgcgagatgacgtgccacccctggaccgcgaggtaggagaagataaaagttacaatgggggaggcatcggctccagcaaccggattatggactttctagaagaacccatacccggagtgggtacttatgatgacttcaataccattgactgggtcagggaaaagagcagggacagagacagacaccgggaaattacaaataagtcaaaggaaagtacatgggccctcatccactccgtgtctgatgccttctccgggtggcttctaatgctcctcatcggattgctgtcaggatcccttgccggactcattgatatatcggctcactggatgactgatctgaaagaagggatttgtaccggaggtttctggttcaaccatgagcactgttgttggaactccgaacacgtgacttttgaggaacgcgataagtgccctgagtggaacagctggtcccagctcataatctcgacggacgaaggcgctttcgcttatatcgtgaactacttcatgtacgtgttatgggctctcttgttcgcatttctcgccgtgtcacttgtcaaggtatttgcgccatatgcttgcggctcaggaatccccgaaatcaaaacaatcctctccggttttatcattagaggttatctgggcaaatggaccttggtgattaaaacaattactttggtgctggcagtgtcatccggcctttccctcggcaaggagggccctttagtgcatgtggcttgctgctgtgggaatattctatgccactgcttcaataagtatcggaagaacgaggccaagagacgcgaggtgctgagcgcagccgctgcggcaggcgtctccgtggcttttggagcccctatcggaggggtattgttttccctggaggaggtttcttactactttcctcttaagaccctctggagatcattcttcgccgctctcgttgcagcatttacattgcgctctatcaaccccttcggcaacagtagactggtgctgttctacgtggaattccacaccccatggcacctctttgagctggtgccattcatattactgggtattttcggaggcttgtggggagccctttttatccgtaccaacatcgcctggtgtcgtaagagaaagacaactcagctgggcaagtatccagtgatcgaagttctcgtggtgacagctatcacagccattctggcgttccctaacgagtataccaggatgagcacttccgagctgattagcgagttgttcaacgactgcggtctgctggacagttcaaagttatgtgactacgagaacaggttcaatacttcaaagggtggagagctacctgatcgccctgctggcgtgggagtctatagtgcaatgtggcaactggccttgacccttatcctcaaaatagtcatcaccatcttcacatttggtatgaaaatcccttcgggtttgtttattccctctatggcagtaggggctatagctggcaggctgttgggcgtcggtatggaacagcttgcctactaccaccaggagtggactgtcttcaattcttggtgcagccagggggcagactgtatcacacccggattgtatgctatggtgggagctgccgcatgcctggggggtgtgacacgcatgacagttagcctggtggtgatcatgtttgaactaacaggagggcttgagtacatcgtgccactcatggcagccgcaatgacctccaagtgggtagccgacgcgctgggtagggaaggaatctatgatgcacacatccgactgaatggctaccctttcctggaagccaaggaggaattcgcccacaagacactcgcaatggacgtcatgaaacctcggaggaatgacccacttctaacagtattaactcaagacagtatgacagttgaagacgtagagaccatcataagtgagactacctactcaggcttccctgtcgtggtgagtagggaaagtcaaagactagtagggttcgtgctgaggcgcgacctgatcattagcatagaaaatgcgagaaagaaacaggacggcgtggtgagcacatcaatcatttatttcacagagcacagtccgccactgcccccatataccccccctactctcaaactgcggaatattctggacttgagcccctttaccgtcacagacttgactcctatggagatcgttgtggacatttttaggaagctgggcctaaggcagtgtctggtgacacataatggccgactcctgggaatcatcacgaagaaggatgtcctgaaacacatcgcccagatggcaaatcaagatccagattcaatcctcttcaattag

SEQ ID NO: 218146 - DNA, 2451 bp, synthetic construct
  misc_feature 1..2451: note = Description of Artificial Sequence: Synthetic coding sequence
  source 1..2451: mol_type = other DNA
atggcaatgtggcaaggtgccatggacaatagaggctttcaacagggttcgttctcttctttccagaatagctcatcagacgaggaccttatggacatacccgctacagcaatggatttctccatgcgcgatgacgtccccccactagaccgagaggtgggcgaagacaagtcttataacggtggcggaattggctctagtaatcggataatggatttccttgaggagccaatccccggagtggggacttatgatgattttaataccatcgactgggtgagggaaaaaagccgggatagagataggcatagagaaatcactaataaatctaaggaatcaacatgggccctaatccacagtgtctccgacgcctttagcggctggttactgatgttgctcatcggactgctgtctggaagcctggcaggactgatcgatatatctgcacattggatgaccgacctgaaggaaggcatatgtacaggcggtttttggtttaaccacgagcattgctgttggaactcagaacatgtgacgttcgaggagagggacaaatgcccagagtggaattcatggagccagttaattatatcaaccgacgaaggcgcttttgcttacatcgttaattactttatgtacgtcctctgggctctcctctttgctttcttagccgttagtctcgtaaaggtattcgccccatatgcatgcgggtcgggcattcccgaaattaaaacaatcctgtctgggttcatcatccgtggatacctgggaaaatggacgttggttatcaagaccataaccctggtcctcgccgtatcttccggactatctcttggcaaggagggccctctggtgcacgttgcctgttgttgtggcaacattctgtgccattgcttcaacaaatacaggaaaaacgaggccaaacgcagggaagttctgagcgctgcagcagccgcaggtgtatctgtggcattcggcgctcctataggaggcgtgttgttcagtctcgaagaggtctcgtactacttcccgctgaagaccctatggcgctccttcttcgccgctctcgtcgcggcattcaccctgcgaagcatcaatcccttcgggaactcaaggttagtgctgttctacgttgaatttcatactccttggcaccttttcgaattagtgccctttatccttcttggcattttcggcggactgtggggcgctttgttcattcggactaacatagcttggtgtagaaagagaaagacgactcagttgggcaaatatcccgtaatcgaagtgctggttgtgacagccatcaccgctatcctggcctttcctaacgaatacacccggatgtccacgtccgaactcatcagcgagctgtttaatgactgtggcttgctcgactccagcaaactgtgtgattatgaaaataggtttaacacttccaaagggggagagctacccgatcgccctgcaggtgtgggggtctattcagcaatgtggcaattagcgctgacgctgatcctgaaaatcgttattaccatattcacttttggcatgaagatccccagtgggctgttcatcccatctatggccgtgggcgctattgcagggagacttctcggtgtcggtatggagcagctggcatattaccatcaagagtggacagtgtttaattcctggtgttcccagggagccgattgcattactcccggactgtacgctatggtgggggcagctgcttgtctgggtggcgtgactaggatgacagtgtccctagtggtaattatgtttgagcttactggtggcctggaatatattgttcctttgatggcagctgctatgacgtcaaaatgggtcgcagacgcactgggcagagaagggatttacgatgcccacatacgcttaaatggttacccgttcctcgaagcaaaggaagagtttgcacataagaccctggccatggatgtgatgaagccgagaaggaacgaccctctactgacagtcctgacccaggattccatgactgtggaagacgtggagacaattatatccgaaaccacttactcagggtttccagtggtcgtgtcaagagagtctcaaagactggtgggatttgtgttacgcagagatctcatcattagtattgagaacgctaggaagaaacaggacggggtggtgtccaccagcattatctacttcaccgaacacagcccacccttgcctccctacaccccaccgacactcaagctgcgtaacatcctggatctctctccatttaccgttacggacctaacacccatggaaattgttgtggatatatttcggaaactggggctgcgccaatgtctggtgactcacaatggaagactgctggggattattacaaagaaagacgtcctaaagcacatcgctcagatggcaaaccaggatcccgactctattctctttaattag

SEQ ID NO: 218147 - DNA, 2241 bp, synthetic construct
  misc_feature 1..2241: note = Description of Artificial Sequence: Synthetic coding sequence
  source 1..2241: mol_type = other DNA
atggactttttggaggaacccattcctggagtggggacctacgatgactttaacaccattgactgggtccgcgagaagtctagggaccgagatcgccacagggagattaccaacaaatcgaaggaaagtacatgggctctgatacacagcgtaagtgacgctttctcaggctggctgttgatgctcctcataggcctcctctccggctctctggctggccttattgacatatcagctcactggatgaccgacctgaaggaaggaatttgtactggaggtttttggtttaatcacgaacattgttgttggaattcggaacacgttacgttcgaggagcgcgacaagtgtccagagtggaactcctggagtcagttaatcatttccaccgatgagggagcattcgcgtacattgtaaattatttcatgtatgtgctctgggccctgcttttcgcgtttctggccgtgtcgctggtgaaagtgtttgctccgtacgcttgtggtagtggtatccctgagatcaagacaatcctgagcggcttcataattcgaggttacttgggcaagtggacgctggtcatcaaaaccatcaccttagtgctcgcggtcagctcagggctttcacttggaaaggaagggcctttggtacacgtggcctgttgttgtggtaacatcctctgccactgcttcaacaagtatcggaaaaatgaggccaaaaggcgcgaagtactctcagcagcagccgctgctggagtgtcagtagctttcggggcacctatcggcggagtgctattcagcctcgaggaagtaagctattactttccacttaaaaccctctggcgctcattctttgctgcactcgtagctgccttcactctcagaagtatcaaccctttcggcaacagtcggttggtccttttttatgtggaattccacacaccatggcatctgtttgagctggtgcctttcattctgctcggcatatttggcggactttggggcgctctgttcattcgtaccaacattgcctggtgtcggaagcgaaaaaccactcagctgggcaagtaccccgtcattgaagtgcttgtggtcacagcaatcaccgcgattcttgccttccctaacgagtatacgaggatgagcacgtctgagctcatctcagaactgttcaacgattgtgggcttctggattcctctaaactttgtgactacgaaaatagatttaatacctcgaaagggggtgagctgccggacagacccgctggggtaggggtgtattccgcgatgtggcagttagccttgactcttattcttaagatagtcatcacaatattcacattcggtatgaagatcccaagcggacttttcattccctctatggctgtgggagcaattgctggacggctccttggggtgggcatggagcagctggcctactatcaccaagagtggactgtgtttaactcctggtgttcgcagggcgctgattgtattacacccggactatatgccatggttggagcggctgcctgcctgggtggggtgactcgaatgaccgtgagtctggttgtgatcatgtttgagctgactggtggcctggaatatatcgtccctcttatggccgcagccatgacaagtaaatgggtggctgacgcactcggcagagagggcatatacgacgcacatattaggttaaatggctatccttttcttgaggctaaagaggagttcgctcataagactctggcgatggatgtgatgaagccgagacgtaatgacccactgttgaccgttctgactcaggactccatgaccgtggaggatgttgagaccattatatcagaaactacctattcaggtttcccagtcgtggtgagccgcgaatcccagcgacttgtgggctttgttcttagacgggaccttattattagtatcgaaaatgccagaaagaagcaggacggcgtcgtgtcaacctcaatcatttactttacagaacattcgccaccactgccaccctatactcctcccactttaaagctgcggaacatcctcgacctgtctccatttacggtgacagatctcaccccaatggagattgtcgtcgatatattccgaaagttgggcctaaggcagtgtctcgtaacccataatgggaggctgctgggaattattactaagaaagacgtattgaagcacatcgctcagatggcaaatcaggaccctgatagtatacttttcaactag

SEQ ID NO: 218148 - DNA, 1947 bp, synthetic construct
  misc_feature 1..1947: note = Description of Artificial Sequence: Synthetic coding sequence
  source 1..1947: mol_type = other DNA
atgaatattgtcgccggtaccctctctatgtcacccttaaaacgcgataagtgccctgaatggaacagctggagtcaactaatcatttctaccgacgagggtgcgttcgcatacatcgtaaattatttcatgtacgtgctctgggcccttctttttgctttcctggcagttagtttggtgaaggtgttcgccccttatgcctgcggatctggaattccagaaatcaaaaccatcttgtctggctttattataagaggatatctagggaaatggaccctagtgattaagaccattaccctcgtgctcgcagtttcctccgggctgtctctggggaaggaaggccctctggtccatgtagcctgctgttgcggcaacatcctctgtcactgctttaataagtaccggaagaacgaagccaagcggcgagaagtgctgtctgccgctgctgcggctggcgtctccgtcgcttttggagccccaatcggtggggtgcttttctccttggaggaagtctcttattatttcccactcaaaaccttatggagatccttctttgctgccctcgttgcagcctttaccttacgcagcattaacccttttggaaatagtcgtttagtactcttctacgtggaattccacacgccctggcacttgttcgaacttgtccccttcatcctgctcggcatcttcgggggactgtggggcgctctcttcatcagaaccaatatcgcctggtgccgaaagcgcaagactacgcaactgggaaagtacccagtcattgaagtgcttgtggttactgccatcaccgctatactggcctttccaaatgagtatacgcgaatgagtacatctgagctgataagtgaactatttaacgactgcggactgctcgactcctcaaaattgtgtgattatgaaaatcggttcaatactagtaaaggcggagaattgcccgataggcctgccggtgttggggtctactcagcaatgtggcagctggcactcactctgatcctgaagatcgtcatcactatttttacattcggcatgaagattccatcaggactgtttatcccgtccatggccgttggggctattgccggtaggctgctgggtgtcggtatggagcagctggcctattatcatcaggagtggacagtctttaactcttggtgctcacagggcgctgattgcatcacccctggcctgtacgcaatggtgggggcagctgcctgcttgggtggagttaccaggatgacagtttccctggtggtgatcatgttcgaattgacgggcggtctggaatatatcgtccctctgatggcagccgcaatgacgagcaagtgggtggccgacgcgctcggtcgcgaaggcatatacgacgctcatattcgcctgaacggttatccctttttagaggccaaagaagaatttgcccataagaccttggccatggacgtgatgaagcccagacgtaacgacccgctgctgacggtgctgacgcaggactcaatgacagtcgaggacgtggaaactattatttccgagaccacctattctggctttcctgttgtggtctctcgggagtcccagcggctagtgggattcgttctacgacgcgacctgattatatctatagagaatgccagaaaaaagcaggatggcgtggtgtctacctcaataatttacttcaccgaacactcaccccctctaccaccatatacgccgccaacattgaaactgagaaatatcttggacctatctccgtttactgtcactgacctaactcccatggagatcgtggtcgacattttccggaagctcggcctgcgacagtgtttggtcacccataacggaaggctgctaggcataataaccaaaaaagatgtgctgaaacacattgcccagatggctaaccaggaccccgattctatccttttcaactag

SEQ ID NO: 218149 - DNA, 1062 bp, synthetic construct
  misc_feature 1..1062: note = Description of Artificial Sequence: Synthetic coding sequence
  source 1..1062: mol_type = other DNA
atggcgggatgtcgtggctcactgtgctgttgctgcaggtggtgctgttgctgtggggagcgggaaactcgcacccccgaagagctcaccattctgggggagacccaggaggaggaggacgagatattgccaagaaaagattacgagtctctagactacgatcgctgtatcaatgatccttatctcgaggtcctggaaacaatggacaataagaaggggaggagatacgaagctgttaagtggatggtcgtgttcgctatcggtgtatgtacaggtcttgttggtcttttcgtcgatttttttgtgcgactgttcacccagctgaaatttggggttgtccagacctccgtggaggaatgctcccagaagggatgcctggcgttatctctgctggagctgctcggctttaatctcacatttgttttcctcgcaagtctcttggtgctgatcgaacctgttgccgctgggagcgggatccctgaggtgaagtgctatttgaacggtgtaaaagtgcccggtattgtgcgtctgaggaccctcctgtgcaaggtcttgggagtgctgtttagcgtggccggaggactatttgtcgagaaagagggacccatgatccacagcggaagtgtcgtaggagctggcctgccgcagttccaaagcatctcacttaggaaaatccagttcaactttccatactttcggtcagatcgtgataaacgcgacttcgtttccgccggagctgcggctggagtggccgcagcttttggagctcctatcggaggtaccttgttttcactcgaagagggttcttctttttggaatcagggcttaacatggaaggttctgttttgcagcatgagtgccacctttaccttgaatttctttcgtagtgggatccagttcgggagctgggggagctttcagctacccggtctgctgaacttcggcgagttcaagagtctgcgtgaacccccttgcgtaagcggtaatcaccgagggggtgtttgtggtctggacggagtgaggagaatgccaactgatgtgcttttcgaatccaataggtag

SEQ ID NO: 218150 - DNA, 2610 bp, synthetic construct
  misc_feature 1..2610: note = Description of Artificial Sequence: Synthetic coding sequence
  source 1..2610: mol_type = other DNA
atggccggatgccgcggatcgctgtgttgttgttgtagatggtgttgctgctgcggagaaagggagacccgaacaccggaagagctcacgattttgggagagacacaggaagaagaagacgaaattctgcctagaaaggattatgagagcctggactatgaccggtgtataaacgacccttacctggaggtgctggaaacgatggacaataagaaaggcagaaggtatgaagccgtgaaatggatggtggtgtttgcgatcggagtttgcaccggactagttggcttgtttgtcgacttctttgtgaggttattcactcagctcaaattcggtgtggttcaaacaagcgtggaagaatgttcacagaagggatgtctcgcgctcagtctcctcgaactgttaggatttaacctgacctttgtgtttctggccagcttacttgtcctgatcgaacctgtcgccgctgggtccggaatccctgaggtgaaatgttacctgaacggagtgaaggtgcccggtatcgtgcggctcagaacactcttgtgcaaagtgctgggcgtgctgtttagtgtggctggcggacttttcgtagaaaaggagggcccaatgatccactcgggcagcgttgtgggcgctggcctcccacagttccagtcgattagcctccgcaaaatacagtttaattttccctattttcgatccgacagggataagcgcgacttcgtgtctgctggtgctgccgctggcgtcgctgccgcatttggcgctcccataggcggaaccctgttctcactggaggaaggtagttcattttggaatcagggtctgacctggaaggtgctcttttgctctatgtcagctacgtttaccctgaatttctttaggagtggcatccagttcgggtcctgggggtcctttcagcttcctggactactgaatttcggagagtttaagtgttccgacagcgacaaaaaatgccatctctggaccgctatggatttagggttcttcgttgtcatgggcgtgattggcggactgctgggagccaccttcaattgccttaacaagagacttgcgaagtaccgtatgcgaaatgtgcaccctaaaccaaagctagttcgggtgttggagagcttactcgtgagcttggtcaccaccgtggtggtcttcgtcgcttcaatggtgctgggtgaatgccggcaaatgtctagtagcagccagatcggaaatgactctttccaactgcaggtcaccgaggacgtgaattccagtatcaagacattcttctgccccaatgacacatacaacgatatggcaactttgtttttcaacccccaggaaagcgcaatcttgcagctatttcaccaggatggtacgttctcccctgttacattggcgctattttttgtgctatattttctgttggcttgctggacctacggcattagcgtaccgagtgggctctttgtgccctctttgttgtgtggagccgcattcggacggcttgtggcaaatgtactcaaaagctacatcgggctcgggcacatatactctgggacattcgcactgataggagcggctgcctttcttggcggagttgtgcggatgaccatctcactgacagtgattctaattgagtccaccaacgagattacgtacggcctccctatcatggtgacgctgatggtagccaaatggaccggagatttcttcaacaagggtatctatgacatccacgtcggtcttcgaggagtgccattgctggaatgggaaacagaggtagagatggacaaattacgggcatctgatatcatggaacccaacctgacgtatgtgtacccccatacccgtatccaatcactggtgagtattctgcgcacaaccgttcatcatgcctttccagtagtgacagagaatcggggtaatgaaaaagagtttatgaagggcaaccagctgatctctaacaacataaagttcaagaaaagctccatcctgacccgggctggcgaacagcgcaagcgtagccaatcgatgaagagctaccctagctcagaactccgcaatatgtgcgatgagcacattgcttcagaggaaccagccgaaaaggaggacctgttgcaacagatgctcgagcggagatatacaccgtatccaaacctttatcccgaccagagtccaagtgaagactggacaatggaggagcgctttcggccactgacatttcacggattgattctgcgctctcagctagtgacgctgctggtccgcggtgtgtgttattcagaaagtcaatcgagcgcctcccagcctcggttgagttatgcagagatggccgaagattacccacgctatccagacattcacgacctcgacctgactctcctcaatcctagaatgatcgtcgacgtgacaccctatatgaacccatccccctttactgtctctcccaacacacacgtctctcaggtgtttaacctgtttagaactatggggctgcgccatttgcctgtggtaaatgccgttggagaaatagtcggcattatcacacgacacaatcttacctatgaatttttgcaagctcggctgagacagcactatcagactatttag

SEQ ID NO: 218151 - DNA, 2544 bp, synthetic construct
  misc_feature 1..2544: note = Description of Artificial Sequence: Synthetic coding sequence
  source 1..2544: mol_type = other DNA
atggctggctgccgcggatctttatgttgctgttgcaggtggtgctgttgttgcggagagcgggagacacgaaccccagaggaactgacaatccttggggagactcaagaggaagaggatgagatcctcccgagaaaagactacgaaaagggaagaaggtacgaagcagtgaagtggatggtggtgtttgccataggcgtgtgtacaggcctcgtggggctgttcgttgatttcttcgtgcggctttttacccaactcaagtttggtgtcgttcagacatcagtggaggaatgttcacaaaagggttgcctggccctgagtctactggagcttctcggtttcaatttgactttcgtctttctagccagcttgctcgtgctaatagaaccggtggctgccggatctgggatccccgaagtgaaatgctaccttaacggcgtcaaggtcccgggtattgttcgcctgcgaaccctcctgtgcaaggtgttgggtgtgttgtttagcgtcgctggtggactatttgtggaaaaggaaggacctatgattcacagtggttctgtggttggtgcgggtttgccccaattccagtccatctctctgagaaagattcagtttaactttccctatttccgttcagatcgggacaaaagagacttcgtctctgcgggagcagctgccggagtggcagccgcatttggtgctcccatcgggggtacgctgttcagccttgaggagggctctagtttctggaaccagggtctgacatggaaggtattgttctgttctatgagtgcgacattcacgctcaattttttcagatcgggcattcagtttggctcttggggttcattccagctgcctgggcttctgaactttggggagttcaaatgctccgactcagataagaagtgtcacctttggacagcaatggatctcggcttcttcgtcgtgatgggcgtcataggcggtctgttaggtgccacctttaactgcctaaataaacgactcgctaagtaccgcatgcggaacgtgcatcctaaaccgaaactcgtccgagtgctcgaaagcctcctggtttccctggtcaccactgtcgtcgtttttgtggcttccatggtgcttggcgagtgtcggcagatgtcatcaagctcccagatcggtaatgactcctttcagctccaggttaccgaagatgtcaactcctcaattaaaaccttcttttgccccaatgacacttataacgacatggctacattattcttcaatcctcaggagtcagctattctgcagcttttccaccaggatggcaccttctccccggtcacactggcgctgttctttgtcctgtatttcctactggcgtgctggacatatggaatctccgtgccctcaggcctctttgtgcctagcctgctgtgtggagctgcatttggtaggttagtcgctaacgttctcaagagctatattggactgggacacatctactctggaacattcgccttgattggagccgctgcattccttggaggcgtggtccgtatgactatttctctaacagttatcttaattgagtccaccaatgagattacatatggactgccaataatggtgaccttgatggtcgctaagtggactggcgactttttcaataaggggatctacgatattcacgtcgggcttagaggcgttcccttgttggaatgggaaacggaagtggagatggacaagctgcgggctagcgacatcatggagccgaatctgacctatgtgtacccccacactaggatccagagtttggtgtccatacttaggaccactgtgcatcatgcgtttccggtcgtgaccgagaatcggggaaacgaaaaagaattcatgaagggtaaccagctgatttcgaacaatataaaatttaagaagtcgtctatattgacaagggcaggtgaacagcgcaagcgaagccagtctatgaagtcttaccctagcagcgaactcaggaatatgtgtgacgagcacatagcttctgaagaaccggctgagaaggaggatctcctgcagcagatgctcgagcgtcggtacactccttacccaaatctttacccggaccagtcaccttctgaggattggactatggaggaacgcttccgcccacttacttttcatggattgatactgaggagtcagctcgtcacactgttggtgagaggagtgtgttattctgaatcccaatctagtgccagtcagcccagattgtcctatgcagaaatggccgaagactaccccagatatccagatattcacgaccttgacctgaccttactcaatccgaggatgattgttgatgtgactccctacatgaatccttcgcctttcacagtgtcacccaatactcacgtatcccaagtattcaatctgttccgtacaatgggcctcaggcatttgcccgtggtgaacgcagtaggagagattgtgggcatcatcactaggcataatctcacttatgaattcctgcaggcaaggctgcgccagcactaccagaccatttag

SEQ ID NO: 218152 - DNA, 963 bp, synthetic construct
  misc_feature 1..963: note = Description of Artificial Sequence: Synthetic coding sequence
  source 1..963: mol_type = other DNA
atggccggatgtagagggtccttgtgctgttgttgtaggtggtgctgttgctgtggcgaaagggaaacacgaacccccgaggagctgacaattctgggtgagactcaagaggaagaggacgaaatcctaccacggaaagattatgagtctctagactacgacaggtgcataaatgacccctacctcgaagttctggagacaatggataacaaaaaaggtcggagatatgaggcagttaaatggatggtggtgttcgccattggagtttgcaccggcctagtggggctgtttgttgacttctttgttagattgttcacgcagctaaagttcggagtggttcagacgagcgtggaagagtgttcccagaagggatgtctggcactctcactgctggaactgctgggatttaacttaacttttgtgtttctggcatctcttctcgtgctgattgaaccagtcgctgccggatctggaattcctgaggtgaaatgctatctgaatggagttaaggtgccgggtattgtgcgtctgcgaaccctcctctgcaaggtcttaggcgtgttgtttagcgtggccggagggctgtttgtcgagaaagaggggccaatgatccattccggctcggtggtcggcgcaggactgcctcagtttcagtcaatcagtcttcgcaaaatccaatttaatttcccatattttaggtccgaccggtatgggaaaaggcaggaaaggctatgcatatctaggagcggatgctggagttgctgtagcttcagaggggcaaatcgaggctacctggtccaaagtaggggtggattcgtactgctggaacccagagcccatgtggagagcgctctgctcttccatgtctgtcacctgcatccccagctgctgcccttttgggattcagtctggaaattagggttcctcccagcgccttggatcgcagaattgtggagagtatag

SEQ ID NO: 218153 - DNA, 927 bp, synthetic construct
  misc_feature 1..927: note = Description of Artificial Sequence: Synthetic coding sequence
  source 1..927: mol_type = other DNA
atggccggttgccgaggatcactgtgttgctgttgtcggtggtgctgttgctgcggcgagcgagagacgcggactcctgaggagttgactattttaggcgagactcaggaggaggaggacgagattctcccccgaaaagattacgaatctctagactatgaccggtgtataaacgacccttatctcgaggttctcgaaactatggataacaaaaaagggagacgatacgaagctgtgaaatggatggtggtgttcgccatcggcgtttgtacaggactggttgggctttttgtggacttctttgtgagactgttcactcaactcaaattcggggttgtacaaaccagcgtagaagaatgctcccagaaaggatgtctggccttgtctttgctggaactgctgggatttaacttgactttcgttttcctggcaagtctcttggttctgatcgaacctgtcgctgcaggcagcggaatccccgaggtcaagtgttatcttaacggtgttaaagtgccaggaatagtcagacttcggacgcttctgtgcaaggttctgggcgtcctattctccgtagctggaggtctcttcgtggagaaggaaggacccatgattcacagcggaagtgtagtgggagccggtctcccacagtttcaatcaattagtctaagaaagatccagtttaatttcccctacttcagatccgaccgaagcggatgctggagctgttgctcctttaggggcgcaaatcggggatatctagtgcagtctcgcggaggattcgtgctcctcgagcctagggctcacgtggagtcagctcttctgttccacgtctgtcacctccaccctcaactgcttcctttctgggacagcgtttggaagctggggttcctacctgccccatggattgccgagttgtggcgcgtctag

SEQ ID NO: 218154 - DNA, 1062 bp, synthetic construct
  misc_feature 1..1062: note = Description of Artificial Sequence: Synthetic coding sequence
  source 1..1062: mol_type = other DNA
atggccggatgtagaggctcactgtgctgctgctgccgctggtgttgctgttgcggagagcgcgaaaccagaacaccagaggaactgaccatactcggtgaaacgcaggaggaggaagatgagattctgccgcgaaaagactatgagtcactggattacgatcggtgtatcaatgatccgtacttagaagtcctggaaaccatggacaacaaaaaaggccgaagatacgaggcagtcaagtggatggtcgtgttcgctattggggtctgtaccggtctcgtagggttattcgtggattttttcgtcagattatttacacagctcaaattcggcgttgtgcagacttcagttgaggaatgttcgcagaaagggtgtctggccctgtcactcctcgaacttctaggcttcaatctcacatttgtgtttctcgcttccctactggtgctgattgagcctgtggccgcaggaagcggaattcccgaagtgaagtgctatttgaacggcgtcaaagtgccaggcatcgtccggttacgcaccttactgtgcaaggtgctgggagtcctgtttagcgttgccggtggactgttcgtggaaaaagagggcccaatgattcatagtggatccgtcgtcggagcagggctgccccagtttcagagtattagcttgcggaaaatacagttcaacttcccttatttcagaagcgaccgggacaagcgagattttgttagtgccggagctgcggcaggggttgccgcagcattcggagcaccaataggtggaacgcttttctcccttgaagagggaagcagtttctggaatcagggacttacttggaaggtcctcttctgcagcatgagcgcaactttcaccctgaacttcttccggtcaggaattcagtttggttcttgggggtcttttcagctccctgggttgttaaactttggggagtttaagagcctcagggaacccccatgcgtatccgggaaccacagaggaggcgtatgtggtctcgatggtgtgcggaggatgcctaccgacgtgctcttcgagtcaaacagatag

SEQ ID NO: 218155 - DNA, 2862 bp, synthetic construct
  misc_feature 1..2862: note = Description of Artificial Sequence: Synthetic coding sequence
  source 1..2862: mol_type = other DNA
atggctggctgcaggggctctctgtgctgctgttgtagatggtgttgctgctgcggggaacgagaaaccaggaccccagaggagttgacaattctgggagagactcaagaagaggaagatgagattttaccccgtaaagactacgagagcctggattacgaccgatgcataaacgacccttatctggaggtactagagacaatggataacaaaaagggtcgccgatatgaagccgtcaaatggatggttgtcttcgcaatcggagtatgtaccggcctagtaggtctgtttgtcgatttttttgtccggttgttcacgcagctgaagttcggcgtcgtccagacctcggtggaggaatgtagccagaaaggttgtctggccttgagcctgcttgaattactggggtttaacctcactttcgtttttctggcctctctgctggtgctgattgagcctgtggccgcaggtagcgggatccccgaggttaaatgttacctcaacggcgtcaaggttcccggaatcgtcagactgagaactctcctgtgcaaggtgctgggcgtccttttcagcgtagcaggcggtctcttcgtggaaaaagaggggccaatgatacacagcgggagtgtcgttggggcagggctgccccagtttcaatctataagcctgcgcaagattcagtttaatttcccttatttccggagcgatcgcgataaaagagattttgtatcggccggtgctgcagccggtgtggcagccgctttcggagcaccaatcggtggcactctattttccctcgaagaagggagctccttttggaatcaggggctgacctggaaggtcttgttttgtagcatgtctgctacctttactttaaatttttttcggtctggcatccaatttggaagctggggtagctttcagctgccgggacttttgaatttcggtgaattcaagtgtagcgactccgataaaaagtgccacctctggacagccatggacctaggtttctttgtggttatgggcgtcatcgggggactgctgggcgcaaccttcaactgcctgaacaaaaggctggcgaaataccgaatgcgtaacgtccaccccaaaccaaagttggttcgagttctggagagcctactggtctctctagtcacaaccgtggtcgtctttgtagccagcatggttctgggcgagtgtaggcagatgagctcgtcctctcagattggaaacgattcgttccaactacaggtgacggaggatgtaaacagctcaattaagactttcttctgtcccaacgatacctacaatgacatggccactttatttttcaacccacaggagagtgcaattttacagctgtttcaccaggatggcacctttagccccgtgaccttagcgctttttttcgtcctgtattttcttctggcctgctggacttacggtatctccgttcccagcgggttgtttgtacctagtctgctttgtggagcggcttttgggagactggtggcgaacgtgcttaaatcctacattggactgggccacatctacagcggcacatttgccctgattggcgcagctgcttttctgggcggagtggttcgcatgactatatccctgaccgtgattctgatcgagagtaccaacgagatcacatacggcctgccgatcatggttactctgatggtggcaaagtggacaggcgattttttcaataaaggcatttatgacatccacgtcggcctgcggggtgtacctctcctggagtgggagaccgaggtcgaaatggacaagttgcgagcttccgacatcatggaaccgaatttaacctacgtatatcctcacacccggatccagagcctcgtgagtatcctccgtactacggttcaccatgccttccctgttgtcacagaaaaccgcggaaatgagaaggagtttatgaaaggcaaccagttaatctccaataatataaagttcaagaagagttctattctcactagagcgggtgaacagagaaagaggagccagtctatgaagtcttatccctcttctgaacttagaaatatgtgtgatgaacacattgccagtgaggagcccgctgagaaagaagatctcctgcagcaaatgctagagcgacggtataccccctacccaaatctttacccagaccaatccccgtcagaggattggactatggaggaaagatttcggccactgacctttcacggccttatccttcgtagccaattggtcaccctcctggtgcggggtgtctgctattctgagtcacagtctagcgcttcccagccccgactgagttacgctgagatggcagaagattatcctcgatatcctgacattcatgacctggacctgactttgctgaatcctcggatgattgttgacgtgacgccttacatgaatccttcaccattcaccgtgtctcccaatacccacgtctctcaggtgttcaaccttttccgcacgatgggccttcggcaccttccggttgtaaacgcagtcggggaagtgtccgaagcccctgcgctgccgccaccccttagggaagacccactggccagatgttgcctatgcacacaggcatcgcatcagaaacgcaggcacccaactcggcgtggggaatgtggacctacgctggcgctgaaccccgctcggttgccttgcaccagggacccgtttccttgtcttccagcggacggcacaagtgttccactcgcagtcttgtcctcacagtccagagctagcacccgtttatgcctgccccctgagatgctgcttttcacaccataccactggtgcagtctggtactgcacctgcggagggacctgcgaatccgttag

SEQ ID NO: 218156 - DNA, 369 bp, synthetic construct
  misc_feature 1..369: note = Description of Artificial Sequence: Synthetic coding sequence
  source 1..369: mol_type = other DNA
atggctggatgcagaggatcgctctgttgctgttgtcgctggtgctgctgctgtggcgagagggagacgcggactccagaggagctgaccatcctcggggaaacccaggaggaagaggacgagatattgcctcggaaggattacgaatccttagattatgacagatgcatcaacgacccttacctggaagtgttagaaaccatggataataaaaaaggcaggagatacgaggccgtgaaatggatggtggtgttcgctatcggagtatgtacgggtctggtgggattatttgtggacttttttgtgcgcctgtttacccagctcaagttcggggtcgtgcagacctacaaattccagatgaaaatgtag

SEQ ID NO: 218157 - DNA, 2277 bp, synthetic construct
  misc_feature 1..2277: note = Description of Artificial Sequence: Synthetic coding sequence
  source 1..2277: mol_type = other DNA
tcacctcggagcgctctgttccgcgtgggccacatgagctccgtggaactcgacgacgagctccttgacccagacatggaccccccacatcccttcccaaaagagattccacacaatgagaagctgttgagtctcaagtacgagagcttggactacgataattctgaaaaccagctgtttctagaagaagagagacgcatcaaccacaccgcctttcggactgtggaaatcaagcgctgggtgatttgtgcactgatcggaattctgacgggactagtggcgtgcttcatcgatattgtggtcgaaaatctggcgggacttaagtatagagtgatcaaaggcaacatcgataagttcacagagaaaggcggtctcagtttctctcttcttctctgggcaactctcaacgcagctttcgtactcgtcgggagtgtgatagtggctttcatcgagcccgttgccgctggctctggaataccacaaatcaagtgcttcctcaatggagtcaagataccgcatgtcgttcgccttaagacccttgtgatcaaggtcagcggtgttatcctgtctgttgtgggagggctggcagttgggaaagagggtccaatgatccacagcgggagcgtcatcgcggctgggattagccagggacgatctacctctctgaaaagagacttcaagatatttgaatacttccggcgtgacaccgaaaagcgcgattttgtcagtgctggagccgcagctggtgtttcagccgcatttggcgctcccgtcgggggagttctgttctcactggaagagggcgcttctttctggaatcagtttttgacctggaggatattttttgcatctatgatatccactttcacactgaactttgtgttatcaatataccatggaaacatgtgggatctctcaagtcccggactgatcaactttggacggtttgattccgagaaaatggcttacaccatccacgaaatccccgttttcatcgccatgggcgttgtgggcggagtattgggagcggtgttcaatgccctgaactactggcttacaatgtttcggatacggtatatccacaggccttgtctgcaagtgatcgaggcagttctggttgctgctgtgactgccaccgtagccttcgtgctcatctattcttcgcgagattgtcaacctctgcagggaggctccatgtcatatcccctgcaactgttttgtgctgacggagagtataactcgatggccgcagcctttttcaacacaccagaaaagagtgtggtgtctctgttccacgatccacccggatcttacaatcctttaaccctgggactctttacgctcgtgtacttctttcttgcgtgctggacgtatggtttgaccgtgtctgccggtgtgtttattcctagtctgctgataggggctgcctggggtcggctgttcgggatttcacttagctatctcaccggggctgccatttgggccgatcccggaaaatatgctttaatgggtgcagcagcacagctcgggggaattgtccgcatgacattgagtttgacggtcattatgatggaagctacttccaacgtaacatatgggttcccaatcatgctggtgctcatgactgccaaaatcgtaggcgatgtcttcatagaagggctgtacgatatgcatattcagctacagtccgttccgttccttcactgggaagcccctgtgacctctcattctctcaccgctcgcgaggtgatgagtactccagtgacctgtctgagacggagagaaaaagtgggagtgattgtagatgtgcttagcgacactgcttctaatcataacggctttccggtggtcgaacacgcagatgacacgcaacccgctaggctgcaggggctcatactgagaagccagttgatagtactgcttaaacacaaagtgttcgtcgagcgatctaacttaggcctggttcagcgtagactccgcctcaaagacttccgcgacgcgtacccaaggtttcctcccattcagtccatccatgtcagtcaggacgaaagagagtgtacgatggatttgagcgaatttatgaacccaagcccttacacagtaccacaggaagccagtctgcctagggtgttcaagctctttcgggcactgggccttcgccacctggtggtcgtcgataaccggaaccaagtagtagggctagttaccaggaaagatttggcccgatacaggctgggcaagcgcggtctggaggaactctctctggcgcagacgtag

SEQ ID NO: 218158 - DNA, 2418 bp, synthetic construct
  misc_feature 1..2418: note = Description of Artificial Sequence: Synthetic coding sequence
  source 1..2418: mol_type = other DNA
atggccaatgtatccaaaaaggtctcttggtctggcagggatcgagacgatgaggaggccgcaccccttctgagacggacggcaagaccagggggtggcacccctctgctgaatggggctgggccaggtgccgcacgccagtctccacggtcagcactgttcagggtgggacacatgagctctgtggaactggacgatgaactgcttgacccagacatggaccctccgcatccctttcctaaggagatcccccataacgagaagctgctgagtctgaagtatgagagcctggactatgataattctgagaatcaactgtttcttgaggaagaacgtagaataaatcacacagccttccgtaccgtggaaattaagcggtgggtcatctgcgctctgattggtattttaacagggctggtggcatgttttattgatatcgtagtagagaacctggccggactgaaataccgggtgattaagggcaacattgacaagttcaccgaaaaggggggtctatccttttctttgctcctgtgggccactctgaatgccgctttcgtccttgttggctccgtcatcgtggccttcattgaacctgtcgctgctggctctggcatcccccagattaaatgctttctcaacggtgtcaagatccctcacgtcgtccggttgaagacattggtgatcaaggtttccggcgttattttgagcgtggtggggggtctggccgtagggaaagaaggaccaatgatccattccggatccgttatagccgctggaatctcccagggccgtagtaccagcctgaagagggactttaaaatattcgaatatttccgccgagataccgagaaacgggacttcgtgtctgctggggctgctgccggagtgtctgccgcattcggagcccctgtgggaggagtactcttctccctcgaggaaggcgcttctttctggaaccagtttttgacctggcggatcttttttgccagtatgatcagcaccttcaccttgaatttcgtactgtctatttatcacggtaatatgtgggatctgagctctcccggactgataaatttcgggagatttgacagtgagaagatggcatatacaatccacgagatcccggtgtttatcgctatgggggtagtgggaggcgttttgggcgctgtatttaatgcccttaattattggcttacgatgtttcgcattcgttatattcatcgaccatgcttacaggtcatcgaagctgttttggtagcagccgtgactgccaccgtcgcatttgttctcatttacagctcacgcgattgtcaaccactccaagggggaagcatgagctatcccctgcagcttttctgtgcggacggagagtataacagtatggccgcagccttcttcaacactcccgagaaatcagtcgtgtctcttttccatgatcccccaggcagctacaaccccctgacattgggactgtttaccctggtgtatttctttttggcctgctggacgtacgggctgaccgttagcgctggggtttttattccttcactgctcatcggggctgcatgggggaggttattcgggattagcctcagttatctcaccggtgcagccatctgggcagatcctggcaagtacgctctgatgggagctgccgctcagcttggtggaatcgtgcgcatgaccctttctctcaccgtaatcatgatggaggctacgtcgaacgtgacttatggtttccctataatgctagttctgatgactgccaagattgttggcgacgtattcatcgaggggctgtacgatatgcacattcagctgcaaagtgttccatttctgcactgggaggcacctgtcacgtcgcacagcctgacagcccgtgaggtgatgtccacccccgtgacttgcctgaggaggagagagaaagttggagtcatcgttgacgtgttatccgatacagcttccaaccacaatggattccccgtcgtagagcacgccgacgatactcagcccgcacgactgcagggcctgatcctccgttcacagctgatcgtattgttgaaacacaaagtcttcgtggaacgctctaatctcggtctggttcagcggaggctgcgtctgaaggacttccgggatgcctatcctcgctttccacctatccagagcatccatgtcagccaggacgagcgggagtgtacaatggatctctccgaatttatgaacccgtcaccctataccgtcccccaagaggcatcgctccctcgggtttttaagttatttcgagccctggggctacggcacctcgtcgtggtcgacaaccgtaaccaggtggtgggcctggtgacaagaaaggacctggcacgctaccgcttaggaaaaaggggtctcgaggaactctcattggcacagacttag

SEQ ID NO: 218159 - DNA, 2244 bp, synthetic construct
  misc_feature 1..2244: note = Description of Artificial Sequence: Synthetic coding sequence
  source 1..2244: mol_type = other DNA
atgtcctctgtagagttggacgacgaactattagacccagacatggacccgcctcatccatttccgaaggaaattcctcataacgagaagctactgtcactgaagtacgagtctctggattatgataacagcgaaaatcagctgtttctggaagaagaaagacgcattaatcacaccgcatttaggaccgtcgagattaagaggtgggtgatttgtgctttaatcggaatcctgactggcttagtggcctgctttattgacattgtagttgagaatctcgccggactcaaataccgggtgatcaaggggaatattgataagtttaccgagaaaggtggtctttccttcagtctcttgttatgggctaccctcaatgccgcttttgttctcgtggggtctgttatagtagcattcatcgaacctgtcgcagcaggctccggaattcctcagattaaatgtttcctgaacggcgtgaaaattccccacgtggtgagattgaaaacactggttataaaagtctccggcgttatcctctccgtggtgggagggctggccgtgggaaaggaaggccctatgatacactcggggtcagtcatcgctgctggaatctcccaggggagaagcacttctctgaagcgcgacttcaagattttcgaatattttcgacgcgacaccgagaagagggactttgtgtcggccggtgcggcagccggtgtatccgccgcttttggagcaccagtcggcggagtgctatttagtctggaggaaggagcctcgttctggaatcaatttctgacctggaggatatttttcgctagtatgattagcacttttacgttgaacttcgttttatccatctaccacgggaacatgtgggacctttcttcccccggattgatcaactttggtaggttcgactctgagaagatggcttatactatccatgagattcctgtgtttattgccatgggtgttgtggggggagtcctgggtgctgttttcaatgcactgaattattggctcaccatgttcaggattcgctatatccacaggccttgcctgcaggtgattgaagccgtactggtggctgctgtcaccgctacagtggccttcgttctgatctattcctctagagattgccaacctctgcagggcggatccatgtcttacccactccagctcttttgcgccgatggcgaatataactctatggctgccgcattcttcaacaccccagagaagtctgtggtgagcctgttccatgatcctcccggtagctacaatccacttacactcggcctctttaccctcgtgtatttctttttggcatgttggacatacggactcaccgtgagcgccggtgtgtttatccccagccttctgataggggctgcctggggtagactcttcggcatatcgctgtcttatcttacaggggcagctatctgggcagacccgggtaaatatgccctcatgggcgcagcagcacaactgggaggtatagtacggatgacactgtccctgaccgttatcatgatggaagctacaagcaatgtcacctacgggtttcccatcatgctggtcctgatgactgcgaagatcgtgggtgatgtgtttatcgagggactttacgatatgcacattcagctgcagtctgtgccctttctccactgggaggctccagttacctctcacagtttgaccgcacgggaagtcatgtcaaccccagtcacctgtctaagacggagggagaaggtgggagtcatcgtcgacgtcctctcagacaccgcgtcaaatcacaatgggtttcctgttgttgagcacgctgatgacacccaacccgctcgactgcagggacttatattacggtcacagctgatagtgttgttgaaacataaggtgtttgttgagcgctctaacttagggttagtacaaagaaggctccgcctgaaagacttccgggatgcctaccccagattcccgcctatccagtcaattcatgtttcgcaggatgaacgagagtgtactatggatctgtcagagtttatgaacccctcaccatatactgtgccgcaggaagcaagtctgccaagagtgttcaagctgttcagagccctggggcttcgccatttagtcgttgtagacaatcggaaccaggtggtaggactagttacccgaaaggaccttgctcggtaccggttaggtaagcgtgggctggaagagttgagtctggcacagacatag

SEQ ID NO: 218160 - DNA, 2346 bp, synthetic construct
  misc_feature 1..2346: note = Description of Artificial Sequence: Synthetic coding sequence
  source 1..2346: mol_type = other DNA
atggccaacgttagcaagaaggtcagctggtccggtagagaccgggatgatgaggaagccgcacctttgctgaggcgcacggccagaccagggggagggaccccgcttctgaatggagccggtccaggagccgcaaggcaggacatggacccaccccaccctttccccaaagaaattccgcacaacgagaaactactctcgctcaaatacgaatccctcgactatgacaacagtgagaatcaattatttctggaagaggagcgacgcatcaaccacaccgcctttcgcacggtcgaaatcaagagatgggtaatttgtgcgctgattgggattctgacagggctggttgcctgttttattgacattgtcgtggagaatttggccggtctcaaatatagagtgattaagggcaacatcgacaagttcactgagaagggaggtctctccttttctctcttgttgtgggccacgcttaatgcagcattcgttctggtgggtagtgtgatcgttgctttcatcgagcctgtagccgcaggctctggtatcccccaaataaagtgctttctcaatggggtcaagataccacacgtcgttaggctaaaaacgttggttattaaagtgtctggtgtgattttaagcgtggttgggggactcgccgtgggaaaagagggcccaatgattcattcaggctctgtcattgccgctggcatatcccaggggaggtctactagtctgaagcgcgactttaagatctttgaatacttcagaagagacacagagaaacgggattttgtttccgctggcgcagccgcaggcgtgagcgccgcttttggggcaccagtcggaggggttttgttcagcctggaagaaggagcgagtttctggaaccaattcctaacctggaggattttttttgcctcaatgatcagtacttttacactaaacttcgtgttatccatttaccacggcaacatgtgggatttaagctcacctggcttgattaactttggccgtttcgacagcgagaagatggcttataccatccatgagatccctgtctttattgctatgggcgtggttggaggggtgttaggcgctgtattcaacgccttgaactactggcttactatgttcagaatcagatatattcataggccctgccttcaggtgatcgaagcggtgctagtcgcagccgtgactgcaactgtagcttttgtccttatttattccagcagggactgccaaccactgcaagggggttcaatgagctatccgctccagctgttttgcgccgatggcgagtacaattctatggccgcagccttcttcaacacccccgagaagagtgtggtctctctcttccatgacccacccggaagctacaatccactgacgctcggcctctttaccctggtgtacttctttctagcctgctggacatacggcctgaccgtttccgccggtgtgtttatcccgtccctcttaatcggggcagcgtggggtagactcttcggtatctccctgtcctaccttacaggagccgctatctgggctgatcctgggaaatatgccctgatgggagcggcagcccaattaggtggaattgtcagaatgacgctgtctctgaccgtcatcatgatggaggcgacctccaatgtaacgtacggtttccccatcatgctcgtacttatgaccgctaaaatagttggtgacgtgtttattgaaggactgtacgatatgcacatccagctgcagtcagtccccttcctgcattgggaggcccctgtgacctcgcattcccttacagcgagggaagtgatgagtacaccagtcacttgtctccgcaggcgggaaaaagtcggcgtgattgtcgatgtactgtccgataccgcatccaatcacaatgggttccctgtggttgaacacgctgacgacactcagccagcccgtctacaggggttgatccttcggagtcagctgattgtccttctcaagcacaaagtgttcgtggagcgatctaatctcggtttagttcagcgtagactgcgcctcaaagatttcagagatgcctatcccagattcccacccatccaaagcatccacgtttcccaggacgaaagagaatgcactatggatctgagtgagtttatgaacccctccccttacactgtcccacaggaggcctccctccctcgagtctttaaacttttccgagcattaggcctgcgacaccttgttgtcgtggataatcgcaaccaagtggtcggcctcgtgaccaggaaagatttggcgaggtacaggctgggaaagcgtgggctggaggagctgagcctcgctcagacttag

SEQ ID NO: 218161 - DNA, 1545 bp, synthetic construct
  misc_feature 1..1545: note = Description of Artificial Sequence: Synthetic coding sequence
  source 1..1545: mol_type = other DNA
atggtcctcgatctagatctatttcgagtggacaagggcggagatccagctcttatccgagagacacaggaaaagcgcttcaaagacccgggtctggtggatcaattagtcaaggccgattctgaatggcgaagatgccgatttcgggcagataatctaaataaacttaaaaatctttgtagcaagacgatcggcgagaagatgaaaaagaaggaacctgtcggcgacgatgaatctgttccagaaaacgtgttatccttcgacgacctgactgccgacgctcttgccaatctgaaagtcagccaaattaaaaaagtgcggctgttaattgatgaggcgatcctgaaatgcgacgctgaaagaatcaagcttgaagcagaacgcttcgagaacctaagggagatcggtaatttactgcacccttccgtcccgatctccaatgatgaggacgtggacaacaaggttgaacgcatctggggagattgtaccgtgcggaagaagtactcccatgtcgaccttgtggtaatggttgatgggtttgaaggcgagaagggagcagtggtggccggtagtagggggtactttttgaaaggggttcttgtttttctggaacaggctctcatccagtacgccctacggacgttggggtcccgaggctacattcctatatacacacccttcttcatgcggaaagaagttatgcaggaagttgcacagctgtctcagttcgacgaggaactgtataaagtcataggtaaaggctccgaaaagagtgatgacaattcttatgacgagaagtatctgattgccacatccgagcagcccatcgccgcattgcaccgggacgaatggctcaggcctgaagaccttcccatcaagtatgcgggactttctacatgcttccgccaggaggtaggatcccacggaagggatactcggggaatcttccgggttcaccagttcgaaaagatcgaacagttcgtctattcctcacctcacgataacaagtcttgggagatgtttgaagagatgataaccactgctgaagagttctaccagtctcttgggatcccctatcacatcgtgaatatcgtgagcggctccctgaatcacgccgcatccaagaagcttgatcttgaagcctggtttccgggaagcggtgcatttagggagttagtgagctgctcaaattgcacagactaccaagcgcgtaggttacgtatccgctatggtcaaaccaagaagatgatggataaggttgaattcgtgcacatgctcaatgctaccatgtgtgccaccaccagaactatatgcgccattctggaaaattaccagacggaaaaaggaatcaccgtcccggaaaaactgaaagaatttatgccccctggcttgcaggagcttatcccatttgtaaagcctgcccctattgagcaggaacctagcaagaaacagaagaagcagcacgagggctccaagaaaaaggctgcagctagggacgtgaccttggagaaccggctgcaaaacatggaagtaacagacgcatag

SEQ ID NO: 218162 - DNA, 2745 bp, synthetic construct
  misc_feature 1..2745: note = Description of Artificial Sequence: Synthetic coding sequence
  source 1..2745: mol_type = other DNA
atggggccttttaaatcatctgtgttcatactaattctacacctgcttgaaggtgcactaagcaattcgttgattcagctgaacaataatggttatgagggcattgtggtggcgattgatcctaatgttcctgaggacgagacactcatacaacaaattaaagatatggtgactcaggcctctctgtacctgctcgaggcaaccggcaaaaggttttactttaagaacgtcgccatactgattcctgagacatggaaaacaaaggcagactacgtgaggcccaaactcgaaacttataaaaatgccgatgtcctggtcgccgaatccacacccccaggcaacgacgagccttacactgagcagatggggaattgtggtgagaaaggcgagcgcatacatctcacgccagacttcattgccggtaaaaagcttgccgaatatgggccacaaggcagagcctttgttcacgaatgggcccacttacgttggggcgtgtttgacgagtataataatgatgagaaattctatttatcgaatggtaggatccaggccgtacgctgttcagccggaattacaggcacaaacgttgttaagaaatgtcagggtggctcgtgttacaccaagcgctgcacatttaataaggtcacaggactgtatgaaaagggatgcgaatttgtcttacagtcacggcagactgaaaaagcttcaattatgttcgcccaacatgtcgattctatcgtggagttctgcacagagcagaaccataataaggaggcgccaaataaacagaaccaaaaatgcaacctgagatccacctgggaggtgatccgcgactcagaagactttaagaaaacaacccccatgactactcaaccaccgaaccccactttttcccttctccagatcggtcagcgcatcgtctgcttggtcctcgataagagcggctcaatggccactggcaatcgcttaaatagactgaaccaggccggacagctctttctgctgcagactgtcgagctgggctcctgggtcggcatggtgacttttgatagcgcggctcacgtacagaatgagctgatacagatcaacagcggttctgatcgagatacactggcgaagcgcctcccggcagccgcaagcggtggcacttccatttgcagcggtttgcgtagcgccttcaccgtgattcgcaaaaaatatcctacagacgggtctgaaattgtgctccttactgatggagaggataacactatcagcggatgcttcaacgaagttaaacagtcaggggctattatccatacagttgccctaggcccttctgcagctcaggagctggaggaactttcgaagatgacgggcggactgcagacctacgcctccgaccaggtccagaacaatggactgatcgatgccttcggggctctgtccagcggcaacggtgcggtctcccagaggagtatccagctggaaagcaaggggttaacgctgcaaaactcacagtggatgaacggcacagtaattgttgactcaacagtcggcaaagacactctcttcctcatcacctggacgatgcagcccccacagattctcttgtgggacccatccggccagaaacagggtggctttgtggtcgacaaaaatacaaagatggcctatcttcagatacccggaattgctaaagtagggacctggaagtacagtttgcaggccagtagtcagacccttacactaacagtcacgtctagggccagcaacgccacccttccccctatcacagtaacttcgaagaccaacaaagacacctcgaaattcccaagtccattggtggtttatgccaacattaggcagggcgctagccctattctgcgcgcatcagtaaccgccttaattgaatcagtaaacgggaaaacagtgactttagaacttctggacaatggggctggggctgacgccacaaaggatgacggggtgtacagtaggtactttacaacctacgacaccaatgggcgttactctgtcaaggttcgggctcttggcggagtgaacgccgctcggagaagagtgatcccccagcaatccggggctctctacattccaggatggatcgaaaacgatgaaatacagtggaacccacctagacctgagatcaacaaagacgacgtgcagcacaaacaagtttgtttctcccgcacatcatctggaggaagcttcgttgctagcgacgtacctaatgcgcctatccctgatctcttcccaccaggtcagatcacagatttaaaggcggaaatacatggcggtagcctgattaatcttacatggacagccccaggagatgactacgaccatggcaccgcccacaaatatatcattagaattagtactagtatcctggacctgagagacaaatttaatgagagtctccaggtgaacaccacggcactcataccaaaggaagccaactccgaggaagtttttttgttcaagccagagaatataacttttgaaaacggcacagatctgtttattgcgattcaagccgttgataaggttgatctcaaatcagagattagcaatattgcccgtgtatccctgttcatcccacctcagacccctccggaaacacccagtcccgatgagacttccgccccttgtcccaatattcacattaacagcactatccccggtatacatattctcaagattatgtggaaatggatcggcgagctccaactgtccattgcatag

SEQ ID NO: 218163 - DNA, 987 bp, synthetic construct
  misc_feature 1..987: note = Description of Artificial Sequence: Synthetic coding sequence
  source 1..987: mol_type = other DNA
atgactacccagcctcccaaccctactttctccttgctccaaattgggcagagaatcgtatgcctagtgttagacaagtctggatccatggcgacagggaatagactgaacagactcaaccaggctgggcagctcttcctactgcagaccgtggagctgggctcctgggtgggaatggtaacattcgactccgccgcacacgtccaaaacgagctaatccagattaattctggatctgatagggacaccctcgcgaaacgtctccctgcagccgcttctggaggcacatcaatttgctcagggctccgatccgcctttaccgtcattagaaaaaagtaccctactgacggctctgagatcgtgctgttgaccgacggcgaagacaacacgatctccggatgcttcaatgaagtgaagcagagtggagcaattatccacaccgtggcccttggcccatccgcagctcaggagcttgaggaactgtctaaaatgaccggcggtctccaaacgtacgcttcagatcaggtgcagaacaatggcctcatagatgcattcggggctctgagctctgggaacggagcagtctctcagcggtccatccaattagagtctaaaggtttgaccctccagaatagccagtggatgaatggaactgttatagttgatagcacggtgggcaaggatactctgttccttatcacatggaccatgcagccgccacagattctgctgtgggatccgtcagggcagaagcagggcggattcgtggtagacaagaatacaaagatggcctacctgcaaatcccaggcatcgctaaggtcggcacctggaaatatagccttcaggcttcctcacagacccttactcttacagtgacttcccgagcgagcaacgcaactcttcccccaattaccgtgacatctaagaccaataaggatacttccaacctccccaactcccaaggtcagtgtcattcccccgattag

SEQ ID NO: 218164 - DNA, 2064 bp, synthetic construct
  misc_feature 1..2064: note = Description of Artificial Sequence: Synthetic coding sequence
  source 1..2064: mol_type = other DNA
atggaggaactggtcgggttgcgggaggggttcagcggcgatcccgtgacactgcaggagctgtgggggccttgtcctcacattcggagggccatccaaggaggcctcgaatggttaaagcagaaagtctttagactaggcgaggactggtatttcctcatgactctcggagtcctgatggcactggtatcctacgcaatgaacttcgccattggatgcgtggtcagggcccatcagtggttatacagagaaataggcgatagccacttgttgagatacctctcttggactgtctaccccgtagcactggtgtctttttccagcggattttcgcaaagcatcactccgagtagtggcggatccggcattcccgaactgaagacaatgctcgcaggcgtcattctggaggattatctggacataaagaacttcggcgcaaaggtggtgggcctgtcctgcacactggccactggctcgaccttattcctcggaaaagtcggcccattcgttcacttgagcgtcatgatcgcagcttacctcgggagggtaagaaccactacaatcggggagccagaaaacaaatcaaagcaaaatgagatgttggtggccgcagctgcagtgggcgtcgccaccgtgtttgcagcgcctttctctggcgttctgttttccattgaggtgatgtcaagtcattttagcgtccgggactattggcggggtttttttgctgctacctgcggtgcttttatttttaggctgctcgcagtgtttaatagcgaacaggagaccatcactagtctgtacaaaacttctttccgggttgatgtgccatttgacctcccggagattttcttttttgttgctttaggcggtatatgtggagttctgtcgtgcgcctacttgttctgccaaaggacgtttctcagcttcattaagacgaaccgctacagcagcaaactgttggctaccagcaagcccgtatattctgctctcgcgacactactgctagctagcattacataccccccaggcgtgggccacttcctggcttctaggctgtcaatgaaacagcacttggactctctcttcgataaccatagctgggccctaatgactcagaacagctctccaccatggcccgaggagctggatccacagcacttgtggtgggagtggtatcatccgcgatttacgatatttggtactttggccttctttctggtcatgaaattctggatgctgatcttggctactaccatccccatgccagctgggtatttcatgcctattttcattctgggggcagccattggcagactgttaggcgaagccctagcagtggctttcccagagggcattgtaaccggcggagtcactaacccaatcatgccagggggatatgctctcgccggagctgccgcattttctggtgccgtgacccacactatcagcactgctttgttggcttttgagctcacgggacaaatcgttcatgctttgccagtgctcatggcggtgctggccgcaaacgctatcgcacagtcatgccaaccatctttctacgacggtaccatcatcgttaaaaaactcccttatttgccaaggatcctcggccgtaacattggatctcatcatgtgcgagtggaacacttcatgaaccactctattactactctagctaaggatacacccctggaggaggtggtcaaggtggtaacgagcactgatgttaccgaatatcccttggtggagtccactgaaagtcaaatcttagtcggtattgtacaacgagcacagctggttcaagccctgcaagcggaaccaccttcgcgggctccgggacaccagcagtgtttgcaggacattctcgctaggggatgcccaacagaacctgtgacgctgaccttattctccgaaaccaccctgcaccaggcacagaacctgttcaagctcttaaatctccagagtttgttcgtaacaagtagaggcagagcagtgggctgcgtctcgtgggtcgaaatgaagaaggccatttccaaccttaccaatcccccagcaccaaagtag

SEQ ID NO: 218165 - DNA, 2061 bp, synthetic construct
  misc_feature 1..2061: note = Description of Artificial Sequence: Synthetic coding sequence
  source 1..2061: mol_type = other DNA
atggaggagctggtcggcctgcgcgagggctttagtggtgaccccgtgaccttacaagaactctgggggccttgtccccacattcgcagagcaattcaagggggactcgagtggctgaaacagaaagtgtttaggctgggggaggactggtactttctgatgacgctgggggtccttatggccctcgtgtcttacgcaatgaacttcgccattgggtgcgtggtgcgcgcacatcagtggctgtaccgagagatcggcgattcccacctgctgagatacctctcctggactgtgtaccctgtcgctctggtgtcattcagcagcggattttcacagtcaatcacgccttcatctggagggagcggaattcccgaactgaagacaatgctggcaggagtgattttggaagactatcttgatattaaaaattttggcgctaaggtggtaggtctgtcctgcaccctggccaccggcagcaccctgtttcttggtaaagtgggacccttcgtgcatctgtcggttatgattgccgcttaccttggaagggtcaggactacaacaattggcgagccagagaacaagtccaagcaaaacgagatgctcgtagccgcagctgcagtcggagtagcaacggtctttgctgcccctttcagtggggtgcttttctccatcgaggtcatgtcctcacacttttcagtacgggattattggagaggatttttcgccgcaacctgtggggcattcatttttcggcttctggcagtattcaatagcgagcaggaaactatcacttcactatataagaccagctttagggtcgatgtgccgttcgacctccctgagatctttttcttcgttgctttgggcggtatttgcggagtgctttcctgcgcataccttttctgtcaacgcacatttctttcttttataaagacaaatagatattcctctaaacttctggcaacttccaaacctgtgtattcggcactcgcaacgttgcttctggcatccattacgtaccccccaggtgttggccatttcctcgccagcagactgtccatgaagcagcatctggacagcctctttgacaaccactcttgggccctcatgactcaaaactccagcccaccatggccggaggagctagatccacagcacctatggtgggagtggtatcaccccaggtttacaatcttcggcacattggcttttttcctggtgatgaagttctggatgctaatcctcgcaactaccattcccatgcctgcgggttatttcatgcccatctttatcttgggtgcagccataggaaggctgctgggtgaggccctagcggtcgcatttccagaggggattgttacagggggtgtgacgaatcctataatgccgggagggtacgccctggcgggagcagcagcattctcgggtgccgtaacccacactatttcaacagcactgctcgctttcgagctgacaggacaaatcgtccacgccctccccgtgttgatggcagtacttgccgctaacgcaatcgcccagagctgtcagccgtcattctacgacggcacgatcatcgtgaaaaaactgccctacctccctagaatcctaggaaggaacatcggcagtcatcacgtccgagtcgagcactttatgaaccattccatcaccacgttggctaaggacacacctctggaagaggtggttaaagtggttacttctaccgacgtcaccgagtatcccctggtcgagtccactgagtcccagatattggtcggcattgtgcagcgggctcaattagtgcaagccttgcaggccgaacccccaagccgcgcacctggtcaccagtgtctgcaagacatcctcgccagaggatgtcccacggagcccgtcactctgaccctcttcagcgaaacaactctgcaccaggctcagaatctatttaaattgttgaacttacagagcctctttgtgactagccgcggaagagccgtgggatgtgtgagttgggtggagatgaaaaaggccatctcaaacttgaccaacccgcctgccccaaaatag

SEQ ID NO: 218166 - DNA, 2061 bp, synthetic construct
  misc_feature 1..2061: note = Description of Artificial Sequence: Synthetic coding sequence
  source 1..2061: mol_type = other DNA
atggaggagttggtggggctgcgtgagggattttccggtgaccccgttactctacaggagctgtgggggccatgtccacacatccgaagggctatacaggggggacttgagtggctcaagcaaaaagtctttaggcttggagaagattggtattttttaatgacgcttggcgtgcttatggccctcgtctcttacgcaatgaacttcgccatagggtgcgtggttcgtgcccatcagtggttatatagggagatcggagactcccatctgctgcgctacctctcctggactgtttacccagtggcactggtttcttttagctctgggtttagccagagtatcaccccatcgtccggcggatcgggcattcctgaattgaaaactatgctggcaggagtgatactggaggattacctagacatcaaaaattttggcgctaaggtcgtggggttaagctgtactttagcaacgggttcaacgctcttcctagggaaagtcgggcctttcgtgcatctgtcggtgatgattgcagcgtacttaggccgtgtaagaaccactaccatcggcgagccagagaacaagagtaagcagaacgagatgctggttgcagctgccgctgtgggcgtggcgactgtgttcgcagctccttttagcggggtcctgttttccatagaggtcatgtcgagccatttctccgtacgcgattactggaggggattcttcgcagctacttgtggcgcatttatcttccggctgttggcagttttcaattctgaacaggaaacgatcacctctttgtataaaacttccttccgggtagatgtgccttttgacctgcctgaaatattcttcttcgtggctctaggtggcatatgtggcgtactcagctgtgcgtatctcttttgtcagagaacctttctgtcttttattaagactaacaggtactccagcaagctgctggctacttcaaagccagtgtatagcgctctggcaacactactcttagcttccataacatacccccctggtgtggggcacttcttagccagtcggttgtcaatgaaacaacatctggattccctctttgataaccacagctgggcacttatgactcagaacagctcacccccatggcccgaagagctggatccacaacacctatggtgggagtggtatcaccctcggtttactatcttcgggaccctggctttctttcttgttatgaaattttggatgctgattttagcaacaaccatccctatgccagccggatattttatgccgattttcattctgggagccgctatcggtcgcttactcggcgaagctcttgcagtggccttccccgaggggatcgtgaccgggggagttacaaatccgataatgcccggtggctatgccttggcaggcgcagccgctttctccggggctgtcacacataccatttccaccgctctcctggcattcgagctgacaggccaaatcgtccacgccctgccagtcttgatggccgtgctagccgcaaatgctatcgcccagagctgtcagccgagtttttacgatggcacaattatcgtgaaaaagttgccatacctgccccgtatattaggcagaaacattggctcacatcacgtccgagtcgagcacttcatgaatcatagcatcaccaccctggccaaggacactcccctggaggaggtggttaaggtcgtgacaagcacggatgtgacagagtacccactggtagagagcactgagtcacagatcttggtgggcatcgtgcagcgggcacaactggttcaggccttgcaggccgaacccccaagccgggctcctggacaccaatgtttacaagacattttggctcgtggctgtcccactgaacccgtgacactgaccctctttagcgaaaccactttgcatcaggcgcagaatctgttcaaactactcaatctgcaaagtctgtttgtgaccagccggggaagggctgtcggctgtgtctcctgggtcgagatgaaaaaggctataagtaatctaacaaatccgccagccccaaaatag

SEQ ID NO: 218167 - DNA, 1935 bp, synthetic construct
  misc_feature 1..1935: note = Description of Artificial Sequence: Synthetic coding sequence
  source 1..1935: mol_type = other DNA
atggaagaattagttggtctaagagaagggttcagtggtgatcctgtgaccctccaggaactttggggcccatgcccccatattcgcagagcaatccaagggggtctagaatggctgaaacaaaaagtatttcgattgggtgaggactggtatttcctcatgacgcttggtgttctaatggcactggtatcctatgctatgaatttcgcaataggctgtgtcgtacggggtagcggaatacccgagctgaaaaccatgctggcaggcgtgatcctggaggactacttggacattaagaacttcggggcaaaggtggttggtctgagctgcacgctggccactggatccactttattcctggggaaagttggcccattcgtgcacctcagcgtgatgatcgccgcttacctcggccgagtgcgaaccaccaccattggggaacccgagaacaagtcaaaacagaacgagatgctggtggcagcagcagcagttggcgtggcgactgtgttcgcagcccctttttccggcgtgttgttttcaatcgaggtgatgtcttctcatttcagtgtgcgggattactggaggggcttttttgcagctacctgcggggcatttatctttcgccttctggccgtgtttaattctgagcaggagaccatcacgtccctgtataagacaagctttcgcgtcgacgttccattcgatctgccagagatatttttcttcgtcgcgttggggggaatttgtggcgtacttagttgtgcgtacctcttctgtcaacgcacatttcttagcttcatcaaaaccaatcgatactctagtaagttgctagccacttctaaacccgtgtatagcgccctggctaccctcctgctggcctcaattacttatcctcctggtgtgggccacttcctggcttcaaggctgagcatgaagcagcatctggactctctttttgataatcattcctgggctctaatgacacaaaacagttcacctccttggccagaggagctagatcctcagcacctctggtgggagtggtaccaccctagattcactatattcgggactttagctttcttcttggtgatgaagttttggatgctgattctggcaaccacaattcccatgcctgcgggatatttcatgccgatattcatattgggcgctgctattggtcgcctgctgggcgaggccctggcagtggccttccctgaagggatcgtaaccgggggtgtaactaaccccatcatgcccggtggctacgctttggccggtgcagccgcttttagtggagcagtgacgcacaccatttctactgctcttctggcctttgaactgaccggccagatcgttcacgctctccccgtgttaatggctgtgctcgcagccaatgcaattgctcagtcctgtcagcccagcttctatgacggcaccattatcgtgaagaagctaccctatttgccccgaattcttggacgcaatatcggctcccatcacgttagggtcgaacacttcatgaaccactccataacaacgctggcgaaggatacacccttagaggaagtggtaaaagtcgtcacaagtacagacgtcactgaatatcctctggtggaatccactgagtcccagatacttgtgggcattgtacaacgggctcagctggttcaggcgctgcaggctgaacccccaagccgggctcccggacatcagcagtgcctccaggatatcctggccagagggtgcccaaccgagccggtgacactgaccctgttctcagaaaccacgctgcatcaagcacaaaacttatttaagctgttgaacctgcagtctctttttgtcaccagcagaggcagggctgtgggttgtgtgagttgggtggagatgaaaaaagctatctctaaccttacgaaccctcccgctcctaagtag

SEQ ID NO: 218168 - DNA, 1389 bp, synthetic construct
  misc_feature 1..1389: note = Description of Artificial Sequence: Synthetic coding sequence
  source 1..1389: mol_type = other DNA
atggaggagtttgtcgggctgcgcgagggatcgagcggtaatccagtcaccctgcaggagctctggggcccttgccctcgaatcagacggggaattaggggtgggctggaatggctcaagcaaaaactctttaggctgggtgaggactggtacttcctcatgactctgggagttttaatggcgctggtctcctgtgccatggacctggccgttgaatctgtcgttcgagcccaccagtggttgtatcgtgaaattggcgactcacacctgctacgatacctaagttggaccgtttatccggtggctctcgtgtcttttagctcggggttttcccagagcataactcccagctccggaggaagtgggatacccgaggtgaagacaatgttggctggcgttgtattggaggactacttggacatcaagaacttcggagcgaaagtagtcgggttatcgtgcactctcgcttgtggcagcacccttttcctcggcaaggtgggcccatttgtccacctgagtgtgatgatggcagcttaccttgggcgagttcggacgaccaccataggcgaacccgagaacaagtctaaacccgtgtacagtgccctggcaaccttggtgctcgcatccatcacctatcctccatcagcaggaagattcctggcgagccgattgagtatgaaacagcatttagattctcttttcgacaatcatagctgggctctgatgacgcagaattcaagccctccctggcctgaggagttggaccctcaacacttgtggtgggagtggtatcatccacgatttacaatattcggcactctcgctttttttttggtgatgaagttctggatgcttatcttggcaacaaccataccgatgcccgctggttattttatgccaatttttgtctatggagcggctattgggaggcttttcggcgaaacactgagcttcatattcccagaagggattgtggccggaggaatcactaatcccattatgcctggaggctacgcccttgccggagctgctgccttctccggggcagttacgcacaccattagcaccgccctcctggctttcgaggtcacaggccagattgtgcacgccctccccgtgctgatggcagtgttggcagctaatgctatcgcccaaagttgccagccaagcttctacgacggcactgtaattgtcaaaaagctgccctacttgcctagaatactgggcagaaatataggaagccaccgagtgcgggtcgaacacttcatgaaccatagcattacgacgctggccataacacttatgaacgacgaaataggggtgcactgccatcaggggcaggcgcagatgccttctggtgtggtgtggtttcctgttagaggaagttag

SEQ ID NO: 218169 - DNA, 1554 bp, synthetic construct
  misc_feature 1..1554: note = Description of Artificial Sequence: Synthetic coding sequence
  source 1..1554: mol_type = other DNA
atgccttgcccgcctcttctgtccgtacccgtgagggctgctggcgagcaggacaggtgggtccgggaagaagtcacatgggggggaggacccactgtgactggcggatggggctggagagcgcacctccgttctgtttccccccctggagtgttgttcagtatagaggtaatgtctagccatttctcagtatgggactactggcggggtttctttgcagccacttgtggggcatttatgttccggttgctcgcggttttcaacagcgagcaggagactatcactagcctatacaaaactagcttccgggtcgacgtacctttcgatttgcctgagatatttttcttcgtggctttgggcggtctatgcggaatccttggctccgcatatctcttctgtcagaggatcttttttgggtttatcagaaataaccgctttagctctaaattgctagcaacctctaagccagtgtactcagctctagcaaccttagttctcgcctctattacctatccacctagcgccggaaggttcctggcttccagactgtcaatgaaacaacatcttgattcactcttcgacaatcactcttgggcactgatgacacagaactcttcccccccttggcccgaggaactagacccccaacacctgtggtgggagtggtaccatcctcggtttaccatcttcggaacacttgcattcttccttgtgatgaaattctggatgctgattctggctacaaccatccccatgcccgctggctactttatgcctatatttgtgtacggggcagccatcgggagattatttggagaaactctgagctttatcttcccggagggcatcgttgccggaggaatcaccaacccgatcatgcccggaggctatgctctggcaggggcagccgcatttagtggagcagtgacccataccatcagtaccgcactgctcgctttcgaggtgactggccagatagtccacgcattgccagtcctgatggctgtgctcgcggcaaatgctatcgcgcaatcttgccaaccttccttttacgatggcactgttattgtaaagaagcttccctacctacctcgcattctaggacgaaacataggcagccatcgagttagggttgaacacttcatgaatcactcaatcaccacgctggctaaggacatgccactggaggaagtggtgaaggttgttaccagtaccgatgtagctaagtatcctctggtggaaagcacagagtcccagatactcgtggggattgtccgcagagcccaattggtgcaagcactcaaggctgagcccccaagttgggccccagggcatcaatgtctccaggatattctggctgcaggatgccctaccgagcccgtgactcttaagctgtcccccgagactagcctccacgaggcacataatctgttcgaactgctcaacttgcactcattgttcgttacaagccggggaagggccgtcggctgcgtgagctgggttgaaatgaaaaaagcgataagcaaccttaccaacccacccgctcctaaatag

SEQ ID NO: 218170 - DNA, 468 bp, synthetic construct
  misc_feature 1..468: note = Description of Artificial Sequence: Synthetic coding sequence
  source 1..468: mol_type = other DNA
atggctgtgctggctgcaaatgcgattgctcagagctgccagccgtctttttacgatggaaccgtcatagtgaaaaagctcccttatcttccacggattcttggcaggaatatcggatcccacagagtccgggtcgagcattttatgaaccacagtatcaccactctcgccaaagacatgccattagaagaggtcgtcaaagttgtcacttccaccgatgttgccaagtatccactagtggaatccacagaaagccagatactcgtaggaatcgttcgtcgggcacagctggtgcaggcgctgaaggccgagcctccatcctgggccccaggacatcagtgcctccaggacatcttagccgctggatgtcccacagaaccagtcactcttaagctaagtcccgaaactagtcttcacgaggctcagatgccaagtggtgtcgtttggttccctgttaggggcagttag

SEQ ID NO: 218171 - DNA, 2064 bp, synthetic construct
  misc_feature 1..2064: note = Description of Artificial Sequence: Synthetic coding sequence
  source 1..2064: mol_type = other DNA
atggaggagttcgtggggctccgagaaggatccagcggaaacccggtgaccctgcaggagctctggggtccttgtcctaggattcgtaggggcattcgcggaggtctggaatggcttaagcagaagctgttccgcttgggggaagattggtactttctcatgaccctcggcgtgctcatggcacttgtaagctgcgcgatggatctggctgtagagtccgttgtgagggctcatcaatggctttatcgtgagatcggtgattcacacttactgaggtacctttcctggaccgtatacccggtcgccttagtctccttctctagcggattttcccaatcaatcacgccctcgagtggtggaagtgggatacccgaggtaaagactatgcttgccggagtggtgctggaggactacctggatatcaaaaatttcggcgcaaaggtggtcggactgagctgtacactcgcctgcgggagcacactctttttaggtaaggttggtcctttcgtgcacctgtccgttatgatggccgcatacctggggagggtccggacgactacgatcggggaacctgaaaataaatccaagcaaaatgaaatgcttgtggccgctgctgcagtcggggtggccaccgtgttcgccgctcccttcagcggtgttctcttcagcatcgaagtgatgtcaagccacttctctgtatgggattactggcgaggtttctttgccgctacttgtggagctttcatgtttcgtctgctggcggtgtttaattcagaacaggaaactatcacctctttgtacaagacgtctttcagagttgacgtgcctttcgacctgcccgaaatctttttcttcgtggcactgggcggactgtgtggcattctaggttccgcttacctgttctgtcagcgcatcttttttggctttatacgcaacaaccgattttcatcgaaactgctggcgaccagtaaacctgtgtacagtgctctggctacactggtcctcgcaagcatcacatatccccctagcgccggtcggttcctggcctctcgcctctcaatgaaacagcatctggattctctcttcgataatcactcctgggctctgatgacccagaactctagccctccatggccggaggagctggaccctcagcatctctggtgggaatggtatcaccccaggttcactatctttggaacattagcgttctttctggtcatgaaattctggatgctgatcttggcaaccacaatacccatgccggcaggatatttcatgcctattttcgtctatggcgctgctattggtcgcctctttggagaaactctgagtttcatcttcccagaaggtattgtcgctggcggtattacaaatcctataatgcctgggggatacgcactcgctggggcagctgcatttagcggcgctgtcacacacactatcagcaccgcactgctagcatttgaggtgactggccagatcgtgcatgccctgcccgtgctgatggcggttctggcggctaacgcgatcgcacagagttgccagcctagcttttacgatgggacggtgatcgtcaaaaagctgccttatctcccccgaattctgggccgtaacatcgggagtcatcgggtgagagttgaacatttcatgaatcatagtatcactactctggccaaggacatgcccttggaagaagtcgtgaaagtagttaccagtactgatgttgcaaagtatccccttgtcgagtctactgagtctcagatcctggtggggattgtgcgacgagcacagctggtgcaggctctcaaagccgaacccccaagttgggctcctggacaccagcagtgcctccaggacattctcgcagctggctgccccaccgaaccagtgacccttaagctgtccccagaaacaagtctgcacgaagcgcataatctgttcgaactcctgaacctgcacagtctgttcgttacttcccgcggtcgcgcagtggggtgtgtgtcctgggtggagatgaagaaggctatctcaaacctgacaaatccgcctgctcccaaatag

SEQ ID NO: 218172 - DNA, 441 bp, synthetic construct
  misc_feature 1..441: note = Description of Artificial Sequence: Synthetic coding sequence
  source 1..441: mol_type = other DNA
gctcagagctgtcagcctagtttttatgatggtactgtgattgtgaagaaacttccatacctgccccgtattttgggtcgcaacatcggctctcaccgcgtacgggtggaacattttatgaatcattctattacaacattggctaaggatatgccactggaggaggtggtgaaggttgtgaccagcacagatgttgcaaaatatccgttggttgaaagtactgagtctcagattctcgtaggcattgttagacgggctcagctcgtccaggctttgaaagctgaacctccgagttgggcgccaggccaccagtgcctgcaggacattctggctgctggctgtccaacagaaccagttacactcaagctgagccctgagactagtctgcacgaagcgcaaatgcctagcggggtcgtctggtttcccgtccgcggatcttag

SEQ ID NO: 218173 - DNA, 2646 bp, synthetic construct
  misc_feature 1..2646: note = Description of Artificial Sequence: Synthetic coding sequence
  source 1..2646: mol_type = other DNA
atggcagcggctgctgccgaggaagggatggaaccccgagcccttcagtacgaacagacattaatgtatggacggtacacccaagacttaggggcttttgccaaggaggaggccgcacggatacggctaggtgggccagagccctggaagggcccaccgtcatcccgagccgcacctgagctgttggagtacggcaggtcccgatgtgcgcgatgtagggtctgcagcgtgaggtgtcataaattcctggtctcacgggtaggagaggactggatatttcttgtactgttgggacttctcatggcactggtttcctgggtgatggattacgctatagctgcttgcttgcaggctcaacaatggatgtccaggggactcaatacaagtattcttctgcagtaccttgcgtgggttacctatccagtagtgttaataacgttctccgctggcttcacccagattttggcaccgcaggctgtggggagtggcattcccgagatgaagactatcctcaggggtgtggtgctcaaggaatatctgacactcaaaactttcattgcaaaggtgataggcttgacatgcgctctgggatccggtatgcccttgggcaaggaaggtcccttcgtgcacatcgcttcaatgtgcgccgcactgctgagtaagtttctctctctcttcggcggaatttacgagaacgaatccaggaacaccgaaatgctcgctgcagcatgcgccgtgggagtgggatgctgtttcgcggctccaatcggaggcgtcttattcagtattgaggtgacatcgaccttctttgcggtgcgaaactattggcgcggtttctttgctgctaccttcagtgctttcatatttagggtcctggctgtctggaatagagatgaggagactataaccgctctttttaaaacacgctttcggcttgactttccttttgatctccaggagctgccagctttcgccgttatcgggattgctagcggctttggtggcgcactctttgtgtacttgaataggaaaattgtgcaggtcatgcgaaaacagaaaaccatcaatcggttcctgatgaggaaacgcctgctgtttccggctctggtcacgttgctgatttcaacattaactttccctcccggttttggtcagttcatggccggacagttgagccaaaaggagactcttgttaccctgttcgataatcgaacgtgggttcggcagggcctggtggaggaactcgagcctccctctaccagtcaggcctggaatcccccaagggccaatgtttttcttacactggtcatctttattttgatgaaattctggatgagtgcactcgccacaaccattcccgtgccttgcggcgcatttatgcctgtgtttgttattgacggtattcatacagactccagcacatacaggatcgttccaggaggatacgccgtagtgggggctgcggctctggccggagccgtcactcacaccgtgtctaccgcagtgatcgtgtttgagctgaccggccagatagcccatatcctgccggttatgatcgctgtcatcctggccaacgcagtcgctcagtctttgcagccttccctttacgacagtatcattaggatcaagaagctgccgtacctgcccgagttgggatgggggaggcaccagcagtacagggtccgcgtcgaggacataatggtcagggacgtgccccacgtggcgctgagttgtacattccgtgacttgagactagccctccacaggaccaaagggaggatgctagcgttagtggagtcacccgagtctatgatattgctggggtccatcgaaagatctcaagtggtagctctgctgggtgctcagctgtcaccagcccgaagacggcaacatatgcaggagcgccgagctacgcaaacctcaccactgtcagaccaggaaggaccgcctacccccgaggcatcagtctgctttcaggtcaatacagaagattcagctttccctgccgctcgaggggagactcataagcctttgaagccagcactgaagcgaggaccttcagtgacacggaacctgggagagagtccaacgggaagcgcggagtctgcaggcatcgcactgcgatcactgttttgcggctctccacctcccgaagctgctagcgaaaaactcgagtcctgcgagaagcgtaagttgaaacgtgtgcgaattagtttggcctcagacgctgaccttgaaggtgaaatgagccctgaagagattcttgaatgggaggaacagcagctggatgaaccagtgaacttcagtgactgtaagatagatcccgcaccatttcaactggtagaacggacatccctgcacaaaacacataccatcttctcgctcctgggcgtggaccatgcctacgtcacatcaatcggacgcctgatcgggatcgtcacgctgaaagagttgcgcaaggctatcgagggctccgtgacagcgcagggggtgaaagtgcggccaccattggcatcatttagggactcagccacaagttcttcagatacggagaccactgaagttcatgccctctggggaccacacagccggcacgggctcccgagggagggaagccccagtgactccgatgataaatgccagtag

SEQ ID NO: 218174 - DNA, 2565 bp, synthetic construct
  misc_feature 1..2565: note = Description of Artificial Sequence: Synthetic coding sequence
  source 1..2565: mol_type = other DNA
atggccgcagcagctgccgaagagggcatggagccacgcgcacttcagtatgaacagaccctcatgtacggacgttatacccaggaccttggcgctttcgcaaaagaggaggcagctcggatccgcctggggggacctgagccctggaaagggccaccaagttccagggccgcacctgagcttcttgaatatggaagatctcgttgcgctcgatgcagagctcagcagtggatgagtcgcggactgaatacgtctatcctgttacaatatctggcctgggttacctaccccgtggttttgattaccttctcggcgggttttactcaaattctggccccacaggccgttgggagcggcatccccgagatgaaaactatcctgcggggagtcgtcttaaaggagtatctgacactcaaaacttttatcgcgaaggtgataggcctcacctgcgctctcggctccgggatgcccctaggcaaagaaggcccttttgtgcatatagcctcaatgtgcgcagctctactctcaaagttcctgtcactcttcggcggaatctacgaaaacgagagtaggaacacagaaatgcttgctgcagcgtgcgctgtcggtgtgggctgttgtttcgccgctcctattggaggcgttctgtttagtatcgaggtcaccagcacgttcttcgccgtacgcaattattggcggggattttttgcagccacgtttagcgcatttatttttagggtgctggccgtttggaacagggatgaagaaaccatcacggccctgttcaaaacgcggtttcgattggactttcccttcgacctgcaagagctgccagcatttgccgtcatcggcatcgcctcaggcttcggaggtgccctcttcgtctatctgaatcgaaaaatcgtgcaggttatgcgaaaacagaagaccatcaacaggtttttaatgcggaagagacttttgtttcctgcactggtgacattgctaatttccacactaacatttccaccaggctttggacagttcatggcgggacagctttcccaaaaggagaccttggtgacattgtttgacaatcgcacttgggtccgacagggacttgtggaggaactagagcccccttcgacaagccaggcttggaatccccctcgcgcaaatgtgttcctaacccttgtcatcttcatcctgatgaagttttggatgagtgctcttgccaccactattcccgtgccttgtggcgcttttatgcctgtgtttgtcatcggggctgccttcggaaggcttgtgggcgagtctatggctgcttggttccctgacgggatccatacagactcttctacttataggatcgtgccaggcggttacgctgtggtgggagccgcagccctagctggtgccgttacacatacagtgtctacagcggtaatagtgttcgagctgaccggtcaaatcgcgcacatcctccccgtcatgattgccgttatactcgccaacgccgtggcccagagtttgcagccgtccctttacgactctatcatcagaataaagaagttaccctatttgccagagctgggctggggacgccaccagcagtatcgggtgcgagtggaagatattatggtgagagacgtacctcacgtagccctcagctgcaccttcagagatctgcgactggcacttcatagaacaaagggcagaatgttggccctggttgaatcacccgaaagcatgatattattaggctctattgaacgctctcaggttgtcgcccttctcggagctcagctgtcgccagccagacggaggcagcacatgcaggaaagacgggctacccaaacctctccgcttagtgatcaagagggtccgcctacccctgaagcctcagtatgtttccaggtgaatacggaagactctgcgttcccggctgctcgtggggagactcacaaaccactcaagccggcactgaagcggggtccttccgttactcgcaatcttggggaaagccctacggggagcgctgaatccgccggaattgctcttagatcactgttttgcggctcccctcctcctgaagccgcttccgaaaaacttgagtcctgtgaaaaacgaaagctgaaaagagtaagaatttcactcgccagcgacgccgatcttgagggcgaaatgtctccagaggagattctggagtgggaagagcagcagcttgatgagcctgttaacttctccgattgcaaaatcgacccggcaccatttcaactagtagaacgtacaagcctgcacaaaacacatactatattcagtctgctcggggtggaccatgcctacgttacctccattggccgtctaatcgggatagtaactctcaaagagctgcgtaaagccatcgaagggtctgtgaccgcccagggcgtgaaagtgcgtccccctcttgcaagctttcgggatagcgccacctcctcctccgatacagagactaccgaggtgcacgcactttgggggccacactcacgccacggactgcctagagaagggtcaccctctgactctgatgacaagtgccaatag

SEQ ID NO: 218175 - DNA, 2610 bp, synthetic construct
  misc_feature 1..2610: note = Description of Artificial Sequence: Synthetic coding sequence
  source 1..2610: mol_type = other DNA
atggccgctgctgccgcagaggagggtatggagcctagagctctgcagtacgaacagacactgatgtatggcagatacacacaggacttaggggcttttgcgaaagaagaagcagcgagaattcgactgggcggtccagagccctggaaggggccaccatccagtcgggcagccccagagcttttggaatatggcaggtccaggtgtgcccgatgtagggtctgctcggtacgttgtcataagtttctggttagtagagtgggagaggactggatattcctcgtactgctggggctgctaatggccctcgtgtcttgggtcatggattatgccattgccgcttgtctccaggcacagcagtggatgtctaggggcttgaatacaagcatcctgctgcaatatctagcatgggtgacatacccagtggtgctcattacgttctccgctggttttacacagattctagctccacaggctgtgggtagcgggatccctgaaatgaaaaccatcttgagaggagtcgtactgaaggagtatttaacactcaaaacgttcattgctaaggtgatcggtctgacctgcgcactgggcagtggaatgcctttaggcaaggaaggtccgttcgtgcacatcgcatccatgtgcgcagcactcttaagtaaattcttaagtctgtttggaggtatctatgaaaatgaatcccgcaacacagagatgctggctgccgcatgtgctgtgggcgtgggctgctgcttcgctgcccctatcggcggagtgctgttcagcatcgaagttacctccacttttttcgcagtgaggaattactggagaggtttttttgccgctactttttcggctttcatcttccgtgtgcttgcggtgtggaatcgggatgaggagacaatcaccgctctattcaaaactagatttagactggattttccctttgacctgcaggaattgccggcatttgctgtgatcggaatagcaagcggcttcgggggagccctcttcgtgtacctgaataggaaaatcgttcaggtgatgcggaagcagaagacaattaatcgctttcttatgcggaagcgcttactatttcctgcactggtcaccctgcttatctcaacccttacattccccccagggtttgggcagttcatggcaggccaactctcccagaaggagactcttgttacactgttcgataaccgcacctgggtgcggcaaggccttgtcgaggaactggaaccaccttccacgtcccaagcctggaatccacccagggcaaacgtgtttttaacactggttattttcattctaatgaagttctggatgagcgctctcgctaccacaattcctgttccctgtggcgcattcatgccagtgtttgtgatcggcgcagcatttggaagactagtgggtgaatcaatggcagcctggttcccagacggaattcacacggattcatctacatacaggatagttccgggtggatacgccgtcgtcggggctgcagcgctcgctggtgctgtgacgcacaccgtttctacagcagtgatcgtttttgagctgacaggacaaatagcacacatcctgccggtcatgatcgctgtgattctggccaacgcagtggcccaaagtctccaaccgtccctatacgattcaattatacgaattaagaaattgccctatctccctgagctcgggtggggcagacaccagcagtacagggtgcgtgtagaagacattatggtacgtgatgtaccgcacgttgcgctctcctgcaccttcagagacctcaggctggctctgcaccgaactaaagggcgaatgctcgccctggtggagagcccagagagtatgatcctgctcgggagcattgaaaggtctcaggtcgtcgccctgctcggggcacaactctctcccgctagacgtaggcagcatatgcaagagaggagggccacccagacctctccactaagcgatcaagagggaccccctaccccagaagctagcgtgtgttttcaggtcaatactgaggattccgcgttccccgctgcaaggggcgagacacacaaacctctcaaaccggctctcaagagaggccctagcgtaactcggaatttgggagaaagtcccaccggatccgctgagagtgccggaattgctttgcgctctctgttttgcggctctccccctccagaagccgctagcgagaaactggagtcctgtgagaagcgcaagctgaaaagagtgagaataagtctcgcatcagatgccgaccttgagggtgagatgagcccagaagaaatattggagtgggaggagcaacagctcgacgagcccgtaaacttcagtgactgcaagatcgaccccgcacccttccagttggtggaacggacatccctgcacaaactaagaaaagccattgagggaagtgtcacggcccagggtgtgaaggtaagacctcctctggcttcgtttagggattccgctacttccagctccgacactgagaccacagaggttcacgcactgtggggtccacactcacgacacgggctgcccagggaggggagcccgtctgattctgacgataaatgccagtag

SEQ ID NO: 218176 - DNA, 714 bp, synthetic construct
  misc_feature 1..714: note = Description of Artificial Sequence: Synthetic coding sequence
  source 1..714: mol_type = other DNA
atgtctttccttaagagctttcctccacctggtccagccgagggactgttgaggcagcagccagacaccgaggctgttctgaatggcaagggcctgggcacgggcacgctctatatcgccgagtctcgtctctcttggctggacggatccggactagggttctccctcgagtatcctacgatcagccttcatgcactctctcgggacaggtcggactgcttaggggaacacctgtacgtgatggttaatgcaaaatttgaggaggagtcaaaggagcctgtggccgacgaggaagaggaggatagtgatgacgacgtggaacctataaccgaattcagatttgtgccatccgacaagtcagccctggaggccatgtttacggctatgtgcgaatgccaggccttgcatccagatcctgaagatgaggatagcgatgactacgacggggaggagtacgatgtggaggcccacgagcaaggtcagggggacatacccaccttttacacttatgaggagggtctgtcacacctgacagcggagggacaagcgaccctggagcgcttggaggggatgctgtcgcagagtgtgagcagtcagtacaatatggcgggagtgaggacagaggactctattcgggattacgaagatggaatggaggtggataccacacccactgtggccggtcagttcgaggacgcagatgtggaccactag

SEQ ID NO: 218177 - DNA, 714 bp, synthetic construct
  misc_feature 1..714: note = Description of Artificial Sequence: Synthetic coding sequence
  source 1..714: mol_type = other DNA
atgtcattcctgaaatcattcccacctcctggacctgcggaaggcctcctgcgacaacagccagacacagaagccgtgctgaatgggaagggcctggggaccggaaccttatacatcgcggagagtaggctcagctggctggacggctccggcctgggtttcagcctggagtatcccaccattagcctgcacgccctgagccgcgaccggtcagactgtctgggcgaacacctgtatgtgatggtgaatgcaaaattcgaggaagagtcaaaggaacctgtggccgacgaggaagaggaggatagcgatgacgatgtggagccaatcacagaattcaggtttgtgcccagcgataaatctgccctcgaagccatgtttaccgccatgtgtgagtgtcaggcactgcaccctgaccctgaagatgaggactcagatgactatgacggcgaagaatatgacgtcgaggctcatgagcaaggacaaggcgacatcccaaccttttatacctatgaggagggcctgagtcatctgaccgccgagggccaggctacgctggaacggctggaaggcatgctctctcaatccgttagttcccagtataacatggccggtgtcagaaccgaagattccattagagattatgaggacggtatggaggtggatacaacccccacagtggcaggtcaattcgaagatgcagatgttgatcactag

SEQ ID NO: 218178 - DNA, 504 bp, synthetic construct
  misc_feature 1..504: note = Description of Artificial Sequence: Synthetic coding sequence
  source 1..504: mol_type = other DNA
atggtgttgctcttaaagggggtgccctttaccttgacaaccgtagatacacggagatccccagacgtgcttaaggactttgcccctggttcacagttaccgattcttctgtatgatagtgatgcgaagactgacacactgcagatcgaagactttttagaggaaacattaggcccaccagactttccttccctcgcacctcggtatcgcgagagcaacactgcagggaatgacgtgttccacaagttctctgccttcatcaagaaccctgtgcctgcgcaggacgaagcattgtaccagcaactcttaagggctttggcaagattagattcctacttgagggccccactggagcacgagctggcaggcgagccgcagctgcgagagagccggaggagatttttggacggcgaccgattaaccctggccgattgcagcttgcttcctaaactccacatcgtggataccgtgtgcgcacatttccgccaagctccaattccctag

SEQ ID NO: 218179 - DNA, 711 bp, synthetic construct
  misc_feature 1..711: note = Description of Artificial Sequence: Synthetic coding sequence
  source 1..711: mol_type = other DNA
atggctgagacgaagctgcagctgttcgtgaaagccagtgaagatggagaatccgtcggtcactgcccaagttgtcagcgcctgttcatggtcctgctcctgaaaggagtcccattcacactgacgacagtcgacactagaaggagcccagacgttcttaaggattttgcccctggctcgcagctgccaattcttctctacgattccgacgcaaagactgacactctacagattgaggatttcctggaagaaacattggggcctcctgattttccgtcgcttgctcccaggtaccgagagtccaataccgccggtaacgatgtatttcacaaattttcggcctttatcaagaatcccgtgcctgcccaggatgaggccttgtaccaacagctcctgagggccctagcccgacttgactcatacctgcgagcaccgctcgagcatgaactagcaggggaacctcagctccgggagtcgaggaggcgcttcctcgatggggacagattgaccttggctgactgttctctgctgccaaagctgcacatcgtagatactgtctgcgcccacttcaggcaggccccaattcccgcagagctccggggtgtaaggcgctatctcgatagcgcaatgcaggagaaagaattcaagtacacctgcccgcacagcgcagagattctggcagcctacagaccagccgtgcacccacgctag

SEQ ID NO: 218180 - DNA, 348 bp, synthetic construct
  misc_feature 1..348: note = Description of Artificial Sequence: Synthetic coding sequence
  source 1..348: mol_type = other DNA
atgaattccggcgtttgtctgtgtgtactgatggcagttctggcagccggagctctaacgcagccagtccctcccgctgacccagcagggagcgggttgcaacgggctgaagaggccccacggagacagttgagagtatcccagcggactgatggcgagagtcgagcccaccttggcgcattactggccaggtacatccaacaggctcgaaaggctccatctggtcgtatgagtatcgtcaaaaacctccagaatttagatccttcccatcgcatcagtgaccgggactacatgggctggatggacttcggtagacgcagcgcagaagagtacgagtacccgtcttag

SEQ ID NO: 218181 - DNA, 348 bp, synthetic construct
  misc_feature 1..348: note = Description of Artificial Sequence: Synthetic coding sequence
  source 1..348: mol_type = other DNA
atgaattccggcgtgtgtttgtgtgtcctgatggccgtgctggccgctggcgcattaacccagcctgtacccccagctgaccctgcgggaagtggactccaacgagccgaagaggcccctaggcgccagctgagggtgagtcagaggacggacggagagtctcgcgctcacctgggagctttgctcgcgagatatatccaacaggcccgtaaagccccaagtggtcgaatgtccattgtcaaaaatttgcagaacctggatccctcacacagaatttccgatagggattacatggggtggatggatttcggtagacgcagcgccgaggagtacgaatacccgagttag

SEQ ID NO: 218182 - DNA, 348 bp, synthetic construct
  misc_feature 1..348: note = Description of Artificial Sequence: Synthetic coding sequence
  source 1..348: mol_type = other DNA
atgaacagtggcgtgtgtctgtgcgtgttaatggcagtcttagctgccggtgccctgactcaacccgtgcctcctgcagaccccgcaggatcagggctgcaaagggctgaggaggcccctagaaggcaactgcgcgttagccagcggacagacggagagtctcgcgctcatctcggcgcactgttggctagatatatccagcaagcacgtaaagctcctagcggtaggatgtccattgtcaagaatcttcagaacttggacccttctcataggatcagcgaccgagactatatgggatggatggatttcggcagaagatctgcagaggaatatgagtatccatcatag

SEQ ID NO: 218183 - DNA, 1287 bp, synthetic construct
  misc_feature 1..1287: note = Description of Artificial Sequence: Synthetic coding sequence
  source 1..1287: mol_type = other DNA
atggacgtggtcgactcccttctcgttaacggcagcaacatcacccccccatgtgagctcgggcttgaaaatgaaaccctattctgcctggatcagcccaggcctagcaaggaatggcaaccagccgtgcagatactgctttattcactgatctttcttcttagtgtcctgggtaacaccttggtgatcacagtgctgatccgaaacaaaaggatgcggaccgtgactaacattttcctgctttctctcgcagtgtccgatctaatgttatgtctgttttgtatgccattcaaccttataccgaatctgctcaaggatttcattttcgggtccgccgtctgtaaaacaacaacatactttatgggcacatcagtaagcgtaagcacctttaacctggtggccatttctctggagcgctacggagccatttgtaaaccgcttcagagccgtgtgtggcaaaccaagtcacacgctttgaaggtgatcgcagccacctggtgcctgtcgttcactatcatgacgccttaccccatctatagtaatctcgttccatttaccaagaataacaaccagactgccaatatgtgtagattcttgctgccgaatgacgtgatgcagcagagttggcatactttcctattactcatcctttttctgatccctggtatcgtgatgatggtggcctatggactgatctccctggaactttatcaaggcatcaagttcgaagcttctcagaagaagagtgccaaggagagaaaaccatccacgaccagtagtggtaagtacgaggatagcgatggatgctatctccaaaagacaagaccccctaggaagttggagttacgccagctgtccactggtagctctagccgtgcaaataggatccgcagtaacagctctgctgccaacttaatggctaagaaacgtgtcatcaggatgttgatcgtgatcgttgtcctgttcttcctgtgttggatgccaatcttctcggccaacgcttggagggcgtacgatacagcctcagcggaaagacgactgtccggtacaccaatcagtttcattctattgctatcttatacatcttcatgtgtaaaccctataatatattgtttcatgaataagagatttaggctcggattcatggccacttttccttgctgtccgaatcccggtccaccaggcgctcgtggggaagtaggcgaggaagaagagggtgggactaccggcgctagcttgagtaggttctcttacagtcatatgtccgcatccgtcccacctcaatag

SEQ ID NO: 218184 - DNA, 1344 bp, synthetic construct
  misc_feature 1..1344: note = Description of Artificial Sequence: Synthetic coding sequence
  source 1..1344: mol_type = other DNA
atggaattgcttaaattaaaccgtagcgtccagggtaccggcccaggaccaggggcatccctctgtcgacccggagccccactgctcaattcaagctcggtgggaaatctctcttgtgaaccccctaggatccggggagcagggacaagggagcttgagttggccatcagaatcacgctttatgccgtcatttttttgatgtctgttggaggtaatatgctgattatcgtggtgcttgggctttccagacgcctgagaactgtcaccaatgcctttctgctgtctcttgctgtgagcgaccttctgttggcagtggcttgtatgccgttcaccctgctgccaaacctgatggggacgtttattttcggtaccgtcatttgcaaagctgtgtcttacctcatgggagtgagcgtgtccgtctcaacgctctcgctcgtcgccatagccctggagcgatacagtgccatttgcaggcccctgcaggcgagggtctggcagacgaggagccacgctgctcgcgtaattgtggccacttggctcttgtctggtctgctgatggtgccgtaccccgtctacacagtagttcaaccagtcggaccccgagtcctgcaatgtgtacatagatggccctcagctcgggttcgccaaacctggtccgtgttgctactgctgctgctgttcttcatcccgggtgtggtgatggcagttgcctatggcctgatctcaagggagctgtatctaggtttgaggtttgatggagactctgactccgacagtcaatcccgcgtgagaaaccagggcggtctccccggagcggtccaccaaaacggtcgctgccgcccagagaccggggctgtgggagaagatagtgacggctgttacgtccagctccccagatcccgcccagctcttgaattgaccgccctcaccgcccctggaccaggaagtgggtctcggccaacacaggctaagctactcgctaaaaagcgggtggtgagaatgttgcttgtgattgtggtgctgttcttcctctgctggctgccggtgtacagtgcaaacacctggagggcttttgatggaccgggagcccaccgcgcactctctggggctcccatctcgttcatccacctcttgtcctacgctagcgcttgcgtcaatccattggtgtactgtttcatgcacaggcgattccgccaggcctgtctggagacatgtgccagatgttgccccagaccccctcgggctcgtcccagggccctcccagatgaggaccccccaacccctagtattgccagcctctccagactgagctataccacgataagcacactgggccctgggtag

SEQ ID NO: 218185 - DNA, 1551 bp, synthetic construct
  misc_feature 1..1551: note = Description of Artificial Sequence: Synthetic coding sequence
  source 1..1551: mol_type = other DNA
atggagcttctaaagctgaatcggtccgtgcagggtactggtccaggacccggtgcctctctttgcagacccggagctcctctcttaaatagttctagtgtagggaatttgtcatgcgaacctcctaggataagaggcgcagggaccagagagctcgagctggccatcagaatcacattgtacgcagtgattttcctgatgagcgtcggcggtaatatgttgattatagtggtgttagggctctcccgtcgcctgcgaaccgttactaatgcctttcttcttagcctggcagtgtcggacttgctcttagcagtggcgtgtatgcccttcacgctgcttcccaacctgatggggacctttatctttgggacagtcatatgtaaggccgtgtcatatttgatgggtgtcagtgtttcagtgagcaccttgagcctggtcgcaattgccctcgaaaggtactcagcaatctgcaggcctctgcaagccagggtctggcaaactcggagtcatgctgcaagagtgattgtggctacctggctcctttcagggctcttaatggtaccctacccagtctatacagtcgtgcagcctgttggtccaagggtgctgcaatgcgtgcacaggtggccaagcgccagggttaggcagacttggtcagtactcctactgctgctcctgttctttattccaggggtggtcatggccgtagcctacgggctcatttccagagagctttatctgggtctacgcttcgatggggatagcgactctgactctcagagccgcgtgaggaatcagggaggattgcccggaggagcaggtcctagggagcagaatctcggggaagctgaactctggcgcgctacggggccagcgggagtcggcggtacagaaatgaaggtgagagtacggagaaagctggaaatggaactgtcatgggaaaggcggtcaggcggagactgggctggcgactggggcgattcccccttcagcctgactgcacatccattatgcagcggcgcagttcaccagaacggaaggtgcaggccggaaactggggctgttggcgaagactccgacggctgctacgtccagctccccaggtcccgcccagcgcttgagttaaccgcactgaccgctcctggcccaggatcaggcagccggccaacccaagccaaattacttgcaaaaaagcgcgtggttcgaatgttattggtgattgtggttctgtttttcctatgttggctgccagtctactcagcaaatacatggcgggcttttgatggaccaggggcacatagagcactttcaggagctcctatttctttcattcatctgctctcttatgcttcagcctgtgtgaacccgcttgtgtattgctttatgcacagaagatttagacaggcttgtctcgagacatgcgctcggtgttgtccaagacctcccagggcccgacctcgggctttaccggacgaggatccgccaactccatcaatcgcaagcctgtccaggctgtcctacaccaccatcagcactttggggcctgggtag

SEQ ID NO: 218186 - DNA, 819 bp, synthetic construct
  misc_feature 1..819: note = Description of Artificial Sequence: Synthetic coding sequence
  source 1..819: mol_type = other DNA
atgagctgtcataattgtagtgaccctcaggtcttgtgcagctccggccagctgtttctgcaacccctatgggatcaccttcgctcatgggaggctctactacagtcaccttttttccctgtgatcttttcgatcaccacctatgtaggattttgcctgccattcgtggtcctggacatcctctgtagctgggtcccagctctaagacgctataagattcacccagacttttccccaagtgcacagcagttacttccatgccttggacagaccctttaccagcacgtgatgttcgttttcccagttactttgctgcactgggcccgttcaccagccctgcttccgcatgaagcaccagaactgctgctcctcctgcatcacatcctgttctgcttgctgctgttcgacatggagttttttgtgtggcaccttttacaccacaaagtgccatggctatacagaacctttcataaggtgcatcaccaaaattcctccagctttgcactggccacacagtacatgtcagtctgggaactgttcagtctgggtttctttgacatgatgaatgtcacccttcttggctgtcatccactcactactctaacctttcacgtcgtgaatatctggctgagtgtggaagaccattcaggatacaactttccatggagtactcaccgcttggttccctttggatggtatggaggtgttgtgcatcacgatctgcatcatagtcacttcaattgcaactttgccccttacttcacccattgggacaagattctgggaacgctccgaacagcgagcgtccccgcacggtag

SEQ ID NO: 218187 - DNA, 1482 bp, synthetic construct
  misc_feature 1..1482: note = Description of Artificial Sequence: Synthetic coding sequence
  source 1..1482: mol_type = other DNA
atgctggctgctaccgttctcacactcgcccttctcggcaacgcacatgcctgctctaagggtactagccatgaagccggaatcgtgtgcaggataacaaagcctgcactgttagtactaaatcacgagaccgctaaagtcattcagactgctttccagagggccagctacccggatatcactggtgaaaaggccatgatgctcctgggacaagtcaagtacgggctgcataacatacagataagccatctgtcgatcgccagcagccaggttgagctagtcgaggcgaaatcaattgacgttagcatacagaatgtgtccgtggtattcaagggcacacttaagtacggttacaccactgcttggtggttgggcattgaccagagcattgatttcgaaatcgacagtgccattgatctgcagattaatacacagctcacttgcgatagcggacgcgtgagaaccgatgctcctgattgctatttgagtttccataaattgttactgcacttgcagggagagcgggagccaggctggatcaagcagctgtttaccaatttcatatctttcaccctgaagctagttctaaaagggcagatttgcaaagagattaacgtgatttctaacatcatggcagattttgtgcaaacgcgtgcagcctccatcctgagcgacggagacatcggagtggatatttccctgacaggcgaccctgtgattaccgcctcctatttggagtctcaccacaagggacacttcatctacaagaatgtctctgaggaccttccccttcccacattttcccctaccctgctaggtgactcacgcatgttatatttctggttctctgagagggtgttccactccctcgccaaggtcgcctttcaggatggccgtctcatgctcagcctgatgggcgacgagtttaaagcggtcctggaaacttggggctttaacacaaaccaagagattttccaggaagtagtggggggatttccttcacaggcccaggttaccgtgcactgcttgaagatgcctaaaatctcttgccaaaataagggagttgtcgttaactcatccgtgatggttaaatttttgtttcccaggcccgatcagcagcacagcgtcgcttacactttcgaagaggatattgttaccacagttcaggcctcgtactccaagaaaaaactcttcttatccctgctggatttccaaattacacctaagacagtttctaacttgactgagagtagctctgaatccgtacagtcttttctacagagtatgatcacagcagtgggaatcccggaggtcatgagtagactcgaggtggtgtttactgcactgatgaatagcaagggggtgtccttgtttgacataatcaatcctgagataatcacgcgggacggattcctgctcctgcagatggatttcggattccctgagcatctgctagtggacttccttcagagcttgagctag

SEQ ID NO: 218188 - DNA, 1302 bp, synthetic construct
  misc_feature 1..1302: note = Description of Artificial Sequence: Synthetic coding sequence
  source 1..1302: mol_type = other DNA
atgctcgcagccactgtgttgacgctggcactgctgggcaacgctcatgcctgttccaagggcacgtcacatgaggctggcattgtatgcagaatcaccaagcccgctctgcttgtgttgaaccacgagactgctaaggtgattcagactgccttccaacgggcatcgtaccctgacataaccggagagaaagctatgatgctacttggacaagtgaagtacggattgcacaacatccagatctcacacctttccatcgcctctagccaggtggagctggtggaggccaagtctatcgacgtctccatacagaacgtaagcgtcgtattcaaagggacactgaagtatgggtacaccacggcatggtggctgggcattgaccagagcatcgacttcgagatcgatagcgctattgatctgcagataaacacacagctaacatgtgactccggccgagtgcgcactgacgcgcctgactgctacctttctttccataaactcctgctccacctccagggagaaagagagcccggatggatcaaacagctcttcacgaattttatcagttttaccctgaaattagtgctcaaggggcagatctgtaaagagatcaacgtgattagtaacataatggcagatttcgtgcagactcgggctgcctcaatactgagcgatggcgacatcggagtggatatctcactgacgggcgacccagttattacagcatcctatctggaatcacaccataaagccgtgctggaaacctggggctttaacacgaatcaggaaatctttcaggaggtggtgggcggatttcccagccaggcacaggtaacggttcattgcctgaagatgcccaagatatcttgccagaacaaaggagtggtggttaatagttccgtaatggtgaagttcctgtttcctcgccctgaccagcaacactccgtggcctatacattcgaagaggacatcgtgacgaccgtccaggcctcttattccaagaagaagctattcctgagcctcctggacttccagatcacgcctaaaacggtcagcaacctcactgaaagttccagtgaatctgtccagagctttcttcagtctatgattactgctgtgggaatacctgaggtaatgtcacggctggaggtggttttcaccgctctgatgaactcgaagggcgtgagtctcttcgatataatcaaccctgagattatcaccagggacgggtttcttcttctccagatggatttcgggtttcctgagcacctgctcgttgactttctgcagtcgttatcttag

SEQ ID NO: 218189 - DNA, 1374 bp, synthetic construct
  misc_feature 1..1374: note = Description of Artificial Sequence: Synthetic coding sequence
  source 1..1374: mol_type = other DNA
atgaagacaaagttttgcacaggaggcgaggcagagccctcgccactggggctgcttctctcctgtggttctggatccgccgctccagccccaggcgtcggacagcagagggacgcagcgtctgacttggaaagcaaacagctcggtgggcaacagccaccccttgccctccccccaccccctcccctgcccctgccactgcctttgccccaacccccaccccctcagccacctgcagacgagcaacctgagcctcggaccaggcgccgagcatacttgtggtgtaaagagtttttaccgggtgcgtggaggggcctgcgggaagacgaattccatataagtgtcattaggggaggcttaagtaatatgttatttcagtgctccttgcccgatactaccgctaccctgggtgacgagccacggaaggtccttctgcgcctgtatggcgctattttgcagatgaggagctgtaacaaagagggaagcgaacaagcccagaaggagaacgagttccagggtgctgaagccatggtgttggaaagtgtgatgttcgcaatccttgccgagcgcagccttggccctaaactttacggcatcttcccccaagggaggttggagcagttcatcccatctagaagactcgacactgaggaactttctctacccgacatctccgctgaaatagcagagaagatggccaccttccacgggatgaagatgcctttcaacaaggaacccaagtggctgttcggcactatggagaaatatctgaaagaggtgctgaggatcaaatttacagaggagtctaggatcaaaaagctccacaaactcttgagttacaacctccccctggagctggagaatttacgctctttgctggagagcacaccctcacccgttgttttctgccacaatgactgccaggaaggcaatattttactactcgagggcagggagaatagcgagaagcaaaagctgatgcttatcgacttcgagtactcttcctacaattataggggattcgacataggtaaccatttttgcgagtggatgtacgattattcctatgagaaataccctttcttcagagctaatattcgaaagtatccaactaaaaagcaacagctccacttcatctcaagctatctgcctgcttttcagaatgacttcgagaatctctccactgaggagaaatccatcatcaaggaggaaatgctcttggaggtgaaccgcttcgctctggccagtcactttctgtggggattgtggagtatcgttcaggccaagatctcctccatcgaattcggatacatggactacgcacaggcgcgattcgatgcttacttccaccaaaagaggaaactgggagtttag

SEQ ID NO: 218190 - DNA, 1320 bp, synthetic construct
  misc_feature 1..1320: note = Description of Artificial Sequence: Synthetic coding sequence
  source 1..1320: mol_type = other DNA
atgaagaccaagttctgcactggtggggaagccgaaccgagccccctcggcctgttactgagctgtggtagcggctctgccgcacctgcaccgggagtcggccagcagagggacgccgcttctgatcttgagagtaagcaactgggagggcagcagcccccactcgctctcccccctcctccaccacttcctcttcctctgccccttccgcaacccccacccccacagcctcccgctgacgagcagccggaaccgagaacaagaaggcgggcatacctgtggtgcaaggagttcttacctggggcttggaggggactgcgagaggacgagttccatatatctgtgattagaggcggtctttccaacatgctatttcaatgtagcctgcccgataccactgctaccctgggggacgagcccaggaaggtgctcctccgattatatggagccatactccaaatgggcgctgaggctatggtgctggaatctgtgatgttcgccattttggccgaacgatcgctgggaccgaaactctatggtattttcccccagggtcgcctggaacaatttatcccatctaggcggctagatacggaggaactttcactccccgatatttcagccgagattgcagagaagatggctacattccatgggatgaagatgcctttcaataaagagccaaagtggctatttggtaccatggaaaaatatctgaaggaggtcctgaggatcaagtttaccgaagaatcccgcataaagaagttgcataagttgttatcctacaatcttcctctcgaactggaaaatctccgctctctgctggaatccactccaagtccagtggtgttctgtcataatgactgtcaggaaggcaacatactgctgctcgaaggaagagagaacagtgaaaaacagaaacttatgctcatagatttcgagtacagcagttacaactatcgcggttttgacattgggaaccatttttgtgaatggatgtatgactacagttatgagaaatacccattttttcgggcaaacatacggaaatacccaactaagaaacagcagctacacttcataagtagctatttaccagcctttcagaacgacttcgagaatctgtcgacagaggaaaaatccattattaaggaggagatgctcctcgaagtgaatcgatttgcactggccagtcactttttatggggactgtggtcaattgtccaggctaagatctccagcattgaattcggctatatggattatgcccaggccaggttcgatgcctacttccatcagaagcgaaaactgggggtgtag

SEQ ID NO: 218191 - DNA, 1188 bp, synthetic construct
  misc_feature 1..1188: note = Description of Artificial Sequence: Synthetic coding sequence
  source 1..1188: mol_type = other DNA
atggcggctgaagccaccgccgtggccggatcaggcgctgttggtggatgtctcgcaaaggatggtctgcaacagagtaaatgccctgacaccacaccaaagcgcagacgagcgtcttccctatcacgggacgccgagcgcagggcgtatcaatggtgccgagaatatctggggggtgcctggcgacgtgtgcagcctgaggaactacgggtgtatcccgtctctgggggattgtccaacctgttatttcgttgcagcctgccagatcacttgccttcggtcggcgaggagcctagggaggtcctcctgaggctgtacggagccatactgcagggagtcgatagcctggtcttggagagtgtgatgttcgccattctggccgagcgctccttgggcccacaattgtatggggtctttccggaaggcagactggagcagtatataccgagcagacctctgaaaacccaggaacttcgggagccggtcctgtctgccgctattgcaacaaagatggcacagttccatggcatggagatgccgttcaccaaagagccccattggctgtttggcacaatggaacgctacctgaaacagattcaggatcttccccctaccggactacctgaaatgaaccttctcgagatgtactcgttgaaagatgaaatgggcaatctaagaaaactcctcgagagtaccccatctccagttgttttttgccacaacgacatacaggagggcaacattctgttgctgtcagagccagagaacgccgacagcttaatgctcgtggactttgaatatagctcttacaattaccgcggattcgacatcgggaaccacttttgtgaatgggtgtatgattacactcatgaggaatggcccttttataaggctcgtcctacagattatccgactcaggaacagcaactacatttcattaggcattacctggccgaggccaagaaaggcgaaacgctgagccaagaggagcaacgcaagcttgaggaggacctcctggtggaagtgtctcggtacgcactggcatcgcatttcttttggggactctggtccattctccaagctagtatgtcaaccattgaatttggctacctggactacgcgcaatcgcgattccaattttatttccagcagaagggacagcttaccagcgtgcattcctctagctag

SEQ ID NO: 218192 - DNA, 2247 bp, synthetic construct
  misc_feature 1..2247: note = Description of Artificial Sequence: Synthetic coding sequence
  source 1..2247: mol_type = other DNA
atgggattgcgcaccgctaaaaagcgcggtctgggcggtggcggaaaatggaagagagaggaagggggtggaacaagaggtcggcgagaggttagacctgcatgcttcctgcagtcaggcggaaggggagatcctggcgatgttggagggcctgccggaaacccgggatgctctccccacccaagggccgcaacccggcctccccctctacccgctcacacaccggctcacacacctgagtggtgcggtgccgcatccgccgaagccgctgagcctcgcagggccggtccacatctgtgcatacctgctcccggtctgaccaaaacacccattctggagaaagtccctcgcaaaatggctgctaagacaccttcttcagaagagagcggactccccaagctgccagttcccccattgcaacagaccttggctacatacctccagtgtatgcgtcatctggtgagcgaggaacagtttagaaagagccaggctatcgtgcagcagtttggagctccaggcggactgggcgagaccctgcaacaaaagctgttggagaggcaggaaaaaactgctaactgggtaagcgagtactggctcaacgatatgtatttgaataacaggttggctctgccggtgaattctagccccgctgtcatattcgccaggcaacactttcctggcactgatgaccagctgcgattcgctgccagccttatcagtggcgtactctcatataaagcactgttggacagtcattccattcctactgattgtgcgaaaggacaactgagcgggcaacccctgtgtatgaaacagtactatggattattcagttcgtataggctccctggacacacccaggacaccttggtcgcacagaacagttccattatgccagaaccggagcacgttattgttgcctgttgcaaccaattcttcgtcctggacgtggttattaacttcagaagactgagtgaaggcgacttatttacacaactccgaaagattgtcaagatggcttccaatgaggatgaaaggttaccgcctatcggactgctgacttctgacggaagatcagagtgggccgaggcccgtactgttctcgttaaagatagcaccaacagagatagcctggatatgattgaacggtgcatttgcttagtctgcttagacgcacccggaggcgtcgaactgtccgatacacatcgagcccttcaactgctgcacgggggaggatactctaaaaatggagccaatcgctggtacgacaaaagcctccaatttgtcgtcggcagagacggtacttgtggcgtggtgtgcgaacatagccctttcgacggaattgtattggtgcaatgcaccgagcacctgttaaagcacgtgacacagtcctcaagaaagctcatccgtgccgactcagtaagcgaacttccagctcctcggaggctacggtggaagtgctcgcctgagatacagggccatcttgcctccagcgctgagaaactgcaaagaatcgttaagaatctggatttcatcgtgtacaagttcgataactacggcaagaccttcatcaagaagcagaagtgctcaccagacgccttcattcaggtggcacttcagttggctttctaccgcctccatcggcgactggtcccgacttatgaatccgcgagcatacggcgattccaagaaggcagagtggataacattagatctgcaacgcctgaggccctggcctttgtccgtgccgtcacggaccacaaagcagctgtaccggctagcgagaagctgttgctgctcaaagacgccattcgcgctcagaccgcatatacagtcatggccatcacaggcatggccatagacaatcacctattggcactccgggagctggcccgtgccatgtgcaaagaacttcctgagatgtttatggacgagacatatcttatgagcaatagattcgtgctgtctaccagccaggtacccaccaccactgagatgttctgctgttacgggcctgtggtgcctaatggttacggagcctgctataaccctcagcccgagaccattttgttttgcatcagttcttttcactcatgcaaggaaacatcatcttccaaattcgcaaaggcagtcgaggaatccctgatcgacatgagagacctctgctcattgctcccacccaccgaatcaaaaccactggccacaaaagaaaaggctacccggcctagtcaaggccaccaaccatag

SEQ ID NO: 218193 - DNA, 1893 bp, synthetic construct
  misc_feature 1..1893: note = Description of Artificial Sequence: Synthetic coding sequence
  source 1..1893: mol_type = other DNA
atggcagctaaaacgccttccagcgaggagtctggtctgccaaaattgcccgtgccacctctccaacagacactagccacgtacctgcaatgtatgagacatttggttagtgaagaacagtttcgcaagagccaggcaatcgtccaacagttcggcgctcctggcggtctgggcgagaccctgcaacagaaactgctggaaagacaggaaaagaccgcgaactgggtgtcagaatattggcttaacgatatgtacctcaacaatagactggcattgcccgtgaatagttctccggcagttatcttcgccaggcaacactttcccggtacagatgatcagctgcgatttgctgcctctcttatctccggtgttttatcctacaaggccctgcttgattcacattccattcctacggactgtgccaaagggcagctcagcggccagccactctgcatgaagcaatactacggcctatttagctcgtacaggctgccgggacacactcaggatacgctggtggctcagaactcatccatcatgccagaacccgagcatgtgattgtggcgtgttgcaatcaatttttcgtcttggatgtggttatcaactttaggcgtctctcagaaggagatcttttcactcagcttaggaagattgttaagatggcttctaacgaggacgaacgcttaccacctattggactgctcacttctgacggtcggtccgaatgggccgaggcacggacagttttagtaaaggattccacaaacagagactcactggatatgattgagcggtgtatttgcctagtttgtctcgatgccccaggaggtgtggagctgtcggacacacaccgggctctgcagttactgcacgggggagggtactccaaaaacggggctaatagatggtacgacaagagtctgcaattcgtggtaggacgcgatggaacgtgtggggtagtttgcgagcattctccgtttgacggaattgtcttagtacaatgcactgaacatctgctcaagcatgtgactcagtcttcacgaaaactcatcagggctgactccgtgagtgaactgccagctccccgaagattgcgctggaagtgctctcctgagattcagggacatctggcaagctctgctgagaaactgcagcgaatcgtcaagaatctggactttatcgtgtataaattcgataattacgggaagacctttataaaaaagcaaaaatgttctcccgacgcgttcattcaggttgcgctccagctggcgttctaccggctacacagacgattggtgcctacgtacgagtccgccagcataaggcgtttccaggagggtcgggttgacaacattcgttcagccactcctgaagccctcgctttcgtccgcgcagtaactgatcacaaggctgcagttcccgcaagcgagaagctcctactactcaaagacgccattcgagctcagactgcgtacacagtgatggcaattaccggcatggctattgataatcacctgctggctttacgcgaactcgccagggccatgtgtaaggaattgcctgagatgtttatggatgagacctatctcatgtccaatcgcttcgttttatcgacgtctcaggttccgaccactacagagatgttttgctgttatggtccagtggtgcctaatggctatggtgcctgctacaatcctcaacccgaaaccatactcttctgcatttcatcttttcactcgtgtaaggagactagttcgagcaaattcgcaaaagcggttgaagaaagtctgatcgatatgagggatctgtgtagtctgctaccgcctaccgagagcaaaccactggctaccaaagagaaagctacacgacctagccagggacatcagccatag

SEQ ID NO: 218194 - DNA, 1893 bp, synthetic construct
  misc_feature 1..1893: note = Description of Artificial Sequence: Synthetic coding sequence
  source 1..1893: mol_type = other DNA
atggctgcaaagacaccgtcttctgaagagagcggccttcccaaactgccagtgccacctcttcaacagacactcgcaacctatctccagtgtatgcgtcacctggtcagcgaggagcagttcaggaagagccaggctatcgttcagcagttcggggctcctggaggtctcggcgaaacgcttcagcagaagctactcgaacggcaagagaagaccgccaattgggtctctgaatactggctgaatgacatgtacctgaacaaccgcctggctttgcctgtgaatagtagcccagccgttattttcgccagacagcatttccccggaacagatgaccagttgcgtttcgcagctagcttgatttccggggtcctgtcttataaagccctgctcgattcacactccatcccaactgactgtgctaaggggcaactaagcgggcagccgctatgcatgaaacagtactatggcctgttctctagttaccgactccccggtcatacccaggataccctcgtggctcaaaattcttctatcatgcccgagcccgagcatgttattgtggcatgttgtaatcagttttttgtcctggatgtggtgatcaattttcgtagactgtctgaaggagatctgtttactcagttgcgcaagatcgttaaaatggcatctaatgaagacgagagacttcccccaataggtctcctgacctcagatgggaggagcgaatgggcagaagccagaactgtcctggtgaaggattcaactaatcgtgactcccttgatatgatcgagaggtgtatttgtctggtgtgcctagacgcccctggtggggtcgaactatctgacactcatagagctctgcagctgttgcatggcggaggttactcaaaaaatggggcaaacaggtggtacgataagtctctccagttcgtcgtggggagagatggcacatgcggagtggtgtgcgaacatagtccttttgacggtattgtcttggttcagtgcacggagcaccttcttaaacatgtgactcaaagcagccgcaaacttatccgcgcagactctgtgagtgagctgccagcacccagacgactgcggtggaagtgtagccccgagatacagggacacttggcaagcagtgctgaaaagctgcagaggatagtgaagaacctcgacttcatcgtgtataagtttgataattacggtaaaacttttattaaaaaacagaaatgtagcccagacgccttcattcaagtggcccttcaactggcattctatcgactccataggaggttggtgcctacgtacgaatctgcgagcatcaggagattccaagagggacgcgtggacaatatccgtagcgctacacccgaagcgctggcctttgtacgagcagttaccgaccacaaagccgcagtgcctgcttcggaaaagctgctcctactgaaggacgcgatccgagcccagaccgcctacactgtaatggcaataaccggtatggctattgacaatcacctgctagcgctacgggaactcgccagggccatgtgcaaagaactgcccgagatgtttatggatgaaacctatttaatgtcaaataggtttgtactatcaacgagccaggtgcccactacgaccgaaatgttctgttgctatgggccagtcgtgcccaatgggtatggggcttgctataacccccagcctgaaacgattcttttttgcatcagttcgtttcatagctgcaaagagacctcctccagcaagtttgctaaagctgtcgaagaaagtctgatcgatatgcgcgatttgtgctcacttctccccccaaccgagtcaaagcccctagcgacaaaagagaaagccaccagaccaagtcagggacaccagccatag

SEQ ID NO: 218195 - DNA, 1893 bp, synthetic construct
  misc_feature 1..1893: note = Description of Artificial Sequence: Synthetic coding sequence
  source 1..1893: mol_type = other DNA
atggcagcaaagaccccttcaagcgaggagagtggcctccccaaattgcctgtcccccctttacagcaaaccctggctacctatcttcagtgcatgaggcacctcgtatctgaggagcaatttagaaagtctcaggcaatcgttcaacaattcggtgccccaggaggactaggcgagacactgcaacaaaagcttcttgagcggcaggagaagactgcgaattgggtgagcgagtactggctcaatgacatgtacctgaacaataggctcgctctccctgtgaattcctctcctgccgtgatctttgccagacagcatttccccggaactgatgaccagctgaggttcgccgcttctctgatctctggcgttctgagctacaaggcgctgctcgatagccactccatccccacagattgcgctaagggacagctgtctggtcaacctctgtgtatgaaacagtactacggactgttcagcagttaccgcctccccggacatacccaggacaccctggtggcgcagaattcttcgatcatgccagagcccgagcacgttattgttgcttgctgtaatcaattcttcgtcctggacgtcgtcatcaatttccggagactgagtgaaggagatttattcacgcagttgagaaagattgtgaaaatggcgtcaaatgaggacgagcggctgccgccaatcgggttgctgacatcagatggacgctccgagtgggcggaagccaggaccgttctcgtgaaggactcaacaaaccgcgattcattagacatgatagaacgatgcatctgcctggtgtgcctggatgctcctgggggagttgagctgtccgacactcaccgcgctctgcagctgctgcacggcggagggtacagcaagaacggtgccaaccgatggtatgacaagtctcttcagttcgtggttggacgggacggcacatgtggagtcgtatgcgagcacagtccctttgacggtatcgtcctcgttcagtgtacagaacaccttctcaaacacgtgacacagagcagtcgcaagctcatccgggctgactctgtttccgagctgcccgcacctaggcgcctaagatggaaatgcagccccgaaattcaggggcatctggcgtccagcgcagagaagttacagaggatcgtgaaaaacctggacttcatcgtgtataagtttgataactatggaaaaacattcatcaagaagcagaagtgttcccccgatgcatttatccaggtcgccctgcaacttgcattttaccgccttcaccgtcgtctggtacctacatacgaatccgcctctataagacggttccaagaggggcgtgtggataatatccgtagcgccacacccgaggctctcgcctttgttagggcagtgaccgaccacaaggcggcagtgcctgctagcgaaaagcttctgctgcttaaagacgcaattagggctcagacagcgtacacagtaatggccattaccggcatggccattgataatcacctattggcactgcgagagcttgctagggcgatgtgcaaagagctcccagagatgttcatggacgagacctacctgatgtctaataggtttgtgctgtctacctctcaagtccctactaccacagaaatgttctgctgttatggtcctgtagtgcccaatggatacggcgcatgctacaacccgcagcctgaaactattcttttctgtatttcaagctttcattcctgtaaagagacgtcctcttctaagtttgctaaggcagttgaggaatccctgatcgatatgagggacctgtgttcactgcttcctcctacagaatcgaagccactcgcaacaaaggaaaaggcaacaaggccttcccaagggcaccagccgtag

SEQ ID NO: 218196 - DNA, 2001 bp, synthetic construct
  misc_feature 1..2001: note = Description of Artificial Sequence: Synthetic coding sequence
  source 1..2001: mol_type = other DNA
atgtggcccgagtgccgggatgaggccctgtcaaccgtcggtccgcatctgtgtataccggcacctggactgacaaagactccaatcctagagaaggtgccacggaaaatggccgctaagacaccctccagcgaagagtccggtctgccgaaactgcctgtgcctccgctacaacagacccttgcgacgtatctgcagtgcatgagacaccttgtgagcgaagaacagttccgcaagtcccaagccatagtgcagcagttcggagcccctggaggcctgggtgaaacattgcagcagaagctgctggaacggcaggaaaaaacagcgaattgggtatctgagtactggctcaatgacatgtatcttaataataggttggctctgcctgttaatagtagcccagctgtaattttcgcgaggcaacatttccccggaaccgacgatcagctgcggtttgcagcctctctgattagtggggtactctcctataaagctctcttagacagtcacagcattccgaccgactgtgcaaaaggccagctgtccggtcaaccactgtgcatgaagcagtactacggcctgttttctagctatcgcctgcccggacacacccaagacactctcgttgctcagaactccagtataatgcccgaacccgagcatgtgattgtagcctgctgcaatcagttttttgtgctcgacgttgtgattaatttcagacgcctttctgagggagacctttttacccagctcaggaagattgtcaagatggcctctaacgaagatgagcggcttccccctatcggcctcctgacgtccgacggccgtagcgaatgggcagaggcccgaacagtcctggtcaaggacagcaccaatagggattccctggacatgatagaaaggtgcatctgcctggtttgcctggatgcacctgggggagtggaactgagtgacacccatcgcgcacttcaactgctgcacgggggtgggtattcaaagaatggcgcaaaccgatggtatgacaagtcgctgcagtttgtggtcggcagggatgggacctgtggggtggtgtgcgaacattcccctttcgacggcatcgtcctagtacaatgtacagaacaccttttgaagcacgttacacaatccagccggaagttgatcagagcagactcagtcagcgaactgcctgcccctcgaagacttcgctggaagtgcagccccgaaatacagggtcacctcgcatcctcagcggaaaagctccaacggatcgtgaagaacctggattttattgtttataagttcgataactatgggaagacattcatcaagaaacagaagtgctctcctgatgccttcatccaagtcgcattgcagctcgcattctaccggctccacagaaggctcgtccccacctatgaatcagctagcattaggcgatttcaagaagggagggtagacaacatcagatctgccacaccggaggccctggctttcgtgagggcagtgactgaccacaaagccgcagtccctgcttctgagaagctcctgttgctcaaggacgctatccgggcacagacagcttataccgtgatggctattaccggtatggccattgacaatcatcttctggccttaagagagctcgcccgagccatgtgcaaagaactgcctgagatgttcatggatgagacgtacctaatgtctaaccgttttgtgctgagcacgagtcaagtccccacaactacggagatgttctgttgctacggacccgtggtgccaaacggctatggagcttgttacaacccacagccagagaccattctgttttgtatttcttcctttcatagttgtaaggagacctcaagcagcaagtttgccaaggctgttgaagagtctctcatcgacatgcgtgatctttgcagtctgctgccacctacagagagcaagccactggctacaaaggagaaagcaacacggccttcccagggacatcagccatag

SEQ ID NO: 218197 - DNA, 1638 bp, synthetic construct
  misc_feature 1..1638: note = Description of Artificial Sequence: Synthetic coding sequence
  source 1..1638: mol_type = other DNA
atggccgctaagaccccaagcagtgaggagagtggattgccaaagctgcccgtgccccctctgcagcagaccctagcaacttatttgcagtgtatgaggcacctagtatccgaggaacagttccgtaaatcccaggcaattgtgcagcagttcggcgcacccggaggcctgggcgaaactctccagcagaagctgttagagcgccaggagaaaaccgccaactgggtcagtgaatattggctcaatgacatgtatttaaacaatcgcttggctttgccagttaattcgtcacccgctgttatcttcgccagacagcatttccctggcaccgacgaccagttaagattcgctgcatccctgataagcggagtgttatcctacaaagccctactggattcacactcaattcccaccgactgtgcgaaaggccaactctccggccagccgctttgcatgaaacaatattatggactgttctcctcatatcgcctacccggacatactcaggatacgctggtcgctcagaactcatcaatcatgcccgagcctgaacatgttattgtggcatgttgtaatcagttcttcgtgttagatgtggtcataaacttcagacgtcttagcgaaggcgaccttttcactcagctgcgcaagatcgtcaaaatggcatctaacgaagacgagcggctgcctcccatcggactgttgacttctgatggtcggtccgagtgggcggaagcgcgtaccgtgctagtgaaggattcgacaaaccgagactctctggacatgatcgagcgctgcatttgtttggtgtgtttggatgcacccggaggggtggagctttcagatacacaccgtgccctccagctgttacacggagggggttattcaaaaaacggcgctaacagatggtatgataaaagcttgcagtttgttgtcggcagagatgggacatgtggggttgtgtgtgagcatagccctttcgatggaattgtattggtccagtgtaccgagcacctgttgaagcacgtgacccagagcagcagaaaattgattcgggctgattccgtgtccgagttaccagccccacgcagattgcgctggaagtgttctcctgagatccagggccacctcgcctcgtccgctgaaaaactccagcggattgtgaagaacctggactttatcgtgtacaaattcgataattacggcaagacatttatcaagaaacagaagtgtagtccggatgctttcattcaagttgcactccagcttgccttctatcgcttgcaccgcaggctcgtaccaacatacgagtctgcttccatccgcaggttccaggaagggagagtggataacatacgtagcgccacaccagaggcgctggcctttgtgagagccgtcactgaccacaaggcagccgttcccgcttctgagaagctgttgttgctgaaggacgccattcgagcacagaccgcttacacagtaatggcaatcaccggaatggccatagataaccacctcttagccttacgcgagcttgctcgggctatgtgcaaggagttacccgagatgttcatggacgagacatatctcatgtcaaataggtttgtactgtctacctcccagctatgttggccatag

SEQ ID NO: 218198 - DNA, 1383 bp, synthetic construct
  misc_feature 1..1383: note = Description of Artificial Sequence: Synthetic coding sequence
  source 1..1383: mol_type = other DNA
atgaatacgagtgcacctcccgcagtttcccccaatatcaccgtacttgctcccggtaagggaccttggcaggtcgcatttataggcatcaccaccggtcttttgtctttagctacagtgacaggaaacctgctggttctgatttcatttaaggttaataccgagttgaagactgtaaataattattttctactcagtctggcctgcgccgatctgataatcggaacattttccatgaacctctatacgacctatttgctgatgggacactgggcactggggaccctggcgtgtgacctgtggctcgccctggactatgtcgcatccaacgccagcgttatgaacttgctgcttatctcgttcgaccggtacttctcagtcaccagaccactttcttatcgggctaagcgaactccaagaagagcggcactaatgattggattggcctggttggtgtccttcgttttgtgggctccagccattttgttttggcagtatctcgttggggaaagaactgtcctggccggacagtgctacatacagtttctcagtcagccgatcatcaccttcgggaccgccatggccgcattctatctccccgtgactgtgatgtgcaccctatactggcggatttaccgagaaaccgagaatcgcgctcgagaactcgctgctttgcagggctccgaaacaccgggtaagggagggggaagttcctcctctagtgagcgatcccaacctggcgctgagggttcccccgaaacgccccctggccgatgctgtagatgttgtcgggctccacgattgctgcaagcctacagttggaaggaggaagaagaggaggatgaaggctccatggaaagcctcacctcttctgaaggcgaggagccgggatcagaggttgtgataaagatgcctatggtggaccccgaggcccaggcacctacaaagcaaccccctcgcagcagcccaaacactgtcaagcggcctacaaaaaaaggacgagatagagccggaaagggacagaagccaagagggaaggagcagctcgccaagcggaaaaccttttctctggttaaggagaagaaagcggctaggacactctctgccatcctattggcgttcatactcacatggactccctataatataatggtactcgtgtccacgttttgcaaagactgcgtaccggaaaccctttgggaactcggttattggctgtgctacgtgaatagtacaattaaccctatgtgctacgccctttgcaacaaagcgttcagagacacttttcggctgttactgctctgtaggtgggacaaaaggcgctggagaaagatccctaagaggcccggatccgtacataggactccctcccgccaatgctag

SEQ ID NO: 218199 - DNA, 405 bp, synthetic construct
  misc_feature 1..405: note = Description of Artificial Sequence: Synthetic coding sequence
  source 1..405: mol_type = other DNA
atgaacacttctgcccctccagccgtcagtcctaatatcaccgttctggctcccggaaagggtccctggcaggtagcgtttattggaataaccacgggattgctctccttggctacggtcaccggcaacctgctcgtactgatctcttttaaggtaaacaccgaactgaagaccgtgaacaattactttctgctatccctggcctgtgcggatctcatcatcggcacctttagtatgaacctgtataccacctacttgctaatgggccactgggccctcgggactttggcttgtgatctgtggctggcactagattacgtggccagcaacgcctcagtcatgaatcttctgttgatttcctttgaccgctactttagcgttacccgtcctttaagctatagatag

SEQ ID NO: 218200 - DNA, 1365 bp, synthetic construct
  misc_feature 1..1365: note = Description of Artificial Sequence: Synthetic coding sequence
  source 1..1365: mol_type = other DNA
atgaacaccagcgcccctcctgctgtcagccccaatataacagtcctagcacctgggaaggggccatggcaggtagctttcattgggatcacaaccgggcttctgtccctggctactgtgaccgggaaccttctcgtcctgatatccttcaaagtaaacactgaactgaaaacagtcaataactatttcctcctctcactggcatgtgctgatcttattatcggaactttttcaatgaacttatataccacttacctgctaatggggcattgggcgttaggcacgctggcctgtgacctgtggctcgccctcgactacgttgcttctaacgcctcggtgatgaatctcttactgatctcatttgaccgctatttcagcgtcacgcggcctctgagctatcgtgcgaagaggacccccagaagagccgctctgatgatcggattagcttggctggtgtcctttgtcttgtgggcccctgcaattcttttttggcagtatctggtgggagaacgcaccgtcttggctggccaatgctacatccagtttcttagtcagcctattataacctttggaactgctatggcggcattttacttgcctgtcacagttatgtgcaccctgtattggcgcatctatcgtgagacagaaaatcgggctagagaattagcagccctacagggttcggaaacaccaggaaaggggggaggatcatcttcgagctccgagcggagtcagcccggagcagaaggttccccagagactccacccggaagatgttgcaggtgttgccgagctcctagactgctccaggcatattcctggaaagaggaagaggaagaggacgaaggcagcatggaaagcctgaccagcagcgagggcgaagagcctggctctgaggttgtgatcaaaatgcccatggtggacccagaagcccaggcaccgaccaagcagcccccaagatccagcccgaacacagtcaaacgaccgactaagaaagggagagacagggcaggcaaaggtcaaaagccgaggggcaaggaacagctggctaaacggaaaacattttctctggtgaaagagaagaaagccgcaaggacactgtcggccattctgctcgcattcattctaacctggacaccttataatatcatggtcctggtgtcaaccttctgcaaagactgtgttcccgaaactctctgggagctgggatactggctgtgttatgtaaactcaaccattaatcctatgtgctacgccttgtgcaacaaggctttccgcgatactttcaggcttctgctgctatgtcggtgggacaaaaggaggtggagaaagatccctaaaagacccggatctgtccatcggtag

SEQ ID NO: 218201 - DNA, 1401 bp, synthetic construct
  misc_feature 1..1401: note = Description of Artificial Sequence: Synthetic coding sequence
  source 1..1401: mol_type = other DNA
atgaacaattcaacgaacagctccaataattctcttgctctaacgtcaccatataagacctttgaagttgtattcattgtactagtggcagggtctttaagtttagttacaataatcggtaacatactggtgatggtgtccatcaaggtgaacagacatttgcaaaccgtgaacaattattttctgttttctctggcttgcgcagatctaatcatcggggtgttctcaatgaacctttacaccctttacaccgtgatcggttattggcccctggggccagtagtttgcgatttgtggctggcacttgattacgtggtgtccaacgcatctgtaatgaacctgttgattatatcctttgaccggtacttttgtgtgaccaagccactgacgtatccagtaaagaggacaaccaaaatggccggaatgatgattgcagcggcttgggtgttgtcatttatcctgtgggcgccagcaatattgttttggcaattcatagtcggggtacggactgtggaagatggagagtgttacattcaattcttttcgaatgccgctgtgaccttcggaacagcaatcgcagccttctatctgcctgttataattatgaccgtactgtactggcacatcagccgggcaagtaagtctcggattaaaaaggataagaaggagcctgtcgccaatcaggatcccgtctcccccagccttgtacagggccgaatcgtcaagccaaataacaacaacatgccttcgtctgatgatggcctcgaacataacaagatccagaacggcaaggctccgagagatcccgtgactgaaaattgcgttcagggggaagaaaaagaaagtagtaacgactcaacatcagtgtcagccgttgctagcaatatgagggatgacgagattacacaagacgagaacaccgtttcaacgtcacttggccattcaaaggatgaaaatagcaaacaaacttgcattaggattggaactaaaactcccaagtccgattcttgtacccctactaacaccacagtagaggtggtgggttcatccggacagaacggagacgagaagcagaacatcgtggctagaaaaattgttaagatgacaaaacagccagcaaaaaaaaagcctcctcctagtcgggaaaagaaggtcacaaggactatcctcgcaatactgttggcctttattatcacatgggcgccatacaacgttatggtgctgattaacaccttctgcgcaccctgtatccctaacacagtgtggaccattggctactggttatgttacataaacagcacgattaatcccgcttgttacgctctgtgcaacgcaacatttaagaagaccttcaagcatcttttaatgtgccactacaagaatatcggggctaccaggtag

SEQ ID NO: 218202 - DNA, 1401 bp, synthetic construct
  misc_feature 1..1401: note = Description of Artificial Sequence: Synthetic coding sequence
  source 1..1401: mol_type = other DNA
atgaataatagcaccaactcctccaacaattccctcgcactgacttccccttataaaacttttgaggttgtctttatcgtgttggtcgcagggtccttgagtttggtgacgatcatcggcaacatcttagtcatggtgtcaatcaaagttaatcgccacctgcagacagtcaataactactttctatttagtctcgcctgcgccgatctgattattggcgtatttagcatgaacttgtacaccctgtataccgttatcggttactggcccttgggcccagttgtgtgcgacctctggctggccctggattatgtcgtgagtaatgccagtgtgatgaacctcctcattatcagttttgataggtacttctgtgttacgaaacccctgacctatcccgtaaagagaacaacgaagatggctggcatgatgatagcagccgcatgggtgctaagttttatcctgtgggccccagcaatcctgttctggcaattcattgtgggcgtccggaccgtcgaagatggagaatgttatatccagttcttttctaacgcggctgttacatttgggaccgcaattgctgccttctacttacctgtgattattatgaccgtgctttactggcacatttctagggcaagtaaatcccggattaagaaggataagaaagaacccgtggccaatcaagaccctgtaagcccctctttggtgcagggacgcatcgtgaagccaaacaacaacaacatgccctcatcagacgatggtttagagcataataagattcagaacggcaaggctcctcgggatcccgtcacagagaactgcgtccagggagaagagaaggagagcagcaacgatagtacaagcgtgtctgccgtggcctccaacatgcgagacgatgaaatcactcaggatgaaaatacagtgtccacctccctgggccattccaaagatgaaaacagcaagcagacatgtatacgaattgggacaaagacccccaaatctgattcttgtactcctactaacacaacggttgaggttgtcggcagcagcgggcaaaacggcgacgaaaagcagaacatagtagcacgcaagatcgtcaagatgactaaacagcccgcaaaaaaaaagcctccaccgtcacgggaaaagaaagtgacccgaaccattttagccatcttactggcttttataattacatgggccccatacaacgtgatggttctgattaatacattctgcgctccctgcatacccaatactgtgtggactattggatactggctctgttacatcaattcaacgatcaatcccgcatgctatgccttgtgcaatgccacattcaagaagacatttaaacatctgctaatgtgtcattataaaaacattggtgccactcgctag

SEQ ID NO: 218203 - DNA, 1401 bp, synthetic construct
  misc_feature 1..1401: note = Description of Artificial Sequence: Synthetic coding sequence
  source 1..1401: mol_type = other DNA
atgaacaattccactaactcctccaacaattcccttgcattgacgtctccttacaagactttcgaggtggtgtttatcgtactggtggccggatccttatccctcgttactatcattggcaatattctcgtgatggtatctatcaaggtgaaccgccacctccagacagtgaacaactattttctcttttctctggcctgtgccgatctcatcatcggggtgttctcaatgaacttgtatactctgtacaccgttattgggtactggcccctgggacccgtggtgtgtgacttgtggctggcactggactacgtggtttctaacgcatccgtgatgaacctgctaattatatccttcgaccggtacttctgtgtcacaaagcctcttacatacccagtcaaacggacgacaaagatggcaggaatgatgatcgccgctgcatgggtgctgtccttcattctgtgggcccctgcgattctgttctggcagtttatagtgggcgttcggaccgtggaggatggcgagtgttacattcaatttttttcaaacgctgccgtcacattcggaaccgcaatcgccgcattctacctacctgttatcattatgaccgtgctgtactggcatatttcaagagccagtaaatcgcgcatcaagaaagacaaaaaagaaccagtagccaaccaggatcctgtctccccgtctctcgtgcaggggcgaatcgtgaagcctaacaacaacaacatgccgagtagcgatgatggtctggaacacaataagatccaaaatgggaaggccccaagagaccctgtcacagagaactgcgttcagggtgaggaaaaagaaagtagcaatgattccacctctgtttcagccgttgccagtaatatgagggatgatgagatcacacaggacgagaacactgtttcaacctcccttggacattcaaaagacgaaaacagcaagcagacctgcatcagaatcggcacaaaaacgcccaaaagcgatagctgcactcccaccaacacaacagtggaggtggttgggtcgtctggtcaaaacggggacgagaaacagaatattgttgcccgaaaaatcgtgaagatgacaaaacaacccgcaaagaagaaacctccaccgtcccgagaaaagaaggtcacccgcaccatcctagctatcttgttggctttcatcattacatgggctccatataacgtcatggtgctcattaacaccttctgcgccccttgcatcccgaacacagtctggactatcggatactggttatgttatattaactcgacaataaacccggcttgttacgctttgtgcaatgctacatttaaaaagacattcaaacatctgctcatgtgccactacaaaaatattggagcaacacgatag

SEQ ID NO: 218204 - DNA, 1401 bp, synthetic construct
  misc_feature 1..1401: note = Description of Artificial Sequence: Synthetic coding sequence
  source 1..1401: mol_type = other DNA
atgaataacagcaccaattccagcaacaactcactggccctgacttcgccttacaagacatttgaagtcgtctttatcgttctggtggccggatctctgtcgctcgtgactatcataggaaatatccttgtgatggtctctataaaagttaaccggcatctgcagacggtgaataactattttcttttctcgctggcatgtgccgacctcattatcggagtgttttcaatgaatctgtacacactgtacaccgtcatagggtactggcccctgggacccgtggtatgtgacctgtggcttgcactggattacgttgtctctaatgcatcagtcatgaaccttctgatcatatcgttcgaccgctacttctgcgtcactaaacccttgacatacccagtgaagaggaccacaaagatggccggtatgatgattgccgcagcttgggtgctgagctttatcctctgggctccggctattctgttctggcagtttatcgtcggagtgcgtacagtcgaagatggcgaatgctacattcagttttttagcaatgcagccgtgacctttgggactgccatagcggcattctatctgccagtcatcatcatgacagtgctctattggcacatatctcgcgctagtaaatccagaattaagaaggataagaaggagcccgtcgccaaccaggatcctgttagcccaagtctcgttcaaggccgaattgtcaagcccaataacaacaatatgccatcatcagatgacggtttggagcacaacaaaattcaaaatgggaaagcgcctcgggatccagttacagagaattgcgtgcagggcgaggaaaaagagagctccaatgattctacctcagtgagcgctgtggctagcaacatgcgagatgatgaaatcacccaggacgaaaacaccgtgtctacatcattaggccattcaaaagacgaaaactccaagcaaacgtgcatacgcataggaaccaagactcctaagtcggactcctgcacaccaactaatacaaccgttgaggtggtcgggtcttcaggtcagaacggggatgagaaacagaatatcgtggctaggaagattgtcaagatgaccaagcagcctgcaaaaaaaaagccaccaccaagcagggagaagaaagtaacacgtacaatactcgcaattctgctggcttttataataacatgggcgccttacaacgtcatggtgctgataaataccttctgtgctccttgtatacctaacactgtctggaccattggttactggctgtgttatattaatagtaccattaatcctgcgtgttacgccctgtgcaacgctacttttaagaagacgtttaagcacctgctgatgtgccattacaagaatatcggtgccacgaggtag

SEQ ID NO: 218205 - DNA, 1401 bp, synthetic construct
  misc_feature 1..1401: note = Description of Artificial Sequence: Synthetic coding sequence
  source 1..1401: mol_type = other DNA
atgaataattcaaccaattcctctaacaatagcctcgcactgacaagcccctacaagacgttcgaggttgtttttattgttctggtggctgggtccctgagcctggtcaccattataggtaacatcctggtgatggtatctattaaggtgaaccggcacctgcaaaccgtgaacaactatttcttgttctccctagcgtgcgcagacctcatcatcggcgtgttctccatgaatctctatacattgtacacagtgattggatattggccactcgggccagtcgtgtgtgatttatggttggctctcgactacgtggttagtaatgcgagcgtgatgaacctgctaattatcagctttgaccgctatttctgcgttaccaagcccctgacgtacccagtgaagagaacgacaaagatggcagggatgatgattgctgcagcttgggtgctcagctttatcctgtgggcaccagccatattattttggcaattcatcgtgggcgttcgcaccgtcgaggatggggaatgctacattcagttcttctccaatgccgctgtaactttcggcacagcaattgctgctttctatctgcccgtgatcataatgaccgtgctgtattggcatattagccgggcttccaaatcccgcataaagaaggataagaaggagccagtcgccaatcaagatcctgtctctccgagcttggttcagggccgaatcgttaaacccaacaataacaatatgccgagcagtgatgatggactggaacacaataagattcagaatgggaaggccccacgggacccagttactgagaattgcgtgcagggtgaggaaaaggagtcctccaatgacagcacttcggtaagcgcagtagcgagtaatatgagggacgatgaaattacgcaggacgaaaatactgtcagtacgagcctgggccactctaaagacgaaaatagcaagcagacctgtatccgcattggcacgaagacaccaaaatcggattcatgcacaccgaccaatacaaccgtggaggtggtaggctccagtggccaaaacggagatgagaaacagaacattgtggccagaaagatcgttaaaatgactaagcaacccgctaaaaaaaagccacccccaagcagagagaagaaagtcacacgcacaatcctggcaatattacttgccttcatcattacctgggcaccgtacaatgtgatggtactgattaacaccttctgcgctccctgcataccaaacacagtttggaccatagggtactggttgtgctatatcaattcaacaatcaatcctgcctgctacgcgctgtgtaacgctacttttaaaaaaacattcaaacacctgttaatgtgtcattacaagaacatcggagctactcggtag

SEQ ID NO: 218206 - DNA, 1401 bp, synthetic construct
  misc_feature 1..1401: note = Description of Artificial Sequence: Synthetic coding sequence
  source 1..1401: mol_type = other DNA
atgaataactctaccaatagttctaacaatagcctcgcactcacatccccctacaaaacattcgaggtcgtgttcatcgtactggtcgctggctccctttctctggtcaccattatcggaaacattctggtgatggtcagcattaaagtgaaccgacacctccagaccgtcaacaactacttcctgttttccctcgcttgcgctgacttaatcatcggcgtgttcagcatgaatctgtatacgctgtacactgtgattggctattggccccttggacccgtggtgtgtgacctgtggctggcgcttgactacgttgtgtctaatgcaagcgtgatgaatctgttgatcatctccttcgatcggtacttttgcgttacgaagccgcttacatatcccgtcaagaggacaacaaagatggccggtatgatgatagcggctgcttgggtgcttagttttatcctgtgggctcccgctattttattctggcagttcattgtgggggttcggaccgtcgaagacggcgagtgttatatacaattttttagcaacgccgcagtgacatttggcactgcgattgccgcattctatcttcccgttatcattatgactgtcctttactggcacatttcgagagcatctaagagtcgtattaagaaggacaagaaagaaccagttgctaaccaagaccccgtgtctccaagtctggttcaaggacgcatagtgaagccaaataacaacaatatgccctctagtgacgacggtctggagcacaacaagatccagaacgggaaggccccaagggacccggtgaccgaaaactgcgtgcagggcgaagagaaagagtctagtaatgactccactagtgtgagcgcagtagcgtctaacatgcgcgatgatgagatcacgcaggacgaaaatacagtgagcactagcctgggacactccaaggatgaaaactcaaaacagacttgtatcaggatcggaaccaagacgccaaagtccgattcctgtactcccacgaacactactgttgaggtagttggctcctccggccagaatggggatgagaagcagaatatcgtagcgaggaagatcgtaaaaatgactaaacagcccgctaaaaagaagcctccaccgagccgcgaaaaaaaagtgacgaggaccattctggccatcctccttgccttcatcatcacctgggccccatacaacgtgatggtattgatcaacacattctgtgcgccatgcattcccaacaccgtgtggactatcggctattggctgtgttacatcaacagtacaattaacccggcatgttatgcattgtgtaacgccacattcaaaaagaccttcaagcatctcctgatgtgccactacaagaacataggggctacgaggtag

SEQ ID NO: 218207 - DNA, 1773 bp, synthetic construct
  misc_feature 1..1773: note = Description of Artificial Sequence: Synthetic coding sequence
  source 1..1773: mol_type = other DNA
atgacgttacacaacaattctacgaccagtcctttgtttcctaacatttcttcatcttggattcacagccctagcgacgctggtctgcccccaggcactgtgacccattttggatcctacaatgtatcgcgagccgctgggaatttttcttccccagatggtaccactgacgatcctctgggcggacatacagtgtggcaggtggtattcattgcgttcctgaccgggatcctggccctagtcaccattatcggaaacatcttagtcatcgtgtctttcaaagtaaataaacagctcaaaacggtgaacaattactttcttttaagtctggcctgtgcagacctcattattggggtcatttctatgaacttgtttactacgtacatcattatgaaccgatgggctttggggaatctggcatgtgacctctggctggctattgattacgtcgctagcaatgctagcgtgatgaaccttctggttattagcttcgaccgctacttctctatcactagaccattgacgtaccgcgcaaaaaggaccacgaagcgggctggcgtaatgatcggtctagcctgggtaatttcctttgtgctgtgggccccagcaatcctattctggcaatactttgtcggcaaaagaacagtgccacctggggagtgtttcatccaatttctgagcgaacctacaatcacctttgggacagcaattgccgctttctacatgccggtgaccatcatgaccatcttatactggcgtatctacaaagaaaccgaaaaaaggaccaaagaactcgctggcttgcaggccagtggcactgaagccgaaacagaaaactttgttcaccctaccggctcttcgcgctcttgtagttcgtatgaattacagcaacagagtatgaaacgcagtaatcgccgtaagtacgggcgatgccacttctggttcaccaccaagagctggaagccttcgagtgagcagatggatcaggaccatagttcttcagacagctggaacaataatgacgcagctgcaagcttggaaaattcggcctcaagtgacgaagaagatattggaagcgaaactagggctatctattccatagtgctaaaactgcccggtcactccaccatacttaatagtacaaaactccccagttctgacaatctgcaggttcccgaggaagagcttggaatggtcgatctggaaagaaaagccgataaactccaggcccagaagagtgtcgacgatggcggtagttttccgaagagcttctccaaactccccatccaactggaaagcgctgtggacaccgccaagacaagcgacgttaactcctctgtcgggaagagcacggccaccctacccctgagtttcaaggaggctacccttgctaagcgctttgccctgaagacacgatcccagatcaccaaacgtaaacgaatgtctctagtcaaagagaaaaaagccgctcaaactttgtctgccatcctgctcgcgttcatcattacctggacaccctacaacattatggtcttggtaaacaccttttgtgactcatgtatccccaaaacgttctggaatttaggatactggctatgctatattaattccaccgtgaatccagtctgttacgccctctgtaataaaactttcaggaccacattcaaaatgctgttattgtgccaatgcgataaaaagaagcggcgaaagcagcagtatcagcagcggcagtctgtgattttccacaagcgcgcaccggaacaggccctctag

SEQ ID NO: 218208 - DNA, 333 bp, synthetic construct
  misc_feature 1..333: note = Description of Artificial Sequence: Synthetic coding sequence
  source 1..333: mol_type = other DNA
atgaccttgcacaataacagcactacaagcccactgttccccaatatcagcagctcttggatacatagtccttccgacgccggtttaccaccaggtaccgtgacacatttcgggtcctacaatgtatcaagagccgcaggcaattttagctcacctgacggcactaccgacgatcccttgggcggacacacagtgtggcaggtggtttttatcgctttcctcaccggcattctagcactggtcactatcatcggaaatatcctggtcatcgtgagcttcaaagtaaataagcagttaaaaacagtcaataattacttcctccttagcctgtag

SEQ ID NO: 218209 - DNA, 1440 bp, synthetic construct
  misc_feature 1..1440: note = Description of Artificial Sequence: Synthetic coding sequence
  source 1..1440: mol_type = other DNA
atggccaactttaccccagtcaacggctcttcgggaaatcagtcagtacggctagtcacttcctcctcacacaaccgctacgagaccgtggagatggtttttatcgccaccgtcacaggaagcctctcactggtgactgtggttggcaacattctcgtcatgctgagcataaaggtaaatagacagctacagacggtgaataattactttcttttctcactcgcgtgtgcagacctgatcatcggcgcatttagcatgaacctgtatactgtctacattattaaaggatactggcccctgggcgcagtcgtgtgcgacctatggttagccctggattatgtggtctccaacgctagtgtcatgaatttactcattatctcatttgacaggtacttctgcgtgaccaagccacttacatatccagcacgccgaaccactaagatggcaggattgatgatagcagctgcttgggtgctcagcttcgtgctatgggcacccgctatactgttctggcagttcgtcgtgggtaaaagaaccgtgccagataaccagtgttttatccagtttctgtcgaaccccgctgtgacattcgggacagccatagctgccttttacctccctgtggtgatcatgacagtcctgtatatccacatttcactcgcctcacgatcacgcgtccacaaacaccgccctgaaggaccgaaagaaaaaaaagctaaaactctcgcttttcttaagtcgccgctgatgaagcagagcgtcaaaaagccacccccaggggaagctgctcgggaggaacttagaaatggtaaacttgaagaagcaccgcctccagcattaccaccccctcccaggcctgtggctgacaaggacacttcaaacgaatcctccagtggctcagccacacagaatacgaaagaaagaccagccactgaactgtcaactacggaagccacaacccctgctatgcccgctcccccactgcagcccagagctctcaaccctgctagccgatggtccaagatccagatcgtcacgaagcagaccgggaatgaatgcgtcaccgctattgagatcgtgcccgctacgcccgcaggaatgagaccggctgcgaatgttgctcggaaattcgcatctatcgctcggaaccaggtgagaaaaaaacggcagatggctgcgagagaaaggaaggtcacaagaacaatttttgcgattctgctggcgttcattctgacatggaccccctacaatgtgatggtgttggttaatactttctgtcagagttgcatcccggacaccgtctggtcgattggttactggctgtgctacgttaattccacgattaatccggcttgttacgccctttgtaatgctacctttaaaaaaaccttcaggcatctgttgctgtgccagtacagaaatatcggaaccgcgagatag

SEQ ID NO: 218210 - DNA, 1599 bp, synthetic construct
  misc_feature 1..1599: note = Description of Artificial Sequence: Synthetic coding sequence
  source 1..1599: mol_type = other DNA
atggagggtgattcatatcataatgcaacaaccgtgaatggtacaccggtgaatcaccaaccgctagaaaggcacaggctgtgggaggtgataacgatagcagcagtgactgccgtggtctccctgattactattgtcggaaatgttctggtgatgattagctttaaggtgaactcccagctcaaaactgttaacaattattacttgctgagcctggcttgtgccgatctgatcataggtatcttcagcatgaacctatacactacgtatatcctaatgggtagatgggccctggggtctttggcctgtgatctctggttagcccttgactatgtggccagcaatgcttcagtgatgaatttgctggtgatctcctttgacagatacttcagtatcacccgtcccctgacttatagagcgaaacggacccctaaacgcgcaggcatcatgataggactggcatggcttatctcatttatactctgggccccagccattctttgttggcagtatttagtggggaagagaaccgtgccactcgacgagtgtcagattcaattcttgagtgagccaactatcacattcggaaccgcaatcgctgcattttatatccccgtttcagtgatgaccatcttgtattgtaggatctatcgagaaacagagaaaaggaccaaggacctcgccgaccttcaggggtctgatagcgtgaccaaggccgaaaaaaggaaaccggcacacagagctttgtttcgttcctgcttacggtgtccacggccaactttggcccaaagggaaaggaaccaggcttcctggtcgtcgtctcggcgatcaacctccacgacaggaaagcctagccaagccaccggcccatccgccaattgggctaaagcggagcagctcacaacatgcagctcctacccgagcagcgaagacgaagacaaacctgcaaccgatccagtcctgcaggtagtctacaagtctcagggaaaggagagcccaggggaagagtttagcgccgaagagacggaggagacattcgtgaaggcagagaccgaaaagagcgactacgatacccccaattacctgctgtcccccgctgccgcacacagacccaagtctcagaagtgcgtggcttataaatttaggctcgtggtaaaagcagatggaaaccaggagacgaataacggatgtcacaaggtcaaaattatgccttgtccatttcctgtggccaaagaaccaagtacaaagggcttgaatcctaaccccagtcaccagatgactaagagaaaacgcgtggtgcttgttaaggaacggaaagctgctcagaccctgtccgctattctacttgccttcatcatcacttggacaccctataacattatggttttagtctccactttctgtgataaatgtgtgcccgtgaccctctggcatctcggatactggctgtgctatgtcaactccaccgtaaacccaatctgctatgctctgtgtaatcggacatttcggaaaacctttaaaatgctgctcttgtgcagatggaagaagaagaaggtggaggagaaactctactggcaggggaatagcaagctaccatag

SEQ ID NO: 218211 - DNA, 1599 bp, synthetic construct
  misc_feature 1..1599: note = Description of Artificial Sequence: Synthetic coding sequence
  source 1..1599: mol_type = other DNA
atggagggcgatagttaccacaatgcaaccaccgtaaacggtacaccagtgaaccatcaaccactcgaacggcataggctgtgggaagttatcacgatcgcagccgtcaccgctgtggtaagcttgatcactatcgtcggaaacgtgctggtaatgatctctttcaaagttaacagccaactgaagacagttaacaattactatttactatccttagcctgcgccgacctcattatcggcattttctcaatgaatttgtacaccacatacatattgatgggtcgttgggccctggggtccctggcttgtgacttgtggctcgcactggactacgttgcgtctaacgcctctgtcatgaacctgctcgtgattagcttcgaccgctacttcagtataacccgaccgctgacataccgggcaaagcgaacgccaaaaagagcagggatcatgattggcctcgcgtggctcatctcatttatattatgggcgccagccattctgtgttggcagtatttggtcggcaagaggaccgttccgttggacgagtgccaaatacagttcttaagtgagcccactattaccttcggtactgctattgcagccttctatattcccgtgagcgtaatgacaatcctgtactgcaggatctatcgcgagaccgaaaagcgaacaaaagacctggccgaccttcagggcagcgattctgtgaccaaggctgagaaaagaaaaccggctcatcgggctctctttcgatcctgtctgcgctgcccgagacctacactggcgcagcgcgaaaggaatcaggcctcttggtcgtcgtcccgacgctctacctctaccaccggaaaaccttcccaggctaccggtccgtcagcgaactgggccaaagctgaacagcttacgacgtgttcttcatatccttcgagcgaggacgaagacaaaccagcaactgatccagtgctgcaagtagtttataaatcacaggggaaagagtcaccaggcgaagagttcagcgcggaggaaaccgaggaaacctttgtaaaggccgagactgagaaatcagattatgacaccccaaactatttactgtcccccgctgccgctcaccgacctaagtcacagaaatgcgtagcatacaagttccgactagtggtcaaagctgatggtaatcaggaaactaataacggatgccacaaggtcaaaatcatgccctgccccttccccgtggctaaggaacctagcacgaagggcctgaacccgaatcctagtcaccagatgacaaaaagaaaacgcgttgtgctcgtgaaagagagaaaggcggcacagaccctgagcgcaattctcttggcctttatcattacgtggaccccttacaacattatggtactggtctctacattttgtgacaagtgtgtccccgtgacattgtggcacctcgggtactggttatgttacgtgaattccacagtgaaccccatttgttacgcactgtgtaatcggacatttaggaagacctttaagatgctcctgctctgcaggtggaaaaaaaagaaggtggaggagaagctttactggcaggggaactcaaaattgccctag

SEQ ID NO: 218212 - DNA, 69 bp, synthetic construct
  misc_feature 1..69: note = Description of Artificial Sequence: Synthetic coding sequence
  source 1..69: mol_type = other DNA
atggaaggagacagctaccacaacgcaaccactgttaatgggaccccagtgaatcaccaacccctctag

SEQ ID NO: 218213 - DNA, 1449 bp, synthetic construct
  misc_feature 1..1449: note = Description of Artificial Sequence: Synthetic coding sequence
  source 1..1449: mol_type = other DNA
atggaaccctggccactgttgctgctcttctccctgtgttccgccggattagtcctcggtagtgaacacgagacacgccttgtagccaaactgtttaaggattactcttctgtggttagacctgtggaggaccaccgccaggtcgtcgaagttaccgtgggattacaactcatccaactcataaatgtggacgaagtaaaccagatagtgacaacaaacgtccgactcaaacagggggacatggttgatctcccacggccatcctgcgttaccctgggtgtacctctgttctctcacctgcagaacgagcagtgggtggattataatctcaagtggaaccccgatgactatggcggtgtaaagaaaattcacattcctagtgagaagatctggcgcccagacttggtgctgtataacaacgctgacggtgatttcgctatcgtgaagtttactaaggtcctgctccagtacactggccacattacatggaccccacctgctatctttaaatcctactgcgaaattatcgtgacacacttccccttcgacgaacaaaactgcagtatgaagctgggaacctggacttacgatggcagcgtggttgccatcaatcctgagagcgatcaacctgatctatctaattttatggagagtggggagtgggtcataaaagagagccgaggctggaaacacagcgtgacatacagttgctgccctgatacaccttacctcgatatcacataccacttcgttatgcaacggctgcccttgtactttatcgtgaacgttatcattccttgtcttctcttctccttccttaccggcctggtcttttatcttccaaccgacagtggtgagaagatgacgttgagcatatctgtgttgctaagcctcaccgtattcctcctggttattgtggaactaattccatcaaccagttccgcagtgcccctaatcggcaagtacatgttatttacaatggtttttgtaatagcgtctataatcatcaccgtcatcgtcattaatacccatcaccgctcccctagcacacatgtgatgccaaactgggttaggaaggttttcatagacacaatccctaatattatgttcttctctacaatgaagagaccatcccgggagaagcaggacaaaaagatattcacggaggacatcgacatctcagatattagcggaaagcccggacctccgccaatgggctttcacagcccattaattaagcacccggaagtcaagagtgctatcgaaggcattaaatacatcgcggagactatgaagagtgatcaggagtccaacaatgctgctgctgaatggaagtacgtagcaatggtcatggatcacatactgctcggagtgttcatgctggtgtgcattattggaacgctcgccgtgttcgctgggagactcatcgagctcaatcaacagggatag

SEQ ID NO: 218214 - DNA, 1374 bp, synthetic construct
  misc_feature 1..1374: note = Description of Artificial Sequence: Synthetic coding sequence
  source 1..1374: mol_type = other DNA
atggaaccctggcccctcctgctacttttttcattatgtagcgctgggctggttctgggaagtgagcatgaaacgaggttagtagcgaagctttttaaagactacagctctgtggtgagaccagtcgaagatcatagacaggtcgtcgaggtgacagtggggctccagctcattcagttgattaacgtggatgaggtgaaccaaatcgtgaccaccaatgtacgactgaagcagcagtgggtagactataacctgaaatggaatccagatgactatggcggagttaaaaagattcacatcccctccgagaaaatctggcgccctgaccttgtgctgtataacaatgcggatggcgatttcgccattgttaagtttactaaagtcctgctgcagtacacaggacacatcacatggaccccacccgctatcttcaagtcatactgcgaaatcattgtaacgcactttccattcgacgagcagaattgttctatgaagctgggcacctggacctacgatggatccgtagttgcgattaatcccgaatctgaccagccggatctgtctaatttcatggagtccggggagtgggttatcaaagagtctcgtgggtggaaacatagtgtgacatacagctgttgcccggacacaccttacctggatataacctaccattttgtgatgcagcgactgcccctgtatttcattgtgaacgttatcatcccatgtttgctgttctctttcctgactggtcttgttttttatctgcctactgattccggcgagaagatgacactcagtatttctgtgcttctgagcctcactgtgttccttctcgtgatcgttgagctgatcccttcaacatcatccgctgtgcctctaataggtaaatatatgcttttcacgatggtgttcgtcatcgccagcatcatcattacagtcattgtcattaacacccaccaccggagtccaagtacccatgtaatgcctaattgggtgcgaaaagtgtttatcgatactatccctaatatcatgttttttagcacaatgaaacgcccttctcgggagaaacaggacaaaaagatctttacggaagacatcgatatctctgatatttccggaaaacctggaccgccaccaatgggcttccactccccgcttattaagcatcctgaggttaaatccgctattgaaggcattaagtatattgcagagacaatgaagtcagaccaggaaagtaataatgccgcagcggaatggaagtatgtggccatggtgatggaccacattctgttgggagtgtttatgctggtatgcattatagggactctcgcggtgtttgccggaaggctgatcgagttaaatcagcaggggtag

SEQ ID NO: 218215 - DNA, 1353 bp, synthetic construct
  misc_feature 1..1353: note = Description of Artificial Sequence: Synthetic coding sequence
  source 1..1353: mol_type = other DNA
atggggttgcgcagccaccatctctcactgggacttctactcctattcctgctgccagctgagtgcctcggcgctgagggccgtctagccctcaaactgtttcgggacctattcgccaactatacctccgcccttcggccagttgccgatactgaccagacactgaatgtgacgctggaggtcactctctctcagattattgatatggatgaaagaaaccaggtcttaactctgtacctgtggattagacaggagtggaccgacgcatacctgaggtgggatcctaacgcttacgggggacttgatgcgattaggatcccctcaagcctggtgtggaggcccgacatcgtcctctataacaaggcagacgcccagcctcccggttccgcctccaccaatgtagtgcttaggcacgatggtgcggtgcgctgggacgccccagccataactcgctcatcctgcagggtggatgtcgcagcttttcctttcgatgcccagcactgtggccttaccttcgggtcatggactcatgggggtcaccagctggatgtgcgccctcgaggagcggcagcctccctcgcggattttgtcgaaaacgtggaatggcgtgtccttggtatgccagccaggagacgcgtgctgacctatggatgttgctccgaaccttacccagacgtaacttttacattattactacgacggagagccgcagcctacgtttgcaacttactgctgccctgtgtgctgattagtctgctcgcccctctggccttccatctgcctgcggactctggagagaaagtatcattgggcgtgacggttctattggcacttacagtgtttcagctgctgctggccgaaagcatgccccctgccgaaagcgtacctctgatcgggaagtattacatggctaccatgacgatggtaaccttttctactgccctcacaattcttatcatgaacctgcactattgcggcccttctgtgaggcctgtgcccgcatgggctagagccctccttctagggcacctggccaggggactgtgtgtccgcgagcgcggagagccttgtggacagtccaggccccctgaactgtccccatcacctcaatctcctgaaggaggtgcaggtcctccagccggtccctgtcacgaacctcgctgtctctgccggcaggaggcgctcctgcatcatgtggccaccattgccaacaccttcagatctcaccgagctgctcagcggtgccacgaggattggaaacgcctggctagagtgatggaccgcttcttccttgctatcttcttctcaatggctttagtaatgtctttgctggttttggttcaggccctctag

SEQ ID NO: 218216 - DNA, 1590 bp, synthetic construct
  misc_feature 1..1590: note = Description of Artificial Sequence: Synthetic coding sequence
  source 1..1590: mol_type = other DNA
atggggccatcatgccctgtgtttctatcttttacaaaactgtcgctctggtggctcctactgactcccgcaggcggtgaggaggcgaaaagaccgccaccacgagcgccaggcgatcctctctcatcaccgtcaccgacagccctccctcaggggggttcacatacagagacagaggatagattgtttaagcatcttttcagggggtataataggtgggccagacccgtgcccaatacgtcagacgtcgtcatcgtccgcttcggcctgagtattgctcagctgatagatgtggacgagaagaaccagatgatgaccaccaatgtctggctgaagcaggagtggtcagattacaagttgaggtggaaccctacggatttcggaaatattacaagtctgagagtaccaagcgaaatgatctggattcccgatatagtcctttataataacgccgacggcgagttcgctgtcactcacatgacaaaggcccacctgttcagtactggcacagtgcattgggtgccaccagctatttacaaatcttcctgttccatagacgtgaccttttttccctttgaccagcagaactgtaagatgaagtttgggtcctggacttacgataaggccaagatagatcttgaacagatggaacaaaccgtagatctgaaggattattgggaaagtggagaatgggccatcgtcaatgcaacagggacatataactcaaagaaatacgattgttgcgctgagatttaccccgatgttacttacgctttcgtgattcggagactgccactgttttacacaattaatctgatcatcccctgcctgttaatctcgtgtttgaccgtattggtcttctaccttccctcagactgcggagagaagatcaccctatgtatctctgtgctcctctccctcacggtctttttgctgctaatcaccgagattattccatccacaagcctggtcattcctctcattggagagtacctcctcttcacaatgatctttgttaccctatctatcgtgattactgttttcgtacttaatgttcaccatagatccccttctactcatacaatgccacactgggtacggggagccctgcttgggtgtgttcccagatggctccttatgaaccggcctccccctcctgttgaactttgtcatccattacggctgaaactatctcccagttatcactggctggagagtaacgttgatgccgaagagcgggaggtggttgttgaagaggaagatcgatgggcgtgtgccggacacgttgctccaagtgtgggaacgctgtgttctcacggtcacctgcatagcggggcttccggacctaaagccgaagccctgctccaggaaggcgagctgttgctgagtccacacatgcagaaggccctcgagggtgttcactatattgccgatcatcttaggtccgaggacgctgactcctccgtgaaggaggactggaaatacgtggccatggtgattgatcggattttcttgtggttgttcattatcgtctgttttcttggcactataggcctgtttttgcccccttttctggctggaatgatttag

SEQ ID NO: 218217 - DNA, 1590 bp, synthetic construct
  misc_feature 1..1590: note = Description of Artificial Sequence: Synthetic coding sequence
  source 1..1590: mol_type = other DNA
atgggcccttcatgtcccgtttttctgtctttcactaaactctccctgtggtggctgctgcttacaccggcaggcggagaagaagctaagcgaccaccaccacgggcacccggagaccccctctcttcgccctctcccacagccctccctcagggaggatctcatacagagaccgaggacagactatttaaacacctctttaggggctataaccggtgggccagacccgtgccaaacacgtctgacgtggtgattgttcgtttcggtctgagcattgcgcaactgatagatgtcgacgagaaaaaccaaatgatgactacaaacgtgtggttgaagcaggagtggagtgactataagctgcggtggaatcctacggattttggtaacattacttctctgcgggttccatccgagatgatctggatccctgacatcgtactatacaataacgctgatggagagtttgccgttacccatatgactaaggcacatctgttttcaactgggacagtgcactgggtgccacccgctatttacaagtcttcctgttccattgacgtcacattttttccattcgaccaacagaactgcaagatgaagttcggatcctggacctatgataaggctaagattgatctagagcagatggaacagaccgtcgatctgaaagactactgggagagtggcgaatgggccatagtaaacgcaactgggacttacaatagtaagaaatatgactgttgtgctgagatctatcccgacgtaacctacgcttttgtcatcagacggctgcctttgttctatacaatcaaccttatcattccctgcctgctgatttcttgccttacagtgctggtgttttacctgcccagtgattgtggtgaaaaaatcactctgtgtattagcgtcctactgtctttaaccgtttttcttttgctgatcaccgagatcatcccgagtacgtccttggtaatccctttgatcggcgaatatcttctattcactatgatcttcgttacattgagcattgtgatcaccgtgtttgtattgaatgtccaccatcgaagcccatctacccacacaatgccccactgggtgaggggagccctgctgggatgtgtccctcggtggctgctgatgaatagaccccctcctccggtggagctctgccaccctctccggcttaagctgtccccaagttatcattggctagaaagcaatgttgatgccgaagaaagagaggtagtcgtcgaagaggaggacaggtgggcttgtgctggtcacgtcgcacccagcgtcggaacgctctgctctcacggccatctccatagtggagcttcagggccaaaagctgaggcgctgctccaagaaggggaactgctactctccccacacatgcagaaagccttagaaggggttcattatatcgccgaccaccttcggagcgaggatgccgacagttccgtaaaggaggattggaagtatgtggctatggttatcgatcgcatttttctatggctgtttattatcgtctgtttcctcgggacaatcggactctttttgccaccatttcttgctggtatgatctag

SEQ ID NO: 218218 - DNA, 1518 bp, synthetic construct
  misc_feature 1..1518: note = Description of Artificial Sequence: Synthetic coding sequence
  source 1..1518: mol_type = other DNA
atggggtccggccctctgagtctgcctctggctctgagcccccctagactgttactgctgctcctgctcagcctgctaccagtagccagagcatctgaagccgagcatcgactgtttgagcggctgtttgaagactataacgagattatccggccagtcgcaaatgtcagcgaccccgttattatccactttgaagtgagtatgtcacaactggtgaaagtcgatgaagtcaatcagatcatggaaaccaacctgtggcttaaacaaatctggaacgattataagctcaagtggaatcctagcgactatgggggagctgagttcatgcgggtgcccgcacagaaaatctggaagcccgacatcgtcctgtacaacaacgcagttggcgacttccaagtggacgataagaccaaggccctgttgaaatacacaggcgaggtcacctggatacctccggcaattttcaagtctagttgcaaaattgatgtgacctactttccttttgattaccagaactgcaccatgaagttcggatcctggagctatgataaagccaagatcgatctcgtcctgattggcagctccatgaatcttaaagactattgggagtccggggagtgggctatcataaaggcaccaggttacaagcatgacattaaatataattgctgcgaagagatttatccagacatcacttatagcttgtatatcaggcggctgcccttgttttatactatcaatctcatcatcccctgtttgctaatatctttcctgacagtcttggtgttttatctccccagtgactgtggggagaaagtgacgctgtgcatatcagtccttctgtccttgactgtgtttctgctggttattaccgaaaccatcccatctaccagtttagtaatccccctgattggcgagtaccttctgtttacaatgatctttgtcactttgtcaatcgtgattacggtcttcgtcctgaacgtacattaccgcacaccaaccacccacaccatgccgagctgggtcaaaaccgtgttcctgaatcttcttccacgcgtgatgttcatgactagaccgacttcaaatgaaggcaacgcccaaaaaccacgccctttatacggcgcagagttatctaacctgaattgcttctctcgtgcagaaagcaaaggttgcaaggagggctacccttgtcaggacggaatgtgcggttattgtcaccatcgccgtatcaaaatctctaatttttcagcgaatctgactcggtccagttccagcgaatctgtagacgcggtgttgagcttatctgcactgagccctgaaattaaagaggcaatccagtccgtgaaatatattgcagagaatatgaaagcacagaacgaggcgaaagaaatccaagatgattggaaatatgttgcaatggtgatagacagaatctttctgtgggtatttacattggtttgtatcctcggtaccgctggtctctttctgcagcctctgatggcacgcgaagacgcctag

SEQ ID NO: 218219 - DNA, 939 bp, synthetic construct
  misc_feature 1..939: note = Description of Artificial Sequence: Synthetic coding sequence
  source 1..939: mol_type = other DNA
acaaaggccctgttgaagtataccggagaggtaacctggattcccccagcaattttcaagagcagctgtaagattgacgtaacatactttccatttgattaccagaactgcaccatgaagtttggcagctggagttacgacaaggcaaaaattgatctggtgctcataggatcatcaatgaacctgaaggattactgggaatcaggggagtgggctattattaaagccccagggtataaacatgacatcaagtacaactgctgtgaggagatttacccagatatcacctactccctgtacatccgtaggctgcccctgttttacacgatcaatctcattatcccatgcttactgattagcttcctcaccgttttggttttttacttaccgtctgactgtggcgagaaggtgaccctgtgcattagtgtgctgctaagtctgacagtgttcctgctggtgatcactgaaaccattccaagtacctctcttgtgattcctctaataggggaatatctgttgttcacgatgatttttgtgacccttagcatcgtgattacagtctttgtattaaacgtgcattacagaaccccaacaactcatacaatgccctcttgggtgaagacagtgtttctcaacttattgccacgtgttatgttcatgacgcgccctacaagtaatgagggcaatgcccagaagccaagaccgctgtacggagcaagtcctaaggccgcaaggcgggagattaaagaagcgatccagagcgtgaagtatatcgcagagaacatgaaggcgcagaatgaagccaaagaaatccaggatgattggaagtacgtcgctatggtgatagaccgcatttttctttgggtgtttaccttagtttgcattcttgggactgctggactcttcttacaacctctgatggccagagaggacgcctag

SEQ ID NO: 218220 - DNA, 1470 bp, synthetic construct
  misc_feature 1..1470: note = Description of Artificial Sequence: Synthetic coding sequence
  source 1..1470: mol_type = other DNA
atgggctctggtcctctgagtctgcccttggccctgtcgcctcccaggttactcctgctgctgttgttgtcccttttgcctgtggcccgtgcatccgaggcagagcataggctctttgaacgactgttcgaagattacaatgaaatcattaggcccgtggcaaacgtgagcgatcctgttatcatacactttgaagtctccatgagtcagctggtcaaagttgatgaagttaatcagatcatggaaaccaatttatggctgaaacagatctggaatgattacaaactgaaatggaatccttcggattatggtggagcggaattcatgcgggtccctgcccagaaaatttggaaacccgacatcgttctgtataacaacgccgtgggcgacttccaagtagacgacaagaccaaagcgttgttgaaatacacaggagaggtcacctggataccaccggcaatctttaaaagctcctgcaaaatcgacgtgacctactttccatttgactatcagaactgcacaatgaagttcggttcctggtcctacgacaaggccaagatcgatctggtgctgataggaagctccatgaatctgaaggactactgggaaagcggcgagtgggccatcataaaagcccctgggtacaagcacgatatcaaatataattgctgcgaggagatctaccccgacatcacttactccttatatattcgccgtctccccttattctatacaataaacctgattattccttgtcttctcatcagcttccttaccgtgctagtcttctacctcccttcagactgtggagagaaggtgactctttgcatctccgtgttgctgagcctgaccgttttcctcctggtcatcacagagacaattccaagcacgtcactagtgattcctttgatcggcgagtacctgcttttcaccatgattttcgtgactctatctattgtgatcacagtgtttgtgctgaatgtacattatagaacccctacgacccacactatgccatcatgggttaagacggtgttcctgaatcttctgccacgtgtcatgttcatgaccaggccaacatccaacgaagggaacgctcagaaaccccgtccactctacggtgccgagctgtctaatctaaactgcttttccagagccgagagtaaaggctgcaaggaaggctacccttgccaggatggaatgtgcgggtactgccatcatcggcgaatcaaaatttcaaatttctccgccaatctcacgcgctcaagcagctccgaaagtgtggatgccgttctgtcgctgagcgcactctccccagagattaaggaggccatacaatcagtaaagtatattgctgaaaatatgaaggcccagaacgaggctaaggaagaacagaaggcccaagagatacagcaattgaagcgaaaagagaaaagcaccgagacttctgaccaggaaccaggattgtag

SEQ ID NO: 218221 - DNA, 1518 bp, synthetic construct
  misc_feature 1..1518: note = Description of Artificial Sequence: Synthetic coding sequence
  source 1..1518: mol_type = other DNA
atgggttcgggacccttgagcctgcctttggctctgagtcccccacgccttctgttgctgctgttgctaagcctgcttcctgttgccagggcttcagaagcagaacaccggctcttcgaacgcctcttcgaggattacaacgagatcattaggcccgtggccaacgtgtccgacccggtcatcatacatttcgaagtgagtatgtctcagctggttaaagtcgatgaagtgaaccagatcatggaaacaaatctatggcttaaacagatttggaacgattacaaattgaagtggaatccctctgattatggcggagccgaattcatgcgggtgcctgcacagaaaatctggaaacctgacatcgtcctgtataacaacgcagtcggtgatttccaggtagacgataaaacgaaagcattactgaaatatacgggtgaggttacttggatccccccagcgatctttaaatcttcgtgtaaaatcgacgttacgtacttccccttcgactaccagaattgcactatgaaattcggtagctggagttatgataaggcaaaaatcgacctggtcctgatcgggtcgtcaatgaacctgaaagattactgggaatctggagaatgggcaattattaaggcacccggttacaagcatgacattaagtacaactgctgcgaggagatctaccccgatataacatatagcttgtatatccggcgtctgcctttgttctacacgatcaacctgatcattccatgcctcctaatctcatttctgactgtgcttgtgttctaccttccaagcgactgcggggagaaagtgactctgtgcatatcggtgcttctttccctgaccgtgttcctgctcgtcatcacggaaaccattccttcaacatccctggtgatccctcttataggagaatatctgctatttacaatgatcttcgtaactctgagtattgtgattacagtgttcgtgctcaacgtacattaccgcacgcctaccactcacactatgcctagctgggtgaagacagtgttcctcaacctgctgcctcgggtcatgtttatgacgcgtcccacaagcaatgagggcaacgcccaaaagccacggccattgtacggcgcagaactgagcaaccttaactgtttttcaagagccgagagcaagggatgtaaggaaggatacccctgtcaggatggcatgtgtggctactgtcatcacaggagaatcaaaatttccaattttagcgcaaacctgacgaggtccagtagttctgagagcgtggatgcagtgctgagtctctccgctctgtccccggagatcaaagaggccatacagtctgttaaatacatcgcagaaaacatgaaggctcaaaacgaggccaaggagatacaggacgattggaagtacgttgccatggtgatcgaccggatcttcctgtgggtatttactcttgtatgtatccttggtactgcagggctgttcttacagcccctgatggccagagaagacgcatag

SEQ ID NO: 218222 - DNA, 1602 bp, synthetic construct
  misc_feature 1..1602: note = Description of Artificial Sequence: Synthetic coding sequence
  source 1..1602: mol_type = other DNA
gccccagagcctggcgaggcgcctcggctggatagggcccaccctgggtgcgcctgtgctgagctttctctgctgtggctgtgctgttgcactttcacgagtgctgacggtgatttcgcagttacccacctgaccaaagcccacctcttccacgatggaagagtccagtggaccccacctgcaatctataagagcagctgctccatcgatgtgacatttttcccatttgatcagcagaactgtactatgaaattcggctcttggacctatgataaagctaaaatagatctggtcaatatgcattccagggtagaccagctggatttctgggagtcaggcgagtgggtcattgtggacgccgtagggacctacaacactaggaaatacgaatgttgtgccgagatctatccagatatcacatacgcatttgttattcggagactgcccctattctataccatcaatctcatcataccctgtctgctcatctcctgcctcactgtgctggtcttctatctcccctcggagtgcggggagaaaatcacactttgcattagcgtactactctctctcacggtgttcctgttgcttataacagagataatcccatcgactagccttgtgatcccattaattggggagtatctccttttcacaatgatatttgtcaccttgagcatcgttatcactgtctttgttcttaacgtccatcaccgctctccacggacccacaccatgcctacgtgggtgcggagagtattccttgacatagtcccacgcttattgctgatgaagagaccatccgtggtcaaggacaactgccgtagactgattgagtccatgcacaaaatggcttccgcacccagattttggcccgaaccagagggcgagccgccagcaactagcgggacgcagagcctgcatccaccctccccttcattctgtgttccactcgatgttccagcggagcctggtccctcttgcaagagcccaagtgaccagctgccaccccaacaaccccttgaggccgagaaagcctcacctcacccttctcccggaccatgtagacctccccatggcacccaggctccagggcttgctaaagccagatcattaagtgtgcagcacatgagcagccctggagaagccgtggaaggtggggtaaggtgcaggagcaggtccatacagtattgcgtccctagagatgacgctgcgcctgaggccgacggccaggctgcaggcgcactggctagccgaaatacacattccgccgaactgcccccaccagaccagccctcgccttgcaagtgcacatgcaaaaaggagccatcttccgtgagtccttcagcaacggtgaagacgcgttccaccaaagcccctcctcctcatttgccgctatcaccggctctcacacgcgcagtagaaggggtgcagtacatagcagatcatctcaaagccgaggacacagacttctccgtcaaggaggactggaagtacgtggctatggtcatcgatcgtatttttctgtggatgttcatcattgtgtgtctgctcggaaccgttgggctgttccttccaccatggcttgctggtatgatctag

SEQ ID NO: 218223 - DNA, 1884 bp, synthetic construct
  misc_feature 1..1884: note = Description of Artificial Sequence: Synthetic coding sequence
  source 1..1884: mol_type = other DNA
atggagcttggaggacccggagcaccacgccttctgccccctcttctgctgctcttgggcacagggttactgagagcttcttcacatgtagagacccgggcacacgccgaggagaggctcttaaagaagctattctcgggttacaacaaatggtcccgccctgtggccaatatctctgatgttgttttagtacgttttggactaagtatcgcgcagctcattgatgtggacgaaaaaaatcagatgatgacaacgaatgtctgggtcaagcaagagtggcacgattataaattgcgatgggatcccgcagactatgaaaacgtgacctctatccggatacccagtgagctcatatggcgccctgacatcgttctgtataataacgcagacggggacttcgccgtgacacatttaacgaaggcgcacctatttcatgacggccgagtccagtggactcctcctgctatctacaagtcttcttgttctatcgacgtcaccttttttcccttcgatcagcagaactgtactatgaagtttggttcttggacctacgataaagccaagattgacctagtgaatatgcattcacgtgtggaccaactcgacttttgggagtcgggagaatgggtaattgtcgatgcagtgggaacttataataccagaaaatacgaatgttgcgccgagatctatcctgacattacttatgcttttgttatccgcagattgccacttttctacacaattaatctcattatcccgtgtctgcttatctcatgtctgactgttctcgtgttttacctcccatctgagtgtggcgagaagattacgctctgcatttctgtgcttctctctctcaccgtctttttgcttctgatcacagaaatcattccttccacctccctggttataccgttaattggcgagtatctcttgttcacaatgatatttgtaacgctgagtatagtcattaccgtgtttgtcctcaacgtccaccatcggtccccaagaacacacaccatgcccacatgggtgcggagagttttcctggatattgtcccgaggctgctgctgatgaagcgcccaagcgtagtgaaggataactgcagaagattgatagaatcaatgcacaagatggcatccgcccctcgcttctggcccgaaccagagggggagccgccagcaacttccggcactcaaagcctgcatcctccctcaccctccttctgtgttccactcgacgtgccagccgaacccggaccctcgtgcaagtccccctcggatcaattgcctccacagcagcctttagaggccgaaaaagccagcccccacccttcccctggcccttgccgtcctcctcatggtacacaagccccagggctcgcaaaagctcggagtcttagtgtgcagcatatgtcctctcccggagaggcagttgaaggtggggtccgctgtagaagtcgctccatccagtactgtgttccgagagatgatgcggctccagaagccgacgggcaggccgcaggggcacttgccagccgaaacacacactcagcagaactgccccctcccgatcagccaagcccatgcaaatgcacctgtaaaaaggagcctagcagcgtttctccgtccgcaaccgtaaaaactcgttctacgaaggcccctccaccacacctccccttgagccctgcacttactagagccgttgaaggggtgcaatacatcgctgatcatttgaaggccgaagataccgactttagcgtgaaagaagactggaaatatgtggccatggtcatcgatagaatttttttgtggatgtttattatcgtgtgtctcctggggactgtgggtctttttctcccaccttggctggccggaatgatttag

SEQ ID NO: 218224 - DNA, 1671 bp, synthetic construct
  misc_feature 1..1671: note = Description of Artificial Sequence: Synthetic coding sequence
  source 1..1671: mol_type = other DNA
atgcgcatgagcccccctagtgccagccctccctccagcagcggaggccgaacgagtagttctactacaactgccggagagcccttttgggctggcgtgctgtttgctatcaggccccaccccggactctctggcagaattgtgtggaccgcaggctgcccaggagagggagccgatggagattttgccgtcacacacttgaccaaggctcatctgtttcacgacgggagggtccagtggaccccccctgccatctacaagagctcctgcagtatcgacgttactttttttccgttcgatcaacaaaactgcacaatgaagtttggatcttggacttatgataaggctaagatagacctggtcaacatgcactcaagggtggatcagctggatttttgggagtcgggggagtgggtgatcgtggatgcagtggggacctataatacacgcaaatacgaatgctgtgcagaaatatacccggatattacctatgccttcgtgatcaggcgactcccactcttttataccattaacttaataatcccgtgcttgttgatatcatgcctgacggtgctggtgttttacctgccatccgagtgcggcgagaaaattactctttgcatcagcgttctcttatctctgacagtgttcctgttactgatcaccgaaatcatccctagtacgagtctggtaatcccacttatcggtgagtatctgcttttcaccatgatttttgtgactctgagcatcgttatcacggtgttcgtgcttaacgtgcatcacaggtccccaaggacgcacaccatgcctacatgggtgaggcgggtttttctggatattgtaccaaggctcctgttgatgaaacgcccttcagttgtaaaagacaactgtcgtaggctgattgagtctatgcacaaaatggctagcgctccccgtttctggcctgagcctgaaggagaacccccagcaacctccggcacccagtctctgcacccccctagcccttctttctgcgtgccgctggatgtccccgctgaaccaggaccgtcttgcaagtcccctagcgatcagctgcccccacagcagcctctggaggcagagaaagcctcacctcacccctctccaggcccatgtaggcctccgcacggcacacaggcacctggtctggcgaaagccaggtccctaagtgtccagcacatgagctcacccggtgaagctgtggaaggcggagtgcgctgccggtcccgctccattcagtactgcgtgcccagggatgatgcagcccctgaagcagatggtcaggcagcaggcgctctggcgtcaaggaatacacattccgctgaattgcccccacccgaccagccctcaccgtgcaaatgcacctgtaagaaagaaccatcatcagtaagccccagcgccaccgtcaagactagaagcacaaaggcccctccaccacacttgccactcagccccgctctaactcgagccgtggaaggcgtccaatatatcgctgatcacttgaaagccgaggacaccgacttcagcgtgaaggaagactggaagtacgtcgccatggttattgatcgaattttcctgtggatgttcatcattgtgtgcctgctggggactgtgggactcttcctgcccccttggctggcgggaatgatctag

SEQ ID NO: 218225 - DNA, 1407 bp, synthetic construct
  misc_feature 1..1407: note = Description of Artificial Sequence: Synthetic coding sequence
  source 1..1407: mol_type = other DNA
atggctgccagaggcagtggcccacgggcactgcgtttactgctcttggtgcagttagttgctggtaggtgcggacttgcaggagctgccggaggagctcaacggggtctgtccgagccttccagcatcgccaagcatgaagatagcctgcttaaagacttgtttcaggactatgaaagatgggttcgtccggtggaacatctaaatgataaaattaagatcaagtttggcctcgccatttcccagttggtggacgtcgacgagaagaatcagctgatgaccaccaacgtctggctgaagcaggaatggattgacgtaaagttgaggtggaacccggatgactacggcggaatcaaggtgatccgcgtcccctcggattccgtgtggacaccagatatagtcttgtttgataacgccgatgggcgttttgaaggaacatcgaccaagaccgtgatccgctacaatgggaccgttacttggacgcctcctgccaattacaaatccagctgcactatcgacgtcactttcttcccctttgacttgcagaattgttcaatgaagtttggtagctggacgtatgatgggtcacaggttgatatcatcttggaggaccaggatgtggataaaagggacttctttgataacggcgaatgggaaattgttagcgccaccgggagtaagggaaatagaaccgacagttgttgctggtatccatacgtgacctacagttttgttatcaagagactgccactcttctacactctgttcctgatcataccttgtattggcttgagctttctaactgtcttagttttttatctgcccagcaatgagggggagaagatctgtctgtgtacttcagtcctggtatccctgacagtcttcctcctcgtgatcgaggagattatcccttcttccagcaaggtgattcctctgatcggtgagtacctagtgttcaccatgattttcgttaccctctctattatggtgactgtgtttgctatcaacatacaccatcgatcctctagcacccacaacgctatggcgccactggtgcggaagatctttctccacactctcccaaaacttctttgtatgcgatcacacgtggatcgttacttcactcaaaaggaagagaccgaatccggctctggacctaagtcttctcgaaataccctcgaggccgcactggacagtatccgctacatcaccagacacattatgaaagagaacgatgtgcgcgaggttgttgaggattggaagtttatcgcacaagtcttggatcggatgtttctatggacgtttctctttgtgtcaatcgttggctccctgggactctttgttccggtgatttataagtgggcgaacatcctgatacctgttcacatcggcaatgctaataaatag

SEQ ID NO: 218226 - DNA, 1485 bp, synthetic construct
  misc_feature 1..1485: note = Description of Artificial Sequence: Synthetic coding sequence
  source 1..1485: mol_type = other DNA
atgctgacatctaagggacagggatttctgcacggcggtctgtgtttgtggctgtgtgtgtttacgcccttcttcaagggctgcgtagggtgtgctacagaggaacgcttgttccataagctgttctcccattataaccagttcatcaggcccgtggaaaacgtctctgatccagtaacggttcactttgaggttgctattacccagctcgccaatgttgacgaagtcaatcagatcatggagaccaatctctggcttcgacacatttggaatgattacaagttgcgctgggacccaatggaatatgatggaatcgaaactctccgggttcccgctgacaaaatctggaaacctgacatcgtactatacaataatgcggtcggggactttcaggttgaagggaagactaaagccctgctgaagtacaacggtatgattacatggacccctcccgctatctttaaatccagctgtcccatggacatcactttctttccttttgatcaccagaattgtagtctgaaatttggttcctggacctacgacaaagccgagatagaccttttaataataggctccaaggtcgatatgaacgacttctgggagaacagtgagtgggaaatcatcgatgcgtccggctacaaacatgacattaaatacaattgttgcgaggagatttataccgacatcacttactctttctatatcagaaggctgcctatgttttacacaatcaatcttatcattccctgcttatttattagtttcctgacggtgctggtgttctacctgccaagcgattgtggggagaaagtcacgctgtgtattagtgtgctgcttagcctgactgtctttttgctagtcattacagaaacaatcccgagcacgagccttgtcgtcccactggtaggcgagtacctactgtttactatgatattcgtgaccctgtcaattgtggtgaccgtgttcgtgttaaacatccactatcgaaccccaaccacgcacacaatgcctcggtgggtgaagaccgtcttcctgaagcttcttcctcaggtgttgcttatgcgctggccactggacaaaacacggggtactggcagtgatgcagtgcctcgtggattggccaggagacccgctaaagggaaactggcttctcatggggagccaagacatcttaaagagtgtttccactgccataaatctaatgaattggcaacctccaaacgccgactgagccaccagccactgcaatgggtggtggagaattccgagcatagcccggaggtggaagatgttataaactcagttcagttcatcgccgaaaatatgaaatcccataacgaaaccaaggaagttgaagacgattggaaatacgtcgcaatggtagttgacagagttttcctgtgggttttcatcatcgtgtgcgtgtttgggactgctgggctgtttctgcagcccctgctcgggaatactgggaaaagttag

SEQ ID NO: 218227 - DNA, 1440 bp, synthetic construct
  misc_feature 1..1440: note = Description of Artificial Sequence: Synthetic coding sequence
  source 1..1440: mol_type = other DNA
atgcttacctcaaaaggccagggctttctgcacggcggattatgtctgtggctgtgcgtgttcacacccttctttaagggctgcgtgggatgtgcgacggaggagagattatttcataagctcttttcacactacaatcaatttatcaggccagtggagaatgttagcgatcccgtcaccgttcactttgaagtggccataactcagcttgccaatgtcatatggaacgactacaagctgcgctgggatcctatggagtacgatggcattgagactctgagggtgcccgctgataagatctggaaaccagatatcgtgttgtacaacaacgcagtcggagattttcaggtggaggggaagaccaaggcactgctgaaatataatgggatgatcacgtggacacctcccgcaatattcaaatcatcgtgccccatggacatcacgttctttccctttgatcatcagaactgctctctcaagtttggtagctggacctatgacaaggcagagattgacctcctcatcattggttccaaagtcgacatgaacgacttctgggagaactccgagtgggagattatcgacgcaagtggttacaagcacgacattaaatataactgctgtgaggaaatctatacggacattacatatagcttttacattaggcggttgcccatgttttatacgattaacctgattataccttgcctgttcatctcttttctgactgtgctggtgttctaccttccgtccgactgcggggagaaggtgacattgtgtatctcggttctgctctccctgactgtttttctcctggtgattaccgaaactatcccatccaccagcctcgtcgtaccccttgttggggagtatctcctgtttacaatgatctttgtcacactcagcatcgtggtgacagtgttcgtcctgaatattcactacagaactccaactactcacacaatgccaaggtgggtgaaaacagtttttcttaaactcttgccacaggtgcttctgatgcgatggccactggacaaaaccagggggacggggtcagacgctgttccgagaggcctggccagacgcccagccaagggaaaactggctagtcacggtgagccgagacacctgaaagaatgtttccattgtcataaaagcaatgagcttgctactagcaaacgacgactgtctcaccagcctttgcagtgggtcgtcgagaactcggaacatagtccagaggttgaagacgtgatcaatagcgttcaatttatcgcggaaaacatgaagtcacataatgagaccaaagaggtagaggacgattggaaatatgtagctatggtcgtggaccgtgtgtttttgtgggtgtttattatcgtgtgcgtgttcgggacagccggactgtttctgcagcctctgctcggaaatactggcaagtcctag

SEQ ID NO: 218228 - DNA, 1509 bp, synthetic construct
  misc_feature 1..1509: note = Description of Artificial Sequence: Synthetic coding sequence
  source 1..1509: mol_type = other DNA
atgaggtgtagcccaggtggagtctggttggcccttgcggctagcctgctgcacgtgtccctgcagggagagtttcagagaaaactttacaaggagttagtgaaaaattacaatcccctggagagacctgttgcaaacgactctcagcctttgacagtgtacttctccttgtcactgttacagattatggacgtcgacgagaagaatcaggtgttaacaactaatatttggctccagatgagctggactgaccattatcttcagtggaatgtctccgagtaccccggtgtgaaaacagtgcgtttcccagatggccaaatatggaaacctgacattctcctgtacaacagcgcagatgagaggttcgatgctacatttcacactaacgtattggtcaattcttcaggccactgtcagtacctccccccaggtatcttcaagtcaagctgttacatcgatgtgcgctggttcccattcgacgtgcagcattgtaaactgaagttcggctcctggtcttatggtggctggagcttggacctgcagatgcaagaggcagacatcagtggctatattccaaacggtgagtgggacttagtgggtatcccaggaaaaaggagtgaacgtttctatgaatgctgcaaggaaccctaccccgatgtgacatttaccgtgacaatgcggcgtcgcaccttatattatggcctcaacctattgatcccatgcgtgctcattagtgctctcgctctcctggtcttcttgctgcccgctgatagtggtgagaagatatctctgggcataaccgtgttgctttcgctgaccgttttcatgctccttgttgcagaaattatgcccgcaacatcggacagcgttccactcattgcgcagtacttcgcttcgacaatgattatcgtaggcctgagcgtagtggtcactgtgatcgttttgcagtaccatcaccacgaccccgacggaggcaagatgcccaaatggacgcgagttattcttctcaactggtgcgcctggttcctgaggatgaaacgccctggcgaagataaggtacgcccagcatgccagcataagcaacgtagatgtagtctggcctctgttgagatgtcagccgtcgcgcctccgccagccagtaatgggaacctgctttacattggctttcggggtcttgacggtgtgcattgtgtcccaacccccgactctggtgtcgtttgtgggaggatggcctgcagtcccacccacgatgaacatctgctccacggcggtcaaccaccagagggagaccctgatctcgcaaagatcttggaggaagtgcgatacattgcaaacagatttaggtgccaggacgaatcagaggcagtttgcagcgaatggaaatttgcggcttgcgtcgtggatcgcctctgtctcatggctttctcagtgtttaccatcatctgcacaatagggattctaatgtcggctcccaacttcgtagaggcagtgagtaaggactttgcgtag

SEQ ID NO: 218229 - DNA, 210 bp, synthetic construct
  misc_feature 1..210: note = Description of Artificial Sequence: Synthetic coding sequence
  source 1..210: mol_type = other DNA
atgcagaagtactgtatttaccagcacttccagttccagttactaatacaacacctgtggatagcagcaaactgcgatatctgggctaaagtagctcgggtgatcggactactggcttcacacaaaactgaccttcaagaaaacacccccgttgtggaggctttccccaactccccacgaaccccaacactacctggggtgctgacatag

SEQ ID NO: 218230 - DNA, 1239 bp, synthetic construct
  misc_feature 1..1239: note = Description of Artificial Sequence: Synthetic coding sequence
  source 1..1239: mol_type = other DNA
atgcaaaaatactgtatctatcaacacttccagtttcagctcttaatccagcatctgtggatcgctgccaattgcgatatcgcagacgaacgctttgatgctacatttcacaccaacgtgctggtcaactcttcagggcactgccagtacctcccacctggtattttcaaaagtagttgctatatcgacgtcaggtggtttccttttgatgttcagcactgtaaattgaagttcggatcttggtcttacggtgggtggtctctcgatctccagatgcaggaggcagacatctcgggttatattcccaatggagagtgggatctcgtggggatccctgggaagcggagtgagaggttctacgaatgctgcaaggagccttatcccgatgtgaccttcactgttactatgcggagacggaccctttattatggactaaacctgctgattccatgcgtgctcatatcggcactggctctcctggtctttcttctaccggcagactctggcgaaaaaatctccctcggaattacagtgctgctttctttaaccgtctttatgctgctcgtcgctgaaattatgcctgccacgtcagactccgtgccgctcatagcgcagtacttcgcctccacgatgataatcgttggccttagcgtcgtagtcaccgtgattgttctgcaataccaccaccacgacccggatggtggcaagatgcctaaatggactagggtgatcttgctgaattggtgcgcgtggtttctcagaatgaaacgaccaggggaagacaaagtgcgaccagcctgtcagcataaacagagacgatgctcactagcctcagtggagatgtcagccgtcgctcccccaccagcaagcaacggaaatcttctgtatatcggatttcggggactagatggtgtgcattgcgtacccacaccagattcgggagtggtctgtggaagaatggcctgtagtcccacccacgacgagcatcttctccacggcggacagccgcctgagggcgacccagacctggcaaagatattggaagaagttagatacatcgccaaccggtttcgatgtcaggatgagtctgaggcagtgtgttctgagtggaaattcgctgcgtgcgtcgttgataggttgtgcctgatggcctttagtgtgtttaccatcatctgcactattgggatactaatgagtgcgcctaacttcgtggaggcagtgagtaaggatttcgcttag

SEQ ID NO: 218231 - DNA, 447 bp, synthetic construct
  misc_feature 1..447: note = Description of Artificial Sequence: Synthetic coding sequence
  source 1..447: mol_type = other DNA
atgaggtgctccccagggggtgtgtggcttgcactagccgctagtctcttgcatgtgtcactacaaggggaatttcagaggaaattgtacaaagagcttgtcaaaaactataaccccctggaacgccctgtagcgaatgactcccagcctctaaccgtatacttctccctgtcactgctgcagatcatggacgtggacgaaaaaaaccaggtgctgaccaccaacatctggctgcagatgtcttggacagatcactacctgcagtggaatgtgagcgaatacccaggggttaaaaccgtgcgcttcccagatggccagatctggaaacctgatatactgctctacaacagctcatacgatcagcaacaagaggtgctcgcttatgggatgcattgttggtcgcctcagttcggcccaacatcttcttccatgtttcctgttgtatag

SEQ ID NO: 218232 - DNA, 600 bp, synthetic construct
  misc_feature 1..600: note = Description of Artificial Sequence: Synthetic coding sequence
  source 1..600: mol_type = other DNA
atgactaattcccgcaaatgctggccaatgggctgcacggccggtgcccatagcctcgatccccatccacggctgtgtagtttgttatgcatcggagaattttgtgggagggacggatgttccgccgacgagagatttgatgctaccttccacacgaatgtcttggtcaatagtagcggccactgccagtacctgcctccaggcatcttcaagtccagttgttatatagatgtgagatggttcccattcgacgttcaacactgtaaattaaagtttgggtcatggtcatacggcggatggtccctggacctgcaaatgcaggaagccgatatttccggctacatccctaacggtgaatgggatcttgtgggaattccaggcaaacggtccgagcgtttctatgagtgctgcaaggaaccttacccagacgtgacattcaccgtgacaatgaggagaagaactctgtattacggattgaacttacttattccttgtgttctcattagtgccctggccctgttagttttccttcttcctgccgattccggggaaaaaataagccttggcatcaccgtactgctctccttgacagtgttctag

SEQ ID NO: 218233 - DNA, 1596 bp, synthetic construct
  misc_feature 1..1596: note = Description of Artificial Sequence: Synthetic coding sequence
  source 1..1596: mol_type = other DNA
atgaggtgtagtcccggtggagtgtggcttgctctggccgctagcctgctacatggaaaggccacagctagcccccctagtactcctccctgggatcccggacacatcccaggggctagcgtccgtcccgctccaggacccgttagtttgcagggcgaatttcagagaaagctgtataaagaacttgtgaagaattataacccccttgaaaggcctgtggcaaacgattcgcagccattgacggtgtacttcagtctatcgctcctgcagatcatggacgtggatgaaaaaaatcaggttcttacaaccaacatatggctccagatgtcctggaccgaccattatctccagtggaacgtatcagagtatcccggtgtgaagaccgtacgcttcccagacgggcagatctggaaacccgacattctgctctacaactctgctgacgagaggttcgatgctacctttcacaccaacgttctggttaattcgtctggccactgccagtatctcccccctgggatttttaaaagctcttgctatattgacgttcgatggtttccctttgacgttcagcactgtaagctgaaattcggttcctggagctacgggggatggtcacttgacctgcagatgcaagaggcggacatcagtggttacattccaaacggagagtgggacctggttggaattccaggcaaacgaagcgaacgattctatgagtgctgcaaagaaccgtatcctgacgtcaccttcaccgtgacaatgcgacgaaggaccctgtactacgggctgaacctcctgattccctgcgttctgatttccgcacttgccttgttggtgttccttctccccgctgattctggtgagaaaatctccctcggcatcaccgttttgttaagccttaccgtgttcatgcttttagttgccgagattatgcctgccactagtgacagcgtgccattaattgcccagtatttcgcctcaaccatgataattgtgggcttaagcgtggtggtaaccgtcatagtgctgcagtatcatcatcacgatcctgatggcggtaagatgcccaagtggactcgcgtaatcctcttaaactggtgtgcctggttcctgcggatgaaaaggccgggtgaggataaggtgcggcctgcctgtcagcacaagcagagacgctgctcactggcttcagtggaaatgtcagcggtggccccacccccagcatcaaatggaaacctcctttatattggctttcggggacttgacggcgtccactgtgtgcctaccccagattctggcgtcgtgtgtgggagaatggcctgctcccccactcacgatgagcatctcctccacgggggacagccgcctgaaggtgacccggacctggcaaagatcctagaggaagtccgctacatcgccaatcgatttaggtgtcaggacgagtctgaggccgtgtgctcagagtggaagttcgcagcctgcgtggtggaccgtctttgtctaatggctttttccgtattcacgattatttgcacaatcggcattcttatgtcagcgcctaactttgtggaagctgtgtcaaaagatttcgcctag

SEQ ID NO: 218234 - DNA, 966 bp, synthetic construct
  misc_feature 1..966: note = Description of Artificial Sequence: Synthetic coding sequence
  source 1..966: mol_type = other DNA
atgcaagaagcggacatttccggctacatcccaaacggtgagtgggaccttgtcggtattcccggtaagcggtcagaaaggttctatgaatgctgtaaggagccttatccagacgtgactttcactgtgactatgcgtcgcaggactctctactacggactgaatttgctaattccgtgcgtgctgatcagtgctctcgctcttcttgtgttcttgcttcccgcagactccggcgaaaaaatctctctgggcatcacagttctgctgtcactcaccgtttttatgctcctagttgccgaaataatgcctgcaactagtgatagcgtgcctctcatcgcccagtatttcgcgtcaaccatgattatcgttgggctcagcgttgtcgtcacggttatcgtgctgcagtatcaccaccacgaccctgacgggggtaagatgccaaagtggacgagggtgatattgttgaattggtgtgcgtggtttcttcggatgaaacggccaggggaggacaaagtacggccagcctgtcagcacaagcaaagaaggtgcagtctcgccagcgtcgagatgtccgctgttgcgccaccccctgctagtaacggaaaccttctgtacattggctttcgtggactagacggggttcattgcgtgccaacccctgattccggtgtagtgtgcggcagaatggcctgcagtccaacccatgatgagcacctacttcacgggggacagcccccagaaggagacccagacctcgcgaaaatcctagaggaggtcagatatatagccaacaggtttaggtgtcaggatgaatcagaagctgtatgcagtgagtggaaattcgcggcatgcgtggtggataggctatgtctcatggccttttccgtgttcactattatttgcaccatcggaatccttatgtccgcccctaactttgtcgaagcggtctcaaaggattttgcatag

SEQ ID NO: 218235 - DNA, 1440 bp, synthetic construct
  misc_feature 1..1440: note = Description of Artificial Sequence: Synthetic coding sequence
  source 1..1440: mol_type = other DNA
atgaattggagccactcatgcatctctttctgttggatctatttcgccgcatctcgcctgagggccgctgagactgcagatgggaaatacgctcagaaactgtttaacgatctgttcgaagactattctaacgcactgaggcccgtagaggacacagacaaagtgttaaatgtgacactgcagatcactctgagccagattaaggacatggatgagcggaatcagattctgaccgcgtatttatggatccggcaaatctggcacgacgcctacctcacctgggacagagatcagtatgatggcctcgatagcattcgaattccgtccgacctggtgtggcggccagatatagtgttgtataacaaggcagacgatgaatcatcagagcccgtcaatacaaatgtggtgcttcgctatgatggccttatcacgtgggacgctcccgcaataaccaaaagttcttgtgttgtcgacgtgacgtactttccattcgacaatcagcagtgcaacttgacatttggatcctggacctataacgggaaccaggtcgacatctttaacgccctcgacagcggggaccttagcgattttatcgaggacgtggagtgggaggtgcacggaatgcctgccgtgaagaacgttatctcctatggatgctgttcggagccgtaccctgatgtgactttcactctgctgctgaagcgtagatcctcgttttatatagtcaatcttttaattccttgtgttcttatctctttcctcgcacccctgtctttctaccttccggcagcatcaggggagaaggtgagtctaggagtcacaatactgctggccatgaccgttttccagctgatggtcgcagagataatgcccgcttctgaaaacgtccccttgattggcaagtactatattgccaccatggcgctaatcaccgcgtccactgctctcaccatcatggtgatgaatatccatttttgcggcgcagaggccagaccagtcccccactgggctcgggttgtgattctaaaatacatgagtcgggtgctgttcgtctatgacgtgggagagtcatgcctgtctcctcaccactcgagggaacgggaccatctgacaaaggtgtactccaaactccctgagtctaacttgaaggccgcaagaaataaggacctgagccggaaaaaggacatgaacaaaaggttgaagaacgaccttggctgtcagggcaaaaacccacaagaagccgaatcgtactgtgctcagtataaggttctgactaggaatattgaatatattgctaaatgcctgaaggatcacaaagccaccaactctaagggtagcgagtggaagaaggttgccaaggtaatcgacagatttttcatgtggatcttctttatcatggtattcgtaatgactatcctgatcattgccagggctgactag

SEQ ID NO: 218236 - DNA, 1506 bp, synthetic construct
  misc_feature 1..1506: note = Description of Artificial Sequence: Synthetic coding sequence
  source 1..1506: mol_type = other DNA
atgactccaggggcactactcatgcttctgggcgctctgggggcacctctcgcccctggggttagaggctctgaggccgagggacgcctgagggagaaactgttttcaggatatgactcttccgtgagaccagccagggaggtgggagacagggtgagggtgtctgtggggttaattctcgcccagcttatttccctgaatgaaaaggatgaagagatgtctaccaaggtgtacttggacttagagtggaccgattaccggctctcctgggaccctgcggaacacgatggaattgacagcttaagaatcactgcagaatcggtgtggctgccagatgttgtacttctgaacaacaatgatggcaactttgatgttgctctcgacatctctgtggtggtgtcaagcgacggcagcgttaggtggcagcccccagggatctaccggtcgtcctgtagtatacaggtcacatactttccttttgactggcagaactgtaccatggtgttctcctcttacagctatgactctagcgaagtgtctctgcagaccggcctgggcccagatggacaggggcaccaggaaattcacatccacgaaggtacattcattgagaacggacagtgggagattattcacaaaccgtcccgactgattcagcctccaggcgatccacgaggaggacgcgagggacagagacaagaggtcatcttctacctgattattcgccgtaaaccactgttctatctggttaatgtgatagcaccatgtatactgatcacactgttagcaatattcgtgttctatctaccccctgatgcaggggagaagatgggtctgagcattttcgcactcctcacactgaccgtattcctcctactcctagcggataaggtccccgaaacgtcactgagtgtgcctataatcatcaagtatctcatgtttactatggtactggtcaccttctctgtgattttatccgtggtcgttctgaacctgcaccacaggtcaccacacacccaccagatgccattgtgggtgcggcagatctttatacataaacttcctctttacttacgcttgaagcggcctaaacccgagagagacctgatgcccgaacctccccactgtagttctcccggttccggttggggcagaggcactgacgaatactttataagaaaacctcccagtgatttcttatttcccaagcccaaccgattccagccagagttatccgcccctgatctccggagattcatcgacggcccaaacagagctgttgcccttctccccgagctcagagaagtggtcagtagcatctcgtacatcgccagacagctgcaggaacaagaggaccatgacgcgctcaaagaggactggcagtttgtggctatggtcgtcgataggctgtttctatggacctttattatctttacatcggtaggcaccctggtgatctttctggacgctacgtaccacttgccgccacccgacccctttccgtag

SEQ ID NO: 218237 - DNA, 1290 bp, synthetic construct
  misc_feature 1..1290: note = Description of Artificial Sequence: Synthetic coding sequence
  source 1..1290: mol_type = other DNA
atgtctacaaaggtctacttggacctggaatggacagactacaggctgagttgggacccagctgagcatgacgggatcgattctctgcgtattaccgccgaatcagtctggctgccagatgtggtgcttctgaataacaatgacggcaatttcgacgtggcgttggacatctctgtagtggtgagctccgacggcagtgtgcgttggcagccacccggtatttataggagcagttgttccatccaggttacatatttcccgtttgattggcaaaactgtaccatggtattctctagctacagctacgactccagtgaggtgagtttacagacaggcctcggccctgacggacaggggcaccaggagatccatatccacgagggaactttcatcgaaaatggccagtgggagatcatccataagccgagcaggctcattcagccccctggcgacccgagaggcggtcgagaaggccagcgccaagaggtgatcttctacttgatcatccgccgaaaacctctgttttatctggtcaatgttatcgctccctgtatacttatcaccctactagcaatcttcgtcttctaccttccccctgatgcaggagagaaaatgggattgtccatctttgccttactgaccctgactgtatttctcttgctgcttgcagacaaagtcccggaaacttcactgtctgtgcccatcatcatcaaatatctgatgttcactatggttctagtgactttttcggttattttgagcgtcgttgtgctgaatctacaccaccgatccccccatacccaccagatgccactgtgggtcagacagatcttcatacacaagctgcctctgtacctccgactcaagagaccaaaaccagaaagagacctaatgccagagcctccacattgttcttccccaggatccggttggggacggggtacagacgaatacttcatccggaagcctccttctgatttcctgttccccaaacccaatagattccaaccagagctgtcagctccggatctgcggaggtttatcgatggtcccaatcgagccgttgctcttttaccagagctaagggaagtggtctcctccatttcttacattgccagacaattgcaggagcaggaggaccacgatgctcttaaggaagattggcaattcgtcgcaatggtggtggatcgcctatttttgtggactttcataattttcactagcgtggggacactcgtcatcttcttggacgccacatatcatttaccaccccctgacccattcccttag

SEQ ID NO: 218238 - DNA, 1509 bp, synthetic construct
  misc_feature 1..1509: note = Description of Artificial Sequence: Synthetic coding sequence
  source 1..1509: mol_type = other DNA
atggccagaagatgtggacctgtagctctgctgctgggcttcggactcttgcgcctgtgcagtggagtgtgggggacagataccgaagagaggctggtggagcacctgctggatcccagtaggtataacaagctgattcggcctgccaccaacggatctgagctggtcacggtacagctcatggtgtccctggcacagttgatctcagtccacgagcgggagcaaatcatgaccactaacgtctggctcacccaagaatgggaagactacagactaacttggaaacctgaggagttcgataacatgaagaaggtcagactgccatcgaaacatatttggctgcccgatgtcgtgctgtataacaatgctgatggtatgtacgaagtgagcttttactccaatgcagttgtgtcgtatgacgggtctatcttttggttgcccccagccatctacaaaagcgcatgtaaaatcgaagtcaagcattttcccttcgaccaacaaaactgcacaatgaaattcaggtcctggacctatgaccggacagaaatcgacctagttctgaagtcagaggttgctagtttggacgatttcacaccctcaggagagtgggacatcgtggcactgcccggacgacggaacgaaaatcctgatgattctacttacgtcgatattacgtacgacttcatcatccgtcgcaaaccactcttctacaccattaacttgatcatcccttgtgtcctgatcacgtcactggctatactggtattttatctcccctcagactgcggtgaaaagatgacgctgtgcatctctgtcctactggctttgaccgtctttctgctgttgatcagtaaaatcgtgccacccactagcctagacgttcctttggttggtaagtatttgatgtttactatggtccttgtgactttttcaattgtgacctcggtgtgcgttttgaacgttcaccatcgaagccctaccactcacaccatggccccatgggtgaaagtggtatttctggaaaaactacctgcactgttgttcatgcaacagccacgtcaccattgcgcaagacagcggctgcggctgagacgacgccaacgagaacgcgagggggcaggagcattatttttcagggaagccccaggagcagattcctgtacctgtttcgtgaacagagcctctgtgcagggactggcaggcgcatttggagccgagcctgcaccagtggccggaccaggccgttccggtgaaccatgcgggtgtgggttgagagaggccgttgatggggttaggttcatagctgatcacatgcgatccgaagacgatgaccagtcggtgtcagaagattggaagtacgtcgccatggtaattgatcggctctttctttggatttttgtctttgtgtgtgtattcgggacgataggtatgttcctgcaaccattgtttcagaattacaccaccactacatttctgcattcagatcacagcgccccatcaagcaagtag

SEQ ID NO: 218239 - DNA, 1377 bp, synthetic construct
  misc_feature 1..1377: note = Description of Artificial Sequence: Synthetic coding sequence
  source 1..1377: mol_type = other DNA
atgctcccagacttcatgctggtgcttatagtactgggcatcccgagcagcgccaccactgggtttaattcaattgctgagaatgaggatgcacttctgcgccatctattccaggggtaccagaaatgggtcaggccagtattgcactccaacgacacaatcaaggtttactttggactgaagatctcacagctcgtagacgtggacgaaaagaatcagctcatgacaacaaacgtttggctcaaacaagagtggaccgatcataagctgcggtggaatcctgatgactacgggggaattcatagtattaaagtcccatccgaatccctttggcttccggacatcgttcttttcgaaaatgctgatggaagatttgaggggagccttatgaccaaggtgattgtgaaatccaatgggacagtcgtatggaccccacctgcgtcctacaagtcttcatgcacgatggatgtgacattcttccctttcgaccgacaaaattgttccatgaagttcgggagctggacctatgacggcactatggtcgacctcatcctgattaacgagaacgtggatcgcaaggattttttcgataatggcgaatgggaaattctaaatgctaaaggtatgaaggggaatcggagggacggggtctacagctacccctttataacatattcttttgtgcttcgcagactgccacttttctacacactattccttataatcccctgtctggggttatcttttctgacagtcctggtcttttacttgccttctgacgaaggagagaagctgtccctaagtacaagtgtgctggtcagccttacagtgtttctcctggtcattgaagagatcatccccagctcctccaaggtaatccctctgatcggagaatacctactgtttatcatgatctttgtgacactgagcattatcgtaacagttttcgtgattaatgtacaccatcggagctcctcaacctaccatcccatggcaccatgggtcaaacgactgttcttacagaaactgccaaagctgttgtgcatgaaggaccacgttgatcggtattcaagcccggagaaggaagagagtcaaccggttgttaaaggaaaggtgctcgaaaagaagaaacagaaacagttgtcggatggcgagaaagttctagtcgcttttctcgagaaggccgcagattccatacgctacatctctagacacgttaagaaagaacacttcatctcacaagtcgtgcaggattggaagttcgtggctcaggtacttgaccgaatttttttgtggctgttccttatcgtttccgtgaccggcagcgtgctgatctttacgcctgcgcttaaaatgtggcttcactcttaccactag

SEQ ID NO: 218240 - DNA, 1497 bp, synthetic construct
  misc_feature 1..1497: note = Description of Artificial Sequence: Synthetic coding sequence
  source 1..1497: mol_type = other DNA
atgcgcagggccccatctttggttctgtttttcctggtggcactgtgtggaaggggcaattgccgggttgctaatgcagaggaaaaactgatggatgacctgctgaacaaaactcgctacaacaatctgatccgcccagccaccagctcttcccagctcatctctatcaagctgcagctctcacttgcacagctgattagcgtcaacgagagggagcagattatgaccaccaacgtgtggctgaaacaagagtggacagactaccgactgacatggaatagttctaggtacgaaggtgtaaacattctacgaatcccagcaaaacgaatttggttacccgacatcgtgctatacaataatgctgatggtacgtatgaggtctccgtgtacacgaatcttatcgtcagaagcaatggcagcgtactttggctgcccccagcgatctacaagagcgcttgtaaaattgaagtgaagtacttcccttttgatcagcaaaactgtactctgaagttccgaagttggacttacgaccataccgaaattgatatggtcctgatgactccgactgcctcaatggacgacttcactcctagtggggagtgggatatcgtcgcgcttccaggacgcaggaccgtcaatccccaggatcctagctatgtggacgtaacctatgactttattattaagagaaagcctctcttctatactatcaatttgatcatcccctgcgtgctaactacccttctggctatcttagtattctatctgccaagtgactgtggggagaagatgacgctgtgcatcagcgtgttgctggcgctcactttttttctgttactgatatctaagattgtccccccaacctctttagacgtccccctgatcggcaagtatttgatgtttaccatggtgctggtcacatttagtattgtaacgtccgtgtgtgtgctgaacgtgcaccatagatccccatctacccacaccatggcgccttgggtgaagcggtgctttcttcacaagctccccaccttcctgtttatgaagagaccgggtcctgactccagccccgctagagcctttcctcccagcaagtcttgtgttaccaagcccgaagccacagccacaagcacctcaccctcaaatttttacgggaacagtatgtactttgtgaaccctgcatccgcagccagtaagtcaccagctgggagtactcctgttgcaattccccgagacttttggctgcgctcctcaggcagatttaggcaggatgtccaggaggctctcgaaggagtcagcttcatcgctcaacacatgaaaaatgatgatgaagaccagtcagtcgtggaagactggaagtacgtggcaatggtcgtggatagactgtttctgtgggtgttcatgttcgtttgtgtactgggaaccgtcgggctctttctgcctcccctttttcagactcacgctgcctccgagggaccctatgctgcacagcgggattag

SEQ ID NO: 218241 - DNA, 696 bp, synthetic construct
  misc_feature 1..696: note = Description of Artificial Sequence: Synthetic coding sequence
  source 1..696: mol_type = other DNA
atgagacgagctccaagtctggttctgttcttcttggtcgccctgtgtggccgaggaaactgcagagtcgctaatgcggaagagaagctgatggatgacctgctgaataaaacgcgctataataacctgatcaggcctgcaactagtagcagtcaactgatatcaatcaagcttcagctcagcctcgcccagctgatatcagtcaatgaaagagagcagatcatgacaactaacgtgtggctaaagcaggaatggacagactatcggttgacatggaactcctctcgctacgagggagtgaacatactgcgcattccagccaaacgcatttggcttcctgacatcgtcctctataataaatctttgcggacaggatctacctggctctggtggtggactggatgttcttgcgggtgtagctgtctttgcgcttcctgggccctgtggggatcctcttacaggccctctagtcggcctatgcagcttctgcgtggacccacactgccctccgtgacggagggacctttaggttgtggagtccggggatgtgaatggccaggcggacatttcgccgcttctttctgggtggtcgcagacgaagcgttatccaagtacgtctccattggacatcagccgcatcaaacaagtcacagtagagggacgggtaaagacggagggctcggctgccctctgtag

SEQ ID NO: 218242 - DNA, 1554 bp, synthetic construct
  misc_feature 1..1554: note = Description of Artificial Sequence: Synthetic coding sequence
  source 1..1554: mol_type = other DNA
atggaaggccctgtgcttaccctgggattactggccgctctggcagtttgcggctcttgggggctgaatgaagaggaaagactgattagacacctcttccaggagaagggctacaacaaagagttgcggcctgtggctcacaaagaggagagcgtcgacgtggccctggctctcaccctaagcaatttgattagtttaaaagaagtagaagaaactctcacaacaaatgtatggatcgagcatggatggacagacaaccgcctgaagtggaacgcagaggagttcggcaatatttctgtcctcagactccccccagacatggtctggctgccagagattgttctcgaaaataataatgacggctcatttcagatctcctactcttgtaatgtcctcgtgtaccactatggtttcgtgtactggctaccacctgcgatttttcgctccagctgccctatctccgtgacgtattttcctttcgattggcagaactgttcactgaaatttagtagcttgaaatatacagcaaaagaaatcaccctgtccctgaagcaggacgccaaagaaaatcgtacataccctgtcgaatggatcatcattgaccctgaggggttcactgagaacggagagtgggaaatagtccaccgacccgcaagggtcaacgtggacccaagggcccctcttgactctccgtccagacaggacattacattctacctgataatcagacgtaagcctttgttttacataatcaacatcctggttccgtgcgtcttgattagttttatggtgaatttagtgttttacttacctgcggactccggagagaagacgagcgtggcgatcagcgtcttattggctcagagcgtgtttcttttgctgatctctaaacggcttcctgccaccagcatggcgataccactgattggcaaattcctcctgttcggcatggtcctagtcaccatggtggttgtaatttgcgttatcgttttaaacatccactttaggactccatctactcacgtactgtcggagggagtgaagaagttgttcctggagaccttgcctgaattgctgcacatgagccgcccagcagaggacgggccatctccaggagcactggtgcggagatcatccagtttggggtacattagcaaggcagaagagtacttcctccttaagagccgatcagacctaatgttcgaaaagcaatcagaacgccatgggttggccaggcgcctaactacagcacgacgacccccagcttccagtgaacaggcccagcaggagctgtttaacgaattgaaacctgctgttgacggggcaaatttcattgtcaaccacatgagggatcagaataactacaacgaagagaaggattcatggaaccgggtggctagaactgtggatagactctgtctcttcgtggtgactccggtgatggttgtgggcacggcttggatcttccttcaaggggtctataatcagccgccacctcaaccatttcctggggatccttacagttacaacgttcaagacaaaaggttcatttag

SEQ ID NO: 218243 - DNA, 708 bp, synthetic construct
  misc_feature 1..708: note = Description of Artificial Sequence: Synthetic coding sequence
  source 1..708: mol_type = other DNA
atggagggtccggttttaacactgggcttactggcggcactggccgtttgcggcagttgggggctaaatgaagaagaaagactgatcaggcatctgtttcaggaaaagggttataataaagaattaaggcccgttgctcacaaagaggaatctgtggacgtcgcccttgcactcactctgtcaaatctgattagcttaaaagaagtggaagagacgttaacaaccaatgtctggatcgagcacggatggacggataaccgtttgaagtggaacgcagaagaatttggtaacattagcgtcttacgccttcctccagatatggtatggctgccggagatcgttttggagaataataatgacggaagttttcaaatctcctattcctgtaacgtgctcgtgtatcattacgggttcgtgtattggctgccacctgcaatttttaggtcatcatgccctatcagcgtgacatatttcccgttcgactggcagaactgcagcctgaaatttcgtgaaagaggtgtcggcgattcgcctcccgcagggcagggccagaggggccctcagagtcccagcggtcagccgcaaccccctggtcatcatctactgcctcaccaccctccacaggccccattgctgcaccaccaacaccctggtgcgcttagggcccacctgctacacggccaacccggacttctacctacggggtag

SEQ ID NO: 218244 - DNA, 972 bp, synthetic construct
  misc_feature 1..972: note = Description of Artificial Sequence: Synthetic coding sequence
  source 1..972: mol_type = other DNA
atgctgaagaacttagagacttccgtgagctgtgcatcgcctcggacttggtgtgggtcgcagaggctctgctggaggacaacaatgactgctccctccaggagccccacccccgcaacttgcctgtcaaccactactgcttcttgtactggctgtcatctgccatcgagtgctcctcctgccccatctctttccccaatttccccatctaccggcagaaccgccccttcatctagcggaggtgagaaaacttccgtcgccatttccgttcttttggcccagtccgttttcctcctattaataagcaaacgcctcccggcaacatctatggccatccctttgattgggaaattcctgctctttggcatggtgctggtcacaatggtcgtggtgatctgtgtgatcgtgttgaacatccacttccgaaccccttccacacacgttctgtccgaaggtgtaaagaagctattcctggaaaccctacccgagctgctccatatgtcaagaccagctgaggatggcccttcccccggagctctggtgaggcggagcagctcactgggatatatatcaaaggccgaagagtattttctactcaagtcaaggtcagacttgatgttcgagaagcagtccgagcgccacgggctcgcaagacgactaactacagctcggcgtccccctgccagctcggaacaagcccagcaagagctgtttaacgaactgaaacctgccgtagacggagctaacttcatcgtaaaccacatgagggaccagaacaactataacgaagagaaggatagctggaatcgagtcgcaagaactgtagaccggctgtgcctgtttgtggtcacgcctgtgatggtagtcggaacagcctggatttttctgcaaggggtgtacaaccagcctcccccacagcctttcccaggggatccttatagttataatgtgcaggataaacgatttatatag

SEQ ID NO: 218245 - DNA, 708 bp, synthetic construct
  misc_feature 1..708: note = Description of Artificial Sequence: Synthetic coding sequence
  source 1..708: mol_type = other DNA
atggaaggccctgtgttgacactagggttattagcggctctggctgtgtgcggctcttggggcctcaacgaggaggagcggcttatcaggcatctctttcaggagaagggctacaataaggaactgaggcccgttgctcacaaggaggaaagcgttgacgtcgcactggcgttaaccctgtcgaatctgatctcccttaaagaggtcgaggaaacactcacgacaaacgtctggatcgaacacggttggacggacaaccgcctgaagtggaacgctgaggagtttggaaacattagcgtcctccggctccctcccgatatggtgtggctccccgaaatagttctcgagaacaataatgacggcagctttcagatttcatacagctgcaatgtgctggtgtaccattacggatttgtctattggctgccccctgccatcttccgatcttcatgtcctataagcgtcacttattttccttttgattggcaaaactgttctctgaagtttcgggagaggggcgtgggtgacagtccacctgcaggccaaggccagcgtgggcctcagtcaccaagtgggcaacctcaacccccaggacaccatctgcttccccatcatcctcctcaggcacctctcctccaccaccagcaccccggtgccctgcgcgctcaccttctccacgggcaaccaggcttactccctacaggatag

SEQ ID NO: 218246 - DNA, 1509 bp, synthetic construct
  misc_feature 1..1509: note = Description of Artificial Sequence: Synthetic coding sequence
  source 1..1509: mol_type = other DNA
atggaggggcctgtgctcacgctgggcctcctcgctgcactggctgtctgcggatcatggggcctcaacgaagaggagaggctgatacgtcatttgttccaggaaaagggctataataaggaactgcggcctgtggctcataaggaagagtcggtggacgttgccctggcccttacactgtcaaacctcatatctctcggatggactgataaccggctgaaatggaatgcggaagagtttggcaacatatcagttctgcgtctgccacccgatatggtgtggctaccggaaatcgtgttagagaataacaacgatgggtcctttcagatctcctacagttgcaacgttcttgtttaccattacggctttgtgtactggcttcctccggcaattttccgcagctcctgccccatttcggtcacttacttcccgtttgattggcagaattgctccctcaagttctcatctctgaaatacactgccaaggaaatcaccctaagtctcaagcaagatgccaaggagaataggacttaccctgtggagtggatcattattgaccccgaaggattcacagaaaacggggagtgggaaattgttcatcggcctgctcgtgtcaacgtggacccgagggcacctctcgactccccctcccggcaagacattaccttttatctcattattagacgtaagccactgttctatatcattaacattttagttccctgtgtgctcatttcttttatggtgaatctggtcttttatctgcccgctgactccggcgaaaagacctcagttgctatctctgtgttgcttgcacaatccgttttcttgctgctcatttccaagaggctccccgctacatccatggctatcccactgatagggaaattcctgctgttcggaatggtactggtgaccatggtggtggtaatatgtgttatcgttttaaatatccatttcaggaccccatcaactcatgtactctcagaaggcgtcaagaagctcttcctggagaccttgccagaactgctacacatgtcgcgtcctgctgaagacggaccgagccctggggcactcgtcaggaggagttcaagcttgggatatatctcaaaggctgaggagtactttctgctgaaatcacggagcgatcttatgtttgagaagcagtccgagcgccacggccttgccaggagacttaccactgctcgtcggccacccgcttccagcgaacaggctcagcaggaactattcaatgagcttaaacctgctgtggatggtgcaaattttattgttaaccacatgagggaccagaacaactataacgaagagaaagactcttggaatcgggtagcaagaacagtggataggctttgcttgttcgtagttacccccgtcatggtggtggggactgcttggatctttcttcagggagtgtacaaccaacctccccctcagccctttccaggcgacccatatagttacaatgtccaggacaagaggtttatctag

SEQ ID NO: 218247 - DNA, 1482 bp, synthetic construct
  misc_feature 1..1482: note = Description of Artificial Sequence: Synthetic coding sequence
  source 1..1482: mol_type = other DNA
atggcaagagctcccttgggcgtgctcttacttctgggactcctgggtagaggggttggcaaaaacgaggagctgaggttatatcaccacttatttaataattatgaccctggcagtagacctgtgagggaacctgaagacaccgttaccatctcgctgaaagttacactgaccaatctgatttcgttgaatgaaaaggaagagactctgactactagcgtatggatcggtatcgactggcaggattaccgcttgaattattctaaagacgattttggtggaatcgagaccttaagggtcccctcagagttggtgtggctaccagaaatcgtcttagaaaataatatagacggacagttcggagtggcctacgacgcgaatgtgcttgtctatgaaggaggcagtgtgacctggctgcctccggcaatatacaggtctgtgtgtgccgtagaagtaacttatttccctttcgactggcaaaattgctcactgatcttcaggagccaaacatataatgcggaggaagtggagttcaccttcgctgtggataacgatggaaaaaccataaataagatagacatagacaccgaagcatacaccgagaacggggagtgggctattgacttctgcccaggcgtgatccgcaggcaccatggaggtgcaacggacggccctggagaaaccgatgtgatttattctcttattattaggcgaaagcccctgttttatgttatcaatatcatcgtcccctgtgtgctcatcagtggcttagtacttttggcctactttttgcctgcccaggccggaggccaaaagtgcacagtttccattaacgtgctgctggcccagacagtttttttgtttcttatcgcccagaagattccagaaacatcattatctgtacctttgttagggagatttctgatatttgtcatggtggtggccactctgatcgtaatgaattgcgttattgtgctaaatgtgtctcagagaactccgactactcatgccatgagcccaagattgcgccatgtgctcttggaactcctgccacggctgctcggcagccctccccctcctgaagcacctcgggctgcgagtcctccacgtcgtgcctcctcggtcggtttgttattgcgggctgaggaactgatcttaaagaaacccagatcggaacttgtgttcgaaggacagcggcaccgccaaggaacctggacggcagccttttgccagagcttgggcgcagccgcacctgaggtgcggtgctgcgtggatgccgttaacttcgtggctgaaagtacccgtgatcaagaggctacgggagaagaagtttccgattgggtccgcatggggaacgcgctggacaatatctgtttctgggcggcattggttctgttcagcgtcgggagttcacttatcttcctgggcgcatacttcaatcgcgttcctgatcttccatacgctccctgcatccagccatag

SEQ ID NO: 218248 - DNA, 1554 bp, synthetic construct
  misc_feature 1..1554: note = Description of Artificial Sequence: Synthetic coding sequence
  source 1..1554: mol_type = other DNA
atgcacggcggacaagggcctttgttattgctcctgctcctcgcagtttgcctcggcgcacaaggacgcaaccaggaggaaaggttgctggccgacttgatgcagaattatgatcctaatctgagacctgctgagcgtgatagcgatgtagtgaacgtctctcttaaacttacactgacgaatctaatctccctgaacgaaagagaagaagcactgaccacgaatgtttggatcgagatgcagtggtgtgactatagactccgctgggatcccagggattatgagggactctgggtgctgagggtcccgtctaccatggtgtggagaccagacatcgtgttagaaaacaacgtggatggtgttttcgaggttgctctctactgcaatgtgcttgtctcccccgacggctgtatttattggctccccccagcaattttccggtctgcatgctcaatctctgtgacctacttccctttcgattggcaaaattgcagtctcatcttccagtcccagacatattctacaaatgaaatcgaccttcagttgtcccaagaggatggccagactatagaatggatctttatcgatcctgaagccttcactgagaacggcgagtgggcaatccagcacagacccgcaaaaatgcttctggacccagcagcaccggcacaggaagcgggtcaccagaaggtggtattttatttacttatccaacgcaagcctctgttctacgtcattaacatcatagcgccttgcgtactgatctctagcgtggctatccttatccacttcttgcccgcaaaggccggtgggcagaagtgcaccgttgccattaacgtattgcttgcccaaacagttttcctcttcctcgtcgcgaaaaaagtgcctgagacgagtcaggccgttcccctgatctccaaatacctcaccttcctgctcgtggtcactattctcatcgtggtgaacgccgtggtcgtcctgaacgtatcacttcgaagcccccacacacattcaatggcccgtggcgtaaggaaagtgttcctgcgcttattacctcagcttcttagaatgcatgttcgacccttggctccagccgctgtgcaggacacccaatcacgcttacagaatggatcatccggctggtctattactactggtgaggaagtggccctctgccttccgaggtccgaactgttgttccaacagtggcagcgccagggattggtggccgctgctctcgagaagctcgaaaaggggccagagctgggcctatcccagttttgtgggtcactgaagcaggcagcgcctgctatccaagcctgtgtcgaggcatgcaatctcattgcatgtgcgagacaccaacagagccattttgataacggcaacgaggagtggttccttgtcggaagggttctggaccgcgtttgttttctcgccatgttgtctctgtttatttgcgggacagcgggtattttcttgatggcccactacaatagggtgcctgctctcccatttcccggtgaccccagaccgtatctgccgagcccagattag

SEQ ID NO: 218249 - DNA, 1554 bp, synthetic construct
  misc_feature 1..1554: note = Description of Artificial Sequence: Synthetic coding sequence
  source 1..1554: mol_type = other DNA
atgcacggcggtcaggggccattactattgctgctgctgctggcggtgtgtctgggagcccaagggagaaaccaggaagagcggcttttggccgacctgatgcaaaattatgaccctaacctccgtcctgcggaaagagattccgacgttgtaaacgtgagcctgaaactcacccttacaaaccttataagtctgaatgaacgcgaggaggctctcacaacgaacgtatggatagagatgcagtggtgcgactaccggctgcgctgggatcctcgggattatgaggggctgtgggtgttacgagtgccgagcaccatggtgtggagacctgacattgttctggagaacaatgtggatggggtattcgaggtcgccctgtattgcaacgtcttggtgagccccgacggatgcatttattggctgccgccagcaatttttcggtccgcctgttcaatctcagtcacatacttcccgtttgattggcagaactgctccctgatattccagagtcagacctacagcaccaatgaaatagacttacagttgtcacaggaggacggccagactattgagtggattttcatcgatcctgaagcctttaccgaaaatggcgagtgggccatccagcatagaccagctaagatgcttctggatcccgcagcccctgcccaggaggcaggccaccaaaaggtggtgttctatctgcttatccaacgaaagcccctcttctacgtgatcaatatcatcgcaccctgcgtgctgatatcctcggtggcaattctgatacactttctccccgctaaagccggaggacaaaagtgtacagttgctattaacgtgttactcgcacagacagtttttctcttccttgtggctaagaaagtgcctgaaaccagccaggctgtccctctgattagcaagtatctcaccttcctgcttgtcgtcaccattcttatcgtggtgaacgctgtggtagtgcttaacgtgagcttgagaagcccacatacacactcaatggctcgtggcgtgcgtaaggtctttttgagactccttcctcaactcctaagaatgcacgtgcgccctttagcccctgccgctgtgcaggacacgcagtctaggttacaaaatggctccagcggatggagtatcactaccggggaggaggttgctttatgccttccaagaagcgaactactcttccaacagtggcagcgtcaggggctggtggccgctgctctggaaaaactggagaagggcccagaactcggtttaagccagttctgcggcagcctcaagcaggctgcccctgcgatacaggcatgcgtggaagcctgtaacctcatcgcttgcgcacggcaccagcaaagccactttgacaacggtaacgaagagtggtttttggtgggccgtgtcctggatagggtgtgcttcctcgctatgctctccctgtttatctgcggtaccgcaggcatatttctgatggcccattacaatagagtgccagctcttccattcccgggtgacccacgcccttatctcccatcgcctgattag

SEQ ID NO: 218250 - DNA, 1080 bp, synthetic construct
  misc_feature 1..1080: note = Description of Artificial Sequence: Synthetic coding sequence
  source 1..1080: mol_type = other DNA
atggtaaggcctatgcttcttttatctctgggacttttggctggattgctgcccgcactggccgcttgcccacaaaactgccactgccactctgatctgcagcacgtgatttgtgacaaggtcggactgcagaaaatccccaaagtcagtgaaaaaaccaagctgctcaatctccagaggaataatttcccggtgctggctgccaacagtttcagagctatgccgaatctcgtgagcctccatttacagcactgtcagatccgagaggtcgcagccggtgcgttcagaggtctgaagcaactgatctatctctacctgtctcacaacgatataagggtgctgcgcgctggagcctttgatgatctcacagagctgacctatctgtacctggaccataataaggtcacagaattgccgcgtgggcttctctccccactggtcaacctgtttatcttgcagcttaacaataacaagatccgcgaacttcgcgctggagcgttccagggagccaaggatcttcgctggctttacctgagtgagaacgctctcagttcattacagcccggagctctggacgacgtggagaacctggccaaattccacgttgaccggaatcagctgtcctcttatccaagtgctgcgttgagtaaattacgagtcgtggaggagcttaaactgtctcataatcccttgaagtctataccagataacgccttccagtcctttggcagatacctcgagactctgtggcttgacaacactaacctggagaagttctccgatggagcttttcttggggtgaccaccctcaaacatgttcatctggagaataaccggcttaaccaattaccaagcaatttcccctttgatagtctggaaacgctggcattgaccaacaatccctggaagtgtacttgccagctgcgcggactgcggcgatggctggaagccaaggcctctcgccctgacgctacctgcgcaagtcccgctaagttcaaaggtcaacacatcagagacaccgacgctttcagaagctgtaaatttcctacaaaaagatccaagaaggcaggacggcattag

SEQ ID NO: 218251 - DNA, 129 bp, synthetic construct
  misc_feature 1..129: note = Description of Artificial Sequence: Synthetic coding sequence
  source 1..129: mol_type = other DNA
taggccagccggcctgacgccacctgtgcatctccagccaaatttaaaggccagcacattcgggacaccgacgcattccgctcctgcaagtttcctacaaaacgctccaagaaggcagggagacactag

SEQ ID NO: 218252 - DNA, 1080 bp, synthetic construct
  misc_feature 1..1080: note = Description of Artificial Sequence: Synthetic coding sequence
  source 1..1080: mol_type = other DNA
atggtacggccaatgttgctactgtcactggggttactggccggattgctgcctgccctagctgcctgtccccaaaattgtcactgccactcagacttgcaacacgtgatatgtgacaaagttggcctgcaaaagataccaaaagttagtgagaaaaccaagctgttgaacctgcagcgcaataacttccccgtgcttgctgctaactcgtttcgcgcaatgcctaatttggtgagcctccacctgcagcactgtcaaatcagagaagtagccgctggcgcattccgcggactgaagcagctgatttatctctacttgagccacaacgacatcagggtcctcagagccggagcattcgatgatcttactgagctgacatacctctatctggaccataataaggtgacagaattacctaggggcttgttgtcacctttggtaaacttgtttatactccaactgaataataacaaaatccgtgagctccgcgctggggcattccaaggggctaaagacctcaggtggctgtacctgagtgaaaacgccctctctagtttacagccaggggcactggatgacgttgagaacctagcaaagtttcacgtggaccgtaatcagctctccagttatcccagcgcagccctcagcaagctccgcgttgtggaggaactgaagctctctcacaaccctctgaaaagtataccagacaacgcttttcagtcctttggcagatatcttgaaacgctatggctggataataccaacctggagaagttcagtgatggagcttttttaggggtcaccactctgaagcacgtgcacttggaaaataataggctgaatcaactcccatccaactttcccttcgactccctggaaacacttgccctaaccaataacccatggaagtgtacctgccaactgagaggcttgcgcagatggctggaagcaaaggcctccaggcccgatgcaacctgcgccagtcctgccaaattcaaaggccagcacatacgcgacacggatgcattccgctcatgtaagtttcccacaaaacggtcaaagaaggctgggaggcactag

SEQ ID NO: 218253 - DNA, 2328 bp, synthetic construct
  misc_feature 1..2328: note = Description of Artificial Sequence: Synthetic coding sequence
  source 1..2328: mol_type = other DNA
atgcgagccagtctgctcctgtctgttttgagacccgcagggccagtcgcagtcggaatcagtctggggttcaccctgtctctcttatctgttacctgggtcgaagagccgtgcggccctggcccacctcagcctggagatagcgaactgccacccagagggaacacgaacgcagccagacgccctaattcagttcaacccggtgccgaacgggagaaacctggggctggggaaggcgctggagaaaactgggagcccagagtgctgccttaccatccagcacagccaggacaagccgctaagaaagccgtgagaacacgctatattagtacagagctaggtataaggcaacgtctgctggtagcggtcctgacctcgcaaaccacacttcccactctgggggtcgccgtcaatagaaccctcggccatcgcctggagagagtagttttcctgaccggagcccgaggcaggagggcaccccctgggatggcagtggtgactctgggcgaagagaggcccatcggccacctgcatctcgccttaaggcatctgctcgaacagcacggtgatgacttcgattggtttttcctggtgcctgacactacatacacggaggcacacgggctggccaggctcactgggcatctttcattagcgtctgcagctcacctgtacctggggcgaccccaggatttcataggaggcgaaccaactcccggacgatactgccacgggggatttggggtactcctgtcgaggatgctgctacagcagttgcgaccccacttggagggatgcagaaacgacatagtctctgccagacctgatgagtggctgggtcggtgtatactggacgccactggggttggctgtactggtgatcatgaaggggtgcattatagccatctggagctgtcccccggagagcctgtgcaggaaggcgatcctcactttagatctgccctgacggcacaccccgtgagggacccggtgcacatgtatcagctgcacaaggcattcgcacgcgcagagctggaaagaacgtatcaagagattcaggagctgcagtgggagattcagaacacaagccatctggccgtggacggggaccaagctgcggcatggccggtagggatccctgcgccatctcgccctgcctctcggtttgaggttctgaggtgggactacttcacagaacaacacgcatttagctgcgccgacggtagccccagatgccccctgaggggtgctgaccgcgctgacgtggctgatgtcctcggcactgcactggaggagcttaaccggagatatcaccccgctctgaggctgcagaaacagcagctggtcaacgggtatcgtagatttgaccccgcacggggaatggaatacactttggatttacagctcgaggcgctcacgccccagggcggtcgacgcccactaacccgccgtgtacagctcctacgaccattgagtcgtgtagagattctgcctgtaccatacgttaccgaggcatcgaggctcacagtcctgctaccactggcagcagcggagcgggaccttgcaccagggttcctggaagcatttgccaccgcagcgttggagcccggagatgcagctgcggctctcacactgctacttctgtatgagccacgccaagcccagcgagtggcccacgccgacgtgttcgccccagtcaaggcacacgtcgcagaactagagaggcgcttccccggagcgagagtgccttggctgagtgtgcaaacagctgcaccatcaccactgcgactcatggatctgctgagtaaaaaacacccgctcgacactttgttcctgttagctggccctgacacagtgttgacacccgatttcctgaatcgctgccgtatgcacgcaataagcggctggcaagctttctttcccatgcacttccaagcctttcacccggcagttgctcctccgcagggtccaggccctcccgaactgggcagggacacagggagattcgacagacaggctgccagcgaagcatgcttctataattcagactatgtcgcagcccgaggaaggcttgccgctgcgagcgaacaggaagaagagcttctggagagcctcgacgtctatgaactgtttctgcacttctcatctcttcatgtcctgcgagccgtcgagcctgcccttctgcagcgctatcgggcacagacctgttctgctaggctgtcagaagatttataccaccgctgtttacagtcagttctggaggggctaggatctaggactcaacttgccatgcttctcttcgaacaggagcaaggcaactcaacctag

SEQ ID NO: 218254 - DNA, 1842 bp, synthetic construct
  misc_feature 1..1842: note = Description of Artificial Sequence: Synthetic coding sequence
  source 1..1842: mol_type = other DNA
atggctgtggtgacactgggagaggaaaggcctatcggccatttgcacttagctttacggcatctgctggaacagcacggtgacgacttcgactggttttttctcgtgccggataccacctatactgaggctcatggtctggccaggctcacaggtcacttatcccttgcctctgcggctcacctatacctaggcaggcctcaggacttcatcgggggagaacccaccccgggaagatactgtcacggtggatttggggtcttgctgagccgaatgctcctccaacagctacgcccacacctggagggctgccggaatgacattgtgtcagcaagacccgacgagtggttgggaagatgcatattggatgcgactggtgtcggctgcactggcgaccacgagggggtacattactctcacctggagctttctcctggcgagcctgtccaggagggagacccccactttcggtctgccctcacagctcacccagtgcgcgatcccgtccacatgtaccagctgcacaaagcctttgcacgggctgaactcgaaagaacttaccaggaaattcaagagcttcaatgggaaattcagaacacctcccatctggctgtggatggcgaccaggcagccgcttggccggtgggaattccagccccttctagaccagccagccggtttgaggtgctgcggtgggactatttcacagagcaacacgctttctcttgcgccgatggtagccctcggtgcccattgagaggagcagatagggctgatgtggccgatgtcctgggtaccgcactggaggagcttaataggcggtaccatcctgctctgaggcttcagaaacagcaacttgttaatgggtatcggcgatttgacccagccaggggaatggagtatactctggatctacagcttgaagcactgacaccacaagggggtcgaagaccactcacgaggcgtgtgcaattgcttcgtcctctctccagggttgaaatcctgcctgttccctatgtgaccgaggcctcacgtctgaccgtgttgcttccactcgctgctgctgagagggacctggccccaggatttctcgaagccttcgctaccgctgcgttggaaccaggagacgccgctgccgcactgacactactgttactttatgagcctagacaggctcagagggttgcccacgcggacgtctttgcacctgttaaggcacatgtagccgagctagaacgtcgcttcccgggtgcaagggtgccctggctctctgtgcagaccgccgctccctcgcccctgcgcttaatggacctcctcagtaagaaacacccactggatacattatttttgctggcgggtcccgatacagtgctgaccccagatttcctcaacaggtgcaggatgcacgcaattagcgggtggcaggcctttttccccatgcattttcaggccttccatccggctgttgcccctccgcaaggacccggacctccggaactcgggcgagacactggaaggtttgatcgtcaggcggcttctgaggcctgtttttataacagcgactatgtcgctgctcggggacgtctggccgcagcatccgagcaagaggaggaactgttagagtctctagacgtctacgaactctttctgcatttcagtagcttgcacgtcctcagggcagttgagccggctcttctgcaacgctaccgcgctcaaacatgttccgctaggctgtccgaggacttgtatcatcgctgtctgcagagcgttttagaagggctgggcagcagaacccaattagcaatgctgctgtttgagcaagaacaggggaactcaacctag

SEQ ID NO: 218255 - DNA, 2319 bp, synthetic construct
  misc_feature 1..2319: note = Description of Artificial Sequence: Synthetic coding sequence
  source 1..2319: mol_type = other DNA
atgcgtctgtctagcctgctggccctgctgaggcctgccctccctctgatcctgggcctgagtttgggctgtagcctctccctcctgcgggtcagctggatccagggggaaggagaagatccctgcgtcgaagctgtgggcgaaaggggcggtccacagaatcccgatagtcgggctagactagaccagtccgacgaggactttaaaccacgaattgtgccttattacagagacccaaacaagccatataaaaaggtccttaggactcgatacatccagacagagctggggagcagagaacggttactcgtggccgtgctgacctcgcgagcaacactgtcgacgctggcagttgcggtaaacaggacagtggcccaccattttcccaggctcctatactttacaggccagcgcggagcccgtgcgcctgccggaatgcaagtggtctctcacggagatgagagacccgcatggctcatgtctgaaaccttgagacacttacacacgcactttggggcagactatgattggtttttcataatgcaggatgatacgtacgtgcaggctcccagactggccgcactcgctggtcacctgagcataaatcaagacctgtacctcggacgagccgaagaatttatcggcgcaggcgaacaggccaggtattgccacggtggttttggttacttactctcacgctcactgctcctcaggctgcgcccacacttggacggctgcagaggcgatatcctgtccgcaagacccgatgaatggcttgggcgttgtttaattgactctctcggagtcggatgcgtgtcacagcaccagggtcagcagtaccgatcattcgagctcgcaaaaaatagagaccccgagaaagaaggttcaagcgccttcctgagtgcatttgccgtgcaccccgtgagtgagggcaccctcatgtaccggctgcacaaacgcttcagtgccctggagctggaaagggcctactctgagattgaacagctgcaggctcagatacgaaacctcaccgtgctcacgcccgagggtgaagccggactgtcatggcctgttggtctgccagctccctttaccccccattctagattcgaggtcttgggatgggattactttaccgagcagcacaccttcagctgtgccgacggcgctcccaagtgtcccctccagggggctagtcgcgctgacgtcggagacgctctcgaaacagccctggagcaattgaaccggcgatatcagccgaggctgagattccaaaagcagagactgctcaatggctaccggagattcgaccctgctcggggtatggagtatacactcgacctactgctggagtgcgtaactcaaagaggccaccggcgagcgcttgccagaagagtttcactcctgaggcccctttccagggttgaaatcctgccgatgccttatgttacagaggccacacgggtgcagttggtgctgcccttactagtcgccgaggccgctgctgcccctgcttttctcgaggcctttgccgctaacgtgctcgagcctagggaacatgccctgctgacgctcttgctcgtctatggtccccgagagggtgggcgtggcgcacccgacccttttctcggcgtcaaggctgcagcagcggaattagagaggcggtaccccggtaccagacttgcttggctggcagtgcgggcagaagctccctctcaggtccgcctgatggacgtagttagcaaaaagcaccctgtcgacaccttatttttcctgaccacagtttggacaaggcccggacccgaagtgctgaaccggtgcagaatgaatgctatttccggatggcaggctttcttccccgtgcacttccaagagttcaatcccgcattatccccacaacgttctccccctggaccgcctggagcagggccagacccgcctagcccccctggggcagatccctcccggggagccccaatcgggggaaggtttgataggcaggccagcgctgaggggtgcttctataatgctgattatcttgcggcacgtgcgagacttgcgggtgaactggcaggacaggaagaggaagaggctcttgaagggctcgaagtgatggatgtgttcctgaggttttccgggttgcatctgttccgggcagtcgagccgggtctggtgcagaaattttcgctgcgcgactgcagccctagactctctgaggagctataccatcgttgcaggctgtccaacttagaggggctgggtgggagagcgcagctagcaatggcgctattcgaacaggaacaggccaattctacctag

SEQ ID NO: 218256 - DNA, 2004 bp, synthetic construct
  misc_feature 1..2004: note = Description of Artificial Sequence: Synthetic coding sequence
  source 1..2004: mol_type = other DNA
atgcggctgtcgtccctgctggcactgctgaggccagctctccctctcatcttaggcctaagtcttggatgcagcctgtctttgctccgagtgagctggatccagggagagggagaggatccttgcgtcgaggctgttggagagagagggggacctcaaaatcccgacagtcgggctcggttagatcagtctgacgaggactttaagcccagaattgtcccttattatagagaccctaacaagccctacaagaaggtcctccgaaccaggtacatccagacggagctgggttcacgggagaggctgctcgtagctgttctgactagcagagccacattgagcaccctggccgtggcagtgaatagaacagtggcccatcacttcccaagacttctttactttacggggcaacggggagcacgggcacctgctggtatgcaggtggtctcccatggagatgagagaccagcatggctgatgtcggaaactctgagacacttacatactcatttcggcgcagattatgactggttctttattatgcaggacgacacatatgtgcaggcacccaggcttgcagccttggccggtcacttatcaatcaatcaggacctgtatctcggacgtgcggaggagttcattggcgctggagagcaggcccgatactgtcacggtggctttggctatcttctcagtcggtcacttctcctacgcctgcgaccccatctggacgggtgtcgaggtgatattttgagcgcacggccagatgagtggctgggtcgatgcctgattgactctcttggtgtcggttgtgtatcccagcaccaggggcagcagtacagatctttcgaactcgctaaaaaccgagatccagaaaaagaggggtcctctgccttcctgtctgcttttgccgtacaccctgtctcagagggcaccctgatgtacaggctgcataagcggttctctgcactggagttagagcgggcttattcagagatcgagcagttacaggctcagattaggaacttaaccgttctcacacctgagggagaagctggactgtcttggcccgtgggactacctgcaccattcacgccccactctcgttttgaggttctgggatgggattattttactgaacagcacactttctcctgcgccgacggagcacccaaatgtccactgcagggagccagtcgggctgacgtgggtgacgcactggagacagccctggaacaactgaatagacggtatcagcctcggctgcgatttcagaagcagcggctattgaacggctataggcgatttgacccagctaggggaatggagtacacactggacttgctgctggaatgcgtgacacagcggggacacagaagggccctggccaggcgggtgagccttctccgccctctgtcccgagttgaaattctccctatgccctacgtgacggaagccacaagggtgcagctggttctgccacttttggttgcagaggcagctgctgcaccggctttcctggaggcgtttgctgctaatgtcctagaacctcgagaacatgccctcctaactctgcttcttgtgtatggccctcgtgaggggggacggggagcccctgacccattcttaggagtaaaggccgctgcggctgagttggagcgcagataccccggaacacgcttggcctggctggctgttcgggctgaagcaccaagtcaggtacggctcatggacgtcgtctcaaagaaacatcccgttgataccctcttctttctcacgactgtctggacaagacctggacccgaggtgctgaaccggtgtagaatgaatgctatctctggatggcaggctttcttcccagtacatttccaggaattcaaccccgctctgagcccgcagcgtagtccaccaccgaacctaatcaccttccctctcagtgcttctgcacccggaagggctagacaagacggaggtcagatcgagaactgttgttgcatcttctag

SEQ ID NO: 218257 - DNA, 6968 bp, synthetic construct
  misc_feature 1..6968: note = Description of Artificial Sequence: Synthetic coding sequence
  source 1..6968: mol_type = other DNA
atgcagtccggtccaagaccgcctctgcctgctcctggcttggccctggccctcaccctgaccatgctcgcaaggctggcctctgccgcatccttttttggagagaatcatttggaagtgcccgtggccaccgcccttaccgatatagatctgcagctgcaatttagcacttctcagcccgaggctctcttgctgcttgccgctggtccagccgaccacttgctgctgcagctgtattccggaaggcttcaggtgcgtttagtcttaggacaagaggaacttagattgcagaccccagctgagacactcttgtctgattcaatccctcacacggtggtactgactgtcgtggaagggtgggctacactatccgtcgacggcttcctgaatgccagtagtgccgtccctggcgctccactagaggttccttacggcctgtttgtgggcggaacaggaactttgggtttgccataccttcgagggactagccgaccgctacggggttgcctacatgctgccacactgaacggccgtagtcttttacgccctctcacgcccgatgtgcatgaggggtgtgccgaggagttcagcgccagtgacgacgtggccctggggttttctgggcctcacagcctggccgctttccccgcatggggtacacaggacgagggtaccttagagtttacgttaaccacccagagccggcaggcacctttggctttccaggccggtgggaggcgaggcgatttcatttatgtcgatatattcgagggccatttgagagcagtggtagagaaaggacagggaacagtattgttgcacaactcagtcccagtagccgacgggcagcctcacgaggtctcagtgcacatcaatgcccatcgactcgaaatttctgttgatcaataccccactcacacgtctaacaggggagtgctgtcctacctggagcctcgaggtagtctcctgctagggggtctggatgccgaggcttcgagacatctgcaggagcacaggctaggcctgacccccgaggccaccaatgcatcactcctggggtgtatggaggacctgagtgtaaatggccagaggagaggtctaagggaagcgctcctcacgcgtaatatggctgctggctgccgcctcgaagaggaggagtatgaggacgacgcatacggccactatgaggccttttccacgctggccccagaggcttggcctgcaatggaattacccgagccctgtgtacctgaacccggtctgccccctgttttcgcaaattttactcagttgctgactatctcacccctggtcgtcgctgaggggggtaccgcgtggctggaatggagacacgtccagcctactctggacttgatggaagccgagctccgcaagagtcaggtgctcttctcggtcactaggggggcacggcacggagaattggagctggatatccctggggctcaggccagaaaaatgttcaccctcctcgatgtagttaacagaaaagctagatttatccacgatggaagcgaagacacatccgatcaactcgtgctggaggtatctgtgacggccagagtccccatgccctcctgtctcaggcggggacaaacatatctgctgccgatccaggtaaaccctgtcaatgatccgccacacattattttcccgcacggatccctaatggtaatcctggagcatactcagaagcccctcgggccagaggtgttccaagcctacgatcccgatagcgcatgtgaaggattaaccttccaggttctgggaacgagcagcggactccctgtggagcggcgagaccaacccggagaaccagccaccgaattctcttgccgggaattggaggcaggtagtctcgtgtatgtccaccggggaggccctgcgcaggatctaactttcagagtctctgacggcctgcaagctagccctccagccactcttaaagtggtggccatccgcccagctatccagatccacagatctaccgggcttagactggcccagggatcagccatgcctatcctgccagctaacctgagcgtggaaaccaacgcagtcggtcaagatgtgtctgttcttttccgcgtgacgggtgcactgcagtttggggaactccagaagcagggcgcaggaggagtggagggggcagaatggtgggctacccaagccttccatcaaagagacgtcgagcagggccgagtgaggtacctctccactgacccccagcaccacgcttacgacacagtagagaacctggctctggaggtacaggtggggcaggagatcctcagcaatctttccttcccagtcaccatccaacgtgccacagtgtggatgttaagacttgaaccccttcacactcagaacacacagcaggaaacactaacaaccgcccatttggaagccactttagaggaagccggtccatctcctcctacattccattatgaagtggtgcaggcaccgaggaaggggaacctgcagcttcaaggcactagattaagtgacggccagggcttcacccaggatgatatccaagctggcagggtgacttatggagcaaccgcacgggcttcagaggccgtggaagacaccttccgcttccgcgtgaccgctccaccatacttttcccctctgtatactttcccaattcacatcggtggggatccagacgcccctgtgctcaccaacgtcctgctggttgtgcctgagggcggagagggggtcctgagcgcagaccacctcttcgtgaagtccctgaacagcgcctcttatctctatgaagtgatggaaagacccagacacggtaggctggcttggagagggacacaagataagaccactatggtcacaagtttcacgaacgaggacctcttgaggggtcggctggtctatcaacacgacgactctgaaaccactgaggatgatattccgttcgtcgctactagacagggtgagtcttctggcgatatggcttgggaagaagtgcggggtgtttttcgggtagctattcagcccgttaatgatcatgcgccagtgcaaacaatcagccgtatcttccatgttgcccgtggaggtaggcgactcctcactacggacgacgtggctttctctgatgccgactccggtttcgccgatgcccagctagtgctgaccagaaaagatctactctttggctccatagtcgccgtggatgagccgacgcggcctatttaccgcttcactcaggaggacttgagaaagaggcgtgtgctctttgtgcactccggtgctgatcggggatggatccagttacaggtcagtgacgggcagcaccaggctactgctcttctggaggtgcaagccagcgaaccatacttaagggtggctaacgggtcatccttagtcgttccacaagggggacagggcacaatcgacactgcagtcctgcatttggatacaaatttggacatcagaagcggagacgaagtccactatcatgtaaccgcaggacctcgatggggccagctagttagagccggacagcccgctacagccttttctcaacaggatcttttggacggagctgttctctattcccacaatgggtctctgtcaccccgagataccatggccttttccgtcgaggcaggtcccgtccacaccgacgccaccctacaggttaccatcgcgctggagggcccactcgccccactcaagctggtgaggcataagaagatatacgtgtttcagggcgaagcagccgagataaggcgcgatcagctggaggccgctcaagaagctgtacctccagccgatatcgtgttcagcgtgaaaagtcctcccagcgccggatacctggttatggtctcccgtggggctctggccgacgagcccccttcgcttgaccctgtgcagtcattttcgcaggaggccgtggatactggaagggtcctgtacctacactcacgcccagaagcctggtccgacgcctttagtttggacgttgcaagtggactgggggctcccctcgagggagtccttgtggagcttgaagtcctgccggcagcaattccgctcgaggcacagaatttcagcgtcccagaaggcggatcactcaccctggcgccacctctgctgcgtgtgagcggaccctacttcccaactctgttaggtctctcactccaagtgctcgaacctccccagcacggagctctgcagaaggaggacggccctcaggccaggactctttcggcattcagttggagaatggtggaggagcagctcattcgttacgtgcacgatgggtctgaaaccctgaccgactccttcgtgctaatggccaatgcttcggagatggaccggcaatctcatcccgtggcctttaccgtcacagtcctccctgtcaatgaccagcccccaatactgacaacaaacactggtctgcagatgtgggagggagctacagccccaatccctgccgaggccctgagaagcacagatggcgatagcgggtccgaggatttggtctacacaatcgaacagccctcaaacggtcgagtcgtgctccggggagcaccgggtacagaggtgcggtcttttacccaggcacagttggatggcggactggtgctcttttcacacaggggaaccctggatggtgggtttcgattccggcttagcgacggtgaacacaccagcccaggacactttttccgggtgactgcccagaaacaggtcctgctgtctctcaaggggagccagaccctgaccgtgtgccccggatccgtgcagcctttgtcctcccaaacgctaagggcctcttcatccgccggaacggacccccagctgttgctctatcgggttgtcagggggcctcaattaggacgcctgttccatgcacaacaggatagtaccggcgaggcactggtgaacttcacccaagccgaggtctatgcgggaaatatactgtatgaacacgaaatgcccccagaacccttttgggaagcccacgatacgctggagctccagctgagctccccccctgctcgtgacgtggccgctactttagccgtcgctgtctcttttgaggccgcttgtccccaaaggcccagccatctttggaagaacaaagggctgtgggtacctgaggggcagcgcgctcgtattacagtggcagcgttagacgcatccaaccttctggcttcggtgcccagcccacagcgttcggagcacgacgtactgttccaggtgacgcagttcccctcacgcggtcagctgcttgtgtccgaagaacccttgcacgcgggtcagccccatttcctgcaaagccagttggccgcaggtcagctggtctatgctcatgggggtggcggtacgcaacaggatggtttccatttcagggcccatctacagggtccagccggagcttccgtcgctggaccacagacttccgaagcattcgcaatcacagttcgagacgttaatgagaggccgccacagccccaggcgtcagttcccttgcgtctgactcgagggagccgggcaccaattagccgcgctcagctctctgtagtcgaccctgattcagcacctggagagatcgagtacgaggtgcagcgcgcaccccataatggctttctaagtctcgtcggtggcggactgggccctgtgacaagattcacacaggccgacgttgacagcggcaggctagctttcgtggctaatggctcctctgtcgccggtatcttccagctgtcaatgtctgatggcgcttccccgccactgccaatgagcctggccgtggatattttgcctagcgccattgaggtacagctccgggcaccgctggaagtgccgcaggctctcgggagatcatccctcagccagcagcaactacgggttgtttcagaccgggaggagcctgaggccgcataccgcctgatccaggggcctcagtacggccatcttttggtggggggtcgcccaacatccgcgttctcgcaatttcagatcgatcagggcgaggtggtgttcgccttcacgaatttttccagttcgcacgatcactttcgcgtactagctttggcccgaggagtgaacgcttcggccgtggtaaacgtcaccgtgagagcattgctccacgtctgggcgggtggcccttggccacaaggggctaccctgaggcttgaccccacagtactggacgccggagagctggccaaccgcacagggagtgtgccgagattccgactcctggaggggcctagacacgggcgagtggtgcgggttccccgagcacgcacggaacctgggggttcgcaactggtggaacagttcacgcagcaggatctcgaagacggtagactgggattggaggttggcaggcctgagggcagggcccctggccctgcaggtgacagcctaaccttagaattgtgggctcagggcgtgcccccagctgtggccagtttagactttgcgaccgagccctacaacgccgcacggccttacagtgtggcgctcctaagcgtgcctgaagctgcaagaactgaggctggcaaaccagaaagcagcactcctacaggggagccgggacctatggcctctagcccagagccagcagtggccaaaggcggattcctcagcttcctggaagccaatatgttcagcgtgataatcccaatgtgccttgtcttacttctgctcgccctgattctgccactgctgttctacctgcggaagcgcaacaagaccggcaaacacgacgtgcaagtgctcaccgcaaagcccagaaacggtctcgcaggagatacagaaacatttcgtaaggttgaacccggacaagcgatccccctcaccgcggtaccgggtcagggcccacccccaggcggtcagcccgatccagagttgttacaattctgtaggactcctaaccctgcattgaaaaacgggcaatattgggtata

SEQ ID NO: 218258 - DNA, 984 bp, synthetic construct
  misc_feature 1..984: note = Description of Artificial Sequence: Synthetic coding sequence
  source 1..984: mol_type = other DNA
gagcaacatcgtgaggagccagaggctgcctataggcttattcagggtccacagtacgggcacctcctggtcggtgggagaccaacctccgctttttcgcagtttcaaatagaccagggagaggtcgtgttcgcatttactaatttcagctcttctcacgatcactttcgggtgttagccctggcgaggggagtcaacgccagtgcggtggtcaacgtcaccgtgagagcccttcttcacgtatgggccggaggtccttggccccagggcgcaacactcagactagaccccacagttctggatgccggagaactggctaacagaaccggtagtgtgccacggtttaggctgctcgagggaccgagacatggacgcgtggttcgggtccctcgggctcggaccgagccgggaggctctcagcttgtcgagcagttcacccagcaggacctggaggatggcaggctgggattagaggttggtagacccgagggtagggctccaggaccagcaggggactcgctgacactcgaactttgggcgcaaggcgtgccccctgccgtcgccagcctggattttgcgactgagccttataacgctgcaagaccatactcagtcgctctgctgtctgtaccagaagccgcaagaacggaggccggtaagcccgagagctctacaccaacaggggagccaggacccatggcatcaagcccagaaccggcagtcgcaaagggagggttcctgtcctttctggaggctaacatgttttcagttatcattcctatgtgtctcgttctcttactgttggccctgattctgcccctacttttctacctccgaaagaggaacaagacaggaaaacacgatgtccaggttctgactgccaaaccaaggaacggattggcaggggacaccgaaactttcaggaaagtggagccaggacaggccatacctctaaccgccgtaccgggtcaggggccaccctag

SEQ ID NO: 218259 - DNA, 2409 bp, synthetic construct
  misc_feature 1..2409: note = Description of Artificial Sequence: Synthetic coding sequence
  source 1..2409: mol_type = other DNA
atggcggctcgcggacgcagggcctggttatccgtactccttggtctcgttttagggtttgtattagcttcccgcctcgtgttaccccgagcgagcgaactcaaaagagcgggtcccagacggcgagcttcacccgagggatgtcggtctggccaagcggcagcttcccaagctggtggtgctaggggagacgccaggggcgcacagctgtggccaccgggttcggatccggatggtggaccccgtgatcgcaattttctattcgtcggagtaatgactgcgcagaagtacttgcagactcgcgcagtggccgcttatcggacttggtctaagaccatacctggcaaagtgcaattcttctcgtccgaaggttccgacacaagcgtaccaatccctgtcgtgcctctgcgcggtgtggatgacagctatccgcctcagaaaaagtcctttatgatgctcaagtacatgcacgatcactacctggataaatacgagtggtttatgcgagccgatgatgacgtctatataaaaggggaccgtctagaaaactttctccggagcctgaacagtagcgagccattatttttgggccagactgggcttgggactacagaggagatgggcaagctggctctcgaaccgggtgagaacttctgcatggggggacccggagttattatgtcgagggaagtgctgagaagaatggttccacacataggaaagtgcttaagggaaatgtatactacacacgaagacgtggaggtgggaaggtgcgtgcgcagattcgctggcgtgcagtgcgtgtggtcctacgagatgcagcagctgttttatgaaaactacgaacagaacaaaaagggttatatccgcgacctccacaacagcaagatacaccaggccataactcttcatcctaataaaaatcccccttatcagtatagacttcacagctatatgctctctcggaagattagtgaactgcggcacaggaccattcagctgcatcgcgagatagtcttaatgagtaaatattcaaataccgaaatccataaggaagatctgcagctgggaattccacctagttttatgcggttccagcctagacagagggaagagatactggagtgggagttcctgacaggcaaatatttgtattccgctgttgacggtcagcctccacggagggggatggatagcgcccagagggaagcgctcgacgatattgtcatgcaggtcatggagatgatcaatgcgaatgctaagactcggggaaggattatagattttaaggagatccagtacgggtaccgacgtgtcaaccctatgtacggggctgagtacattctggacctactgctcttatacaagaagcataagggaaagaaaatgacagtccctgttcgcaggcacgcttacctgcagcagaccttctcgaaaattcagttcgtcgagcacgaagagctggacgcccaggagctcgcaaagcggatcaaccaggagtcgggttccctgtcattcttgtctaattctctgaagaagcttgtgcctttccagctccctggcagtaaaagcgaacataaagaacccaaagataaaaaaatcaacatccttatacccctgagtggccgtttcgatatgttcgtcaggttcatgggcaacttcgagaagacgtgtctgatcccaaaccagaatgtcaagctggttgtcctcctcttcaattccgattccaaccccgacaaagctaaacaggtcgagctcatgcgcgattatagaataaagtaccctaaggccgatatgcagatcttgccggtgtcaggggaattttcccgggcactggcactggaagttggctcctcacagtttaataacgaaagcctcttattcttctgcgatgtcgatctagtgttcaccaccgaatttctccagagatgtagagccaataccgtgttggggcagcagatttacttccctatcattttctcgcaatatgaccctaagatcgtctattcaggaaaagtccccagtgacaatcactttgcattcacccagaagaccggattctggcggaactatggatttggcatcacttgcatctataagggagacctggtgagggtggggggtttcgatgtatctattcagggctggggtcttgaggatgtggatctgtttaataaggtggttcaagctggcctgaaaacatttcggtctcaagaggtcggagtcgtccacgtccatcaccccgttttctgcgacccgaacctcgaccccaagcagtacaagatgtgtctgggctccaaggcttccacatatgggtcaacccagcaacttgcagagatgtggctggagaagaacgacccctcctattcaaaatcatctaataataacggatccgtcagaaccgcttag

SEQ ID NO: 218260 - DNA, 2649 bp, synthetic construct
  misc_feature 1..2649: note = Description of Artificial Sequence: Synthetic coding sequence
  source 1..2649: mol_type = other DNA
atggccgtacgctcccgcaggccctggatgtcagtcgccctgggcttggtgttaggatttaccgctgcatcctggctaattgctcctcgcgttgcagaactctctgagaggaagcgcagaggttcctcactttgctcctactatggcagatcggcagctgggcctcgggctggcgctcagcaaccgctgccccaaccacagagccgcccacgtcaggagcagagtcccccacccgctaggcaggatttgcagggacctccacttccagaagctgccccagggatcacatccttcaggtcctctccatggcaacaacctccccctctccagcaacgcagacgaggcagggaaccagagggcgcaactggtttgcctggcgcacctgccgctgagggcgagccagaagaagaagatggaggcgcagcaggtcagcggagggacgggaggccgggatcaagccataacggttccggggacggcggtgcagcggctccaagtgctcgtcccagggactttctgtatgtgggagtcatgaccgctcaaaagtacctgggcagtcgggcattggctgcccagcgaacttgggccagattcatccctgggagggtcgaattcttcagcagtcagcagcccccaaatgcaggacagccaccgcctcccttgccagtgattgctctccctggagtggacgacagctaccctccccaaaagaagagcttcatgatgattaagtatatgcacgatcactatttagataagtatgagtggttcatgcgcgctgatgacgacgtgtatatcaaaggtgataaactagaggaattcttacgatccctgaactctagcaaacccctgtacttaggccagaccggcctgggaaatattgaggagttgggcaaactaggcctggaaccaggagagaatttttgtatgggtgggccagggatgatcttcagccgagaggtgctccgccgaatggtaccccatattggcgagtgcttgagagaaatgtatacgactcatgaagacgtcgaagtggggagatgcgtacgccgtttcggcggtacccagtgcgtctggagttatgagatgcagcagctcttccacgagaattatgaacacaataggaaaggctatattcaagatctgcacaactccaaaattcacgcggctatcacattgcaccctaacaaacgtcctgcttaccagtaccggctccataactatatgctctcccgaaagattagtgagctacgttacaggaccatccagctacatagagagtcggccttgatgtccaaactgagcaataccgaggtgtctaaggaggatcagcagctaggagttatccctagttttaatcactttcagccccgagagagaaacgaggttatcgaatgggagttcctgacaggcaaactcttgtactctgccgcagaaaaccaacctcctagacagtctctgagcagtatcctgagaaccgcattagatgacaccgttttacaagtgatggagatgattaacgaaaatgccaagtcacgtgggagactcattgactttaaagaaattcagtatggttacagacgcgtaaatccaatgcacggcgttgaatatatattagacttgttgctactttacaagaggcataaaggcaggaagcttaccgtccccgtacggcgacatgcctacctccagcagctcttttccaagcccttcttcagggaaaccgaggagttggatgtcaactctctggtggagtcaatcaactcggagacccagtcctttagttttattagcaactccctaaagattctcagtagctttcaaggtgcaaaggagatgggtggacacaacgagaagaaggtgcatatactggttcccttaattggtcggtacgatatctttctgaggttcatggaaaacttcgagaatatgtgtcttattccaaagcagaatgtgaaactagttattatcttattttcccgcgacagcggccaggatagttcaaaacacatcgagcttattaaaggctatcagaataagtatcctaaggctgagatgacgctcattcctatgaaaggagagttctcaagggggctgggcctggaaatggcatctgctcagttcgacaacgacacactcctgcttttctgtgacgtcgacctgattttccgggaagacttcctgcagcggtgcagggataatacaatccagggacagcaggtatactaccccatcatcttcagtcagtacgaccccaaggtgactaacggtggcaaccccccaactgacgactatttcattttcagcaagaaaactgggttttggagagattatgggtatggaatcacgtgtatctacaagtctgacctcctgggtgcaggagggttcgacacctcaattcaagggtggggactggaagatgttgatctgtacaacaaagtcatcctctccggtctccgacctttccggtcccaggaagtgggagtcgtgcatatctttcaccctgtgcactgcgaccctaacctggaccctaagcagtataaaatgtgcctaggcagcaaagcaagcacttttgccagtaccatgcagttagccgaattgtggctcgaaaagcatctgggcgtgcgttataacagaaccctttcatag

SEQ ID NO: 218261 - DNA, 2868 bp, synthetic construct
  misc_feature 1..2868: note = Description of Artificial Sequence: Synthetic coding sequence
  source 1..2868: mol_type = other DNA
atgccaagtctgcccgcacctccagcccctctgctgctcctgggattattgctcctgggaagccgcccagctagaggcgcaggccctgaaccgcctgttcttcctatcaggtcagagaaagagcctttgccagttagaggggcagctgggtgcacctttggagggaaggtgtacgctctggacgaaacctggcaccctgatctcggcgagccttttggagtcatgaggtgtgtgctctgtgcctgcgaagccccacagtggggaaggagaacacgtggtcctgggagggtctcctgtaagaacatcaaacctgaatgtcccacccctgcgtgcgggcagccacgtcaactgcccggacactgttgccagacttgtccgcaggagcggtcaagtagtgaacgccagccatctgggttgtccttcgagtacccacgcgatcccgaacatagaagctattccgacaggggagaaccaggcgcagaggaacgcgctaggggcgacggccatactgactttgtcgccctccttaccggccctcggtcccaagctgtggcccgtgcaagagtgagtttactccgctcgagtctgcgcttctctattagttacaggcgcttggatagacccactaggatccgtttctccgatagtaatggctctgttctcttcgagcaccccgcagctcctacgcaggacgggctggtgtgcggcgtgtggagagccgtgcccaggttaagcttgcgattgttgcgtgctgaacagctccatgttgcattggtgaccctcacccacccatccggggaggtgtggggcccactgatcaggcaccgcgctctggcagccgaaacgttctcagccatcctgaccctggaaggaccaccccagcagggcgtgggtgggataacattgctaaccttgagcgataccgaagatagcctccacttccttctgctctttcgtggcctgctggagcccaggtccggaggacttacacaggttccattaagactccagatcttgcaccaggggcaacttctccgggagctccaagcaaacgtgtccgctcaggagcccggtttcgccgaggtgttaccgaacctgacagtccaggagatggattggttagtactgggagaattacagatggccctagaatgggctggacgcccaggtctcagaattagtggacacattgccgctaggaaatcctgcgatgtgctgcaatcagtcctgtgcggggctgacgccctgattcccgtgcagaccggcgctgctggttcagctagcctgacgctgctgggcaatgggtccctgatctaccaggtgcaagtggtcggtacttctagtgaggttgttgccatgaccctcgaaactaagccacagcggagagaccaacgtactgtgctctgtcatatggctggactccaacctgggggacacacagccgttgggatctgcccaggtctgggagctaggggcgctcatatgttgttgcaaaatgagctgtttcttaacgtcggcaccaaggattttcctgacggcgagctccgtggccatgtcgctgctctcccctactgcggccactctgcccgacacgacactcttcccgtgcccttagccggagctcttgttcttcctcctgtgaagtcccaggctgcgggacacgcatggttatcgctggacactcattgccatctgcactacgaggttcttctggctggattaggtggaagcgagcaaggcacggtaactgcgcacctgctcggtcctccgggaacgcccggaccacggagactgctgaaaggtttctatggtagcgaagcacagggagtggttaaagatcttgaacctgaactccttcgtcatttggccaaaggcatggcctcgcttatgattacgaccaaaggcagtccccgaggcgagcttcgcggacaggtgcatattgcaaatcagtgcgaagtcgggggactgcggctggaggccgctggcgctgagggtgttcgggcacttggggctcccgacacggcctccgctgctccccctgttgtccccggtctacctgctctcgcacctgccaagcctggtggcccaggtagacctagggacccaaatacctgcttctttgagggacagcaacggcctcatggtgccagatgggccccaaactacgatcccttgtgtagcctgtgtacctgccaacgacgcacagtcatatgcgatccagttgtgtgtccccctcccagctgcccccacccagtccaggcccctgaccagtgctgccctgtgtgtccggagaaacaggacgttagggatctgccaggcctcccacggagcagagatccgggagagggctgttactttgacggagatcgctcatggcgcgcagcagggacccgctggcaccccgtggtccctccttttggcctgataaaatgtgccgtttgcacctgcaaagggggaactggtgaagtgcactgtgagaaggtgcaatgtccacgcctggcttgcgcccagcccgttagagtaaatcccacggactgctgcaagcaatgccccgtgggcagtggggctcacccccagctcggagaccccatgcaggcggatggacccaggggatgccgattcgctggacagtggttcccagaatcccagtcctggcatccttccgtcccaccgtttggagaaatgtcttgtatcacctgcagatgtggggcaggcgtcccccattgtgagcgcgacgactgcagcttacctctctcatgcggaagtgggaaagaatcgcgctgctgttctcgctgtactgctcaccgccgtccagcccctgaaacaaggacagatccggaactggagaaagaagccgaggggtcctag

SEQ ID NO: 218262 - DNA, 285 bp, synthetic construct
  misc_feature 1..285: note = Description of Artificial Sequence: Synthetic coding sequence
  source 1..285: mol_type = other DNA
atgccatcacttccagcccctcctgctcctctgttattgctgggcctactcctgctggggagtcgccctgctcgaggagcagggccagaaccccctgtgctccccatcaggtcagaaaaggagccactccctgtcaggggagcagctgggtgtacttttggcggtaaagtgtatgcgcttgacgaaacctggcacccggatctaggggaaccgttcggcgtgatgcggtgcgtgctgtgcgcttgtgaggccaccgggacgctgcgcccaagggagatgaagtag

SEQ ID NO: 218263 - DNA, 1512 bp, synthetic construct
  misc_feature 1..1512: note = Description of Artificial Sequence: Synthetic coding sequence
  source 1..1512: mol_type = other DNA
ggggaacacttgtctcagaagggccctcatgtacgcccatgccgaaccaatcccggatctctggaagctcccgatagtactccaggcgcagcgacagctcggacaagcggacagtgcctctcacccggtgagtggggtagcggctctcggtgccacctatcatggccactggctatcgctcaccacactttattgtgtccccaggagcccggatttgctgaagttttgcctaacctgaccgtgcaagaaatggactggctcgtgttgggggagttacagatggccctggaatgggcgggtagaccgggactgcgcatctcagggcacattgccgctcggaaaagctgtgacgtgctgcagtctgttttgtgcggagccgacgccctgatacctgtgcaaaccggtgcagccggatcagcttccttgactcttttgggaaatggttcattgatttaccaggtgcaagtggtcggcacttcgtcggaggttgttgctatgactctggagaccaagccccagcgacgcgaccagaggaccgtgctgtgccatatggctggtttacagccgggtgggcacactgcggttggcatctgcccgggactgggcgcaagaggtgcccatatgttgttgcagaatgaactgttcctaaatgtgggcaccaaggactttcctgacggggagctcaggggccatgtcgctgccctgccttactgcggccactccgctcgccacgacacattacccgtgccactggccggtgctctggtgcttccaccggtgaaatcacaggccgctgggcacgcctggttgtctttggacacccattgccatctacactatgaagtgctgctagccggattagggggatctgaacagggcacagtcaccgcacatttactaggaccgcctggcactcccggtcctaggcgcctgctcaaagggttttatggttctgaagcacagggggtggtaaaggatcttgaaccagagctactgcgacatctcgccaaaggcatggccagcctgatgatcactaccaaaggcagcccgaggggcgaattgcgaggccaggtccacatcgctaaccaatgcgaagtcgggggactgcggctcgaggcggcaggtgctgagggggttcgcgcactgggcgcaccagatacagcaagtgctgctcccccagttgtgccgggtcttccagccttggcgcctgcaaagccgggaggacctggacggccacgcgaccccaacacatgcttttttgaaggacagcagaggccccatggggcacggtgggcaccgaattacgaccccctctgctccctttgtacatgtcagagaaggaccgtcatatgtgacccagtcgtgtgcccaccaccgagctgtcctcatccagtgcaggccccagaccagtgctgcccagtctgtcctgagaagcaggatgtgcgagacctgcccggtctaccaaggtcccgggacccaggagaaggtggccattggcgcggagcgctgtag

SEQ ID NO: 218264 - DNA, 2748 bp, synthetic construct
  misc_feature 1..2748: note = Description of Artificial Sequence: Synthetic coding sequence
  source 1..2748: mol_type = other DNA
atgccctctcttccagcgccacccgctccccttctgctcttagggctgctcctgctggggagccgccctgcgcgaggggctggacccgaaccacccgttctgcctatcagatccgaaaaagagcctctgcctgtgcgaggggctgccggttgcacctttgggggtaaagtgtacgcactcgacgaaacctggcaccccgacctgggtgaaccttttggggttatgaggtgcgtgttatgcgcatgcgaggcacctcaatgggggaggagaacccgagggcctgggcgtgtctcctgcaagaatataaagccagaatgccctactcccgcttgcgggcagcctcgccaattgcccggacattgctgtcagacctgtccccaggagagaagctcgtccgagcgtcagccttctggtctgagttttgagtacccacgcgaccctgaacaccggagttactcagataggggcgaaccaggagcagaagaaagggctaggggagatgggcacactgacttcgtcgctctgctgactggaccaaggtctcaggctgttgcaagggccagggtctccctgttgaggagctctctgcggttttctatttcttacaggagattagacaggccaacaagaattagattttccgactccaacggcagcgtactttttgagcacccagcagctcccacccaggatggccttgtgtgcggagtgtggcgcgcagtgccgagattgtcgctgcggctcctgcgtgcagagcaactgcacgttgcattggttacccttacccaccccagcggtgaggtttggggtcctctaattcgccaccgtgctctggcggctgagaccttttctgctatactgactttggaaggccctcctcagcagggcgtggggggaatcacactcttgacccttagtgacacagaagatagcctccactttctgttgctctttcgcggactcctggagcctcgatcaggcggtctgacccaggttcccctccgcctgcagatattacaccaggggcagctgctaagggaactgcaagctaatgtctcggcgcaagagcccggattcgcggaggttctaccgaacctgacagtccaggaaatggactggctggttctgggtgagttgcagatggctctggaatgggctggcagacctgggttgcggatctctggacacatcgcggctcgaaagtcctgtgacgtgctgcagagtgtgctgtgtggtgctgacgcacttataccagttcagaccggcgcagcaggcagtgcatctctgaccctcctgggcaacgggagtctgatttatcaagcggtaggtatttgtcccggtttgggcgctcggggagcccacatgctgcttcagaatgagttgttcttgaatgtagggaccaaagatttcccggatggcgagttgcgcggacatgttgctgcattgccatactgtggccattctgccagacacgataccttgcctgtccccctggcaggagctctcgttcttccaccggttaagtctcaagcggcaggccacgcctggttgtccctggacacccattgccatctccactacgaggtcctgctcgctggactgggaggctctgagcagggcactgttactgcccacctgctcggtcctccaggcactcccggaccaaggcgcctgctgaaaggcttctacggttccgaagcacagggagtcgtcaaggacctggagcctgaactcctgaggcatctggctaagggcatggcttcgctgatgatcaccactaagggctcacccagaggcgaactaaggggccaggtccatattgccaaccagtgcgaagtgggtgggctgaggctggaggcggcaggcgctgaaggtgttcgggctttgggcgcaccagacactgcttccgcagcccctcccgtcgtccctggccttcccgctttggcccctgccaagcccggaggaccgggaaggccccgagaccccaacacctgcttctttgaaggacaacagagacctcatggggctcgatgggcacccaactacgaccccctgtgctctctatgcacatgtcagagacggaccgtgatatgtgaccccgtcgtgtgtcctccgccttcatgtccccaccctgttcaggccccagatcaatgttgccccgtgtgccctgaaaagcaggacgtacgagaccttccaggtctccccaggagtcgagatcccggagagggctgctattttgatggggaccgatcctggagagcagccggtactcgatggcaccctgtggtgccgcctttcgggcttatcaagtgcgctgtgtgcacatgcaaagggggaaccggtgaagtgcattgtgaaaaggtgcagtgtcctaggctggcttgcgcacagcccgtccgagtgaatcccactgactgctgtaagcagtgtccagtgggctctggcgctcatccgcagctgggtgaccctatgcaagcagatggaccaagggggtgcagatttgcgggtcagtggtttcccgaaagtcagtcctggcacccaagcgtgccaccgttcggagaaatgagctgcataacttgtcgctgtggcgcaggagttccccactgcgaaagggacgactgcagcctccctctctcttgcggctccggtaaagagagccgctgctgcagcaggtgtaccgcccacaggcggccagctcccgaaaccaggaccgacccggagttagaaaaggaagcagaaggcagctag

SEQ ID NO: 218265 - DNA, 1494 bp, synthetic construct
  misc_feature 1..1494: note = Description of Artificial Sequence: Synthetic coding sequence
  source 1..1494: mol_type = other DNA
atggattggcttgtgctaggggaactgcaaatggccctggagtgggccggacgaccaggcctgcggatctccggtcatatcgccgctagaaagtcctgcgacgtgctgcaatcggttttgtgtggcgcagatgcgttgatacccgtgcagactggagctgccggtagcgctagcctcacgctgcttgggaatgggagcctcatctaccaggtgcaggtagtgggcacaagctctgaggtggtcgccatgacactggagactaagccccagcgcagggaccaacgcaccgtgctgtgccacatggctggcttgcagcctggagggcatacagcagtagggatctgcccaggtctaggtgcccgtggagcgcacatgctcctgcaaaatgaactatttttgaacgttggcactaaggatttcccagacggcgagttaagaggtcacgtcgccgcattaccatactgtggccatagtgctcgacacgataccctccctgtgcccctggccggagcattggtgctgccgcctgtgaagtcacaagcagctgggcacgcctggttgagcctggacactcactgtcatctgcactatgaggtcctgctggcaggcctggggggaagtgaacagggaacagtcactgcccatttgcttggccctcccggaacaccgggtccacgtagactgctgaagggtttctatggcagcgaagcgcagggcgtggttaaggatttagagccggaattgcttcggcacctggcgaaggggatggcttcactgatgataacaactaaaggctcgccccgaggcgaactgcgcggtcagcggcgaactgtgatctgtgaccctgtggtttgcccgccaccctcctgtccacatccagtccaggctcctgatcagtgttgccccgtctgccccgagaagcaggacgtgagagatctgccaggcttgcccaggtccagggatcctggggaaggctgttatttcgacggggatagaagctggagagctgccggtacacgatggcatcccgtcgtgccaccctttggactgatcaagtgcgcggtgtgtacttgtaaaggcggaacaggcgaggttcattgtgagaaagtccaatgtccgagacttgcatgcgcgcagcctgtgcgtgtgaatcccacagactgctgcaagcagtgccccgtggggtctggagcacatccacaacttggggatcctatgcaggccgacgggcctaggggatgtcgatttgctgggcagtggtttccagagtcacagagctggcacccttccgtgcccccatttggtgagatgtcatgtattacctgccggtgtggcgcaggggtcccgcattgcgaacgggacgactgtagccttcctctgtcctgcggcagtggcaaggaatccaggtgttgctcacggtgcaccgctcacagacggcctgccccagaaactagaaccgatcctgagctggaaaaggaagctgaagggtcctag

SEQ ID NO: 218266 - DNA, 3126 bp, synthetic construct
  misc_feature 1..3126: note = Description of Artificial Sequence: Synthetic coding sequence
  source 1..3126: mol_type = other DNA
atggaaaacatgtttttgcagagctcaatgttaacgtgcattttcctgttgatttctgggtcatgtgaactctgtgctgaagagaacttctctaggagttacccatgtgatgagaaaaaacagaatgattcagtgatcgcagaatgttcaaataggcgactccaggaggtcccacagaccgtcggaaagtatgtaaccgagctggatctgtcagataattttatcacccacattacgaacgagtcatttcagggcctgcagaatctcacgaagatcaatctcaatcacaatccaaacgtacaacaccagaatgggaatccgggaatccagagtaacgggctcaatattacggacggggctttcctgaacctcaagaatttgcgtgagctgctgctggaggataaccaattgccccagatcccatccggactgccagaatcgcttacggaactcagtctgatccaaaacaacatttacaatataaccaaagaggggatctctcgtctgattaatctgaagaacctgtatctcgcatggaattgttattttaacaaggtttgcgagaagaccaacattgaagatggcgtcttcgaaaccctgacgaatctggagctgctctccttgagttttaatagtctctcgcacgttccacccaaactaccctcctccctgcgcaaactatttctttctaacacccagatcaagtacatctcagaagaggatttcaaaggtttgattaatctgactctgctggatctgtcaggcaactgtcctcggtgctttaatgcgccatttccttgtgtgccgtgtgacggaggggcatcgatcaatatagaccggtttgcatttcagaaccttactcaacttaggtatcttaatctctcatccacttctcttagaaagataaatgcggcatggtttaaaaacatgccacatctcaaagtgttagatctggagttcaattatttagtgggagaaattgcctcaggtgcatttttaacaatgcttccacggttagaaatcctcgacttgagctttaactacattaaaggtagctacccgcagcacattaacataagcagaaatttttctaagttgctgagtctgcgcgcacttcatctgcggggttacgtcttccaggagttaagagaagatgactttcagccactgatgcagctgcctaacctgtctaccatcaatctgggaattaacttcataaagcaaattgactttaaactatttcagaactttagcaacctcgaaataatttacttatctgagaataggatcagccctctggtgaaggacacaaggcaaagctacgcgaatagtagcagtttccagagacacatcagaaagcgcaggtctactgactttgagttcgatccacacagcaatttttatcattttacccgaccgctgataaagccacaatgtgctgcttatggtaaagccctcgacctgagtctgaattctatcttcttcattggccctaaccagtttgaaaatctgccggacatcgcctgtttaaacttgagcgccaactccaacgcacaggtgctatctggaaccgagttcagtgcgattccacatgtgaagtatctggatcttactaacaataggctggactttgataatgcctctgccctgacagaactgagcgacctggaggtgctggatttgagttataatagccattatttccgtattgctggagtgactcatcacctagaattcatacaaaacttcactaatctgaaggtacttaacctgagccataacaatatatacacccttactgataaatacaacctggaatcgaaaagcctggtcgaactggtgttttcaggaaatcgcctagacattctttggaacgacgacgataaccgctacatcagcattttcaaaggtctgaaaaatctaactaggctggacttgagcctgaatcggttgaaacatatcccaaatgaggccttcttaaacctccctgcttcgcttacggaactccatattaacgataacatgcttaagttttttaattggactctgctccaacagtttcctagactggagttactggacctgcgtgggaacaagctgctcttcctcacagacagcttgagtgatttcacatccagtcttcggactttactcctctctcacaacaggatcagccacctaccatcaggctttcttagtgaggtgagctcactgaaacacctggatctgtccagcaacttgctgaaaacaatcaataaaagcgccctggaaactaaaaccaccacgaaactgtccatgctggagctacacgggaatccgtttgagtgcacctgcgacataggcgactttcggcgatggatggacgagcacttaaacgtgaagatcccgcgactggtagatgtcatctgtgcgagtccgggtgaccaacgaggtaaatccatcgtttccctggagcttacaacatgtgttagtgacgtaaccgcggtcatcttgttttttttcaccttctttatcacgacaatggtcatgcttgcagccctggcgcaccacttgttttactgggatgtgtggttcatctacaacgtgtgtctggcaaaggtgaaaggttaccggtctctgagcacttcccagaccttttatgacgcctacataagttatgacacaaaggatgcctccgtgacagattgggtcatcaacgaactgcgctatcaccttgaagaaagccgagacaagaatgtccttctgtgcttggaggagagggattgggaccccggactggccatcattgacaacttgatgcagtctatcaatcagtccaaaaagacagttttcgtgctgaccaagaaatacgccaagagctggaattttaagaccgctttctatttggctttgcagcgcttgatggacgaaaacatggatgtgattatctttattctcctcgagccagtactacagcacagtcagtacctgcgcctgcgccagcgtatctgcaagtctagtatcttacaatggccagacaacccaaaagccgaaggtctgttttggcagacactaaggaacgttgtattaactgaaaatgactctaggtacaacaacatgtacgtcgacagtatcaaacagtactag

SEQ ID NO: 218267 - DNA, 1377 bp, synthetic construct
  misc_feature 1..1377: note = Description of Artificial Sequence: Synthetic coding sequence
  source 1..1377: mol_type = other DNA
atgaggaagaagtggaaaatgggtggaatgaaatatattttttccctgctgttctttctgttactcgaagggggaaagactgaacaggtgaagcattccgaaacctactgcatgtttcaggataaaaaatatagagttggggaacgctggcacccataccttgagccctacggacttgtttattgcgtcaactgtatttgttctgagaacggcaatgtgctgtgcagcagggtgcggtgtcccaacgtacactgtctctcgcctgttcatattccacacctctgctgtcccaggtgtccagaggatagtctaccccctgtcaataacaaagtgacctcaaaaagttgtgaatacaacgggactacatatcagcatggagaacttttcgtggcagaggggctgtttcagaatcggcagccgaaccaatgcactcagtgctcctgctctgaaggcaacgtgtattgcgggctcaaaacttgtcccaagttgacatgtgccttccctgtttcagtgccagactcctgttgccgagtatgcaggggggacggtgaattgagctgggaacactccgatggcgatatatttcggcagccagcaaatcgtgaggctcggcatagctatcaccgcagtcactatgaccctcccccaagccgccaagcaggtgggctgtcacgctttccaggtgccaggtcacatcgtggcgctcttatggattctcaacaagctagcggaactattgtgcagatcgtgattaacaacaagcataagcatggacaggtctgcgtgagtaatggaaagacatatagtcacggggagtcctggcacccaaatttgagggcattcggaatcgttgagtgtgtcctgtgtacttgtaacgtaaccaaacaggaatgtaagaaaattcactgtcccaacagatacccatgtaagtaccctcaaaaaatagacggaaagtgctgcaaagtgtgcccaggtaagaaggcaaaggaagagcttcccggacagtcctttgacaacaagggctatttttgcggcgaggaaaccatgcccgtgtacgagtcagtcttcatggaggacggtgagactactcgaaaaatcgctcttgaaacagagcggcctccccaagtggaagtgcacgtttggacaatccggaaaggaattctacagcacttccacatcgaaaagatctctaaacggatgtttgaagaactgccacattttaagctcgttacaaggacaaccttgagtcaatggaagatattcacagaaggtgaggcacagatctcgcagatgtgcagctcaagagtctgtagaaccgaacttgaagacttggtgaaggtgctgtaccttgagcgctctgaaaagggtcattgctag

SEQ ID NO: 218268 - DNA, 1353 bp, synthetic construct
  misc_feature 1..1353: note = Description of Artificial Sequence: Synthetic coding sequence
  source 1..1353: mol_type = other DNA
atgggcggtatgaaatacatatttagtctgctgtttttcttgctcttggaaggaggaaaaactgagcaggttaagcactccgagacatactgcatgttccaggataagaaatacagagtgggcgaaagatggcatccctatctcgaaccctatgggctggtatactgcgtaaactgcatctgcagcgagaacggcaacgtgttgtgctcaagggtgagatgtcctaacgtgcattgtctgagcccagtgcacataccacacctgtgttgtcccaggtgtccagactcccttccgccagtgaataacaaagtgacatcgaagtcatgcgaatataatggaacaacttatcagcatggcgaactgtttgtcgccgaaggcctgtttcagaaccgacagcctaatcagtgcacccagtgctcgtgctcagagggtaatgtgtattgcggactgaagacttgcccaaagctgacttgcgccttcccagtatcagtaccggatagttgctgccgggtgtgtagaggagatggcgagctctcttgggagcactctgatggcgatatattcagacagcctgcaaatagagaagccagacattcttaccatcgctctcactacgatccccctccctcccggcaggccggtggcctgtcccggttcccaggagccaggagtcacagaggcgcactgatggactcacagcaggcatccggaacaatagtacagattgtgatcaataacaagcacaagcatggccaggtttgcgtcagcaatggaaaaacctatagccacggtgagagctggcaccccaatctcagagcatttggaattgtcgaatgtgtgctctgcacttgcaacgtcacaaagcaggagtgtaaaaagatccattgcccaaatagatatccttgcaaataccctcagaagatcgacggtaaatgttgcaaagtttgtcctgggaagaaagcaaaagaactccctgggcagtcctttgacaacaaggggtacttttgcggggaggagaccatgccagtatacgaatcagtgtttatggaggacggcgaaacgacccggaaaatagctctcgaaacagagcgtcctcctcaagtggaagtgcacgtctggactatccgtaagggcatactccagcacttccatattgaaaagatcagcaagcgcatgttcgaggaactcccgcactttaagttagtgaccaggaccacattatctcagtggaaaattttcaccgaaggcgaggcacagatcagccagatgtgttcatcaagggtgtgtcgcacggaattagaagacctcgttaaagtgctctacctggaaagaagcgagaaaggtcactgttag

SEQ ID NO: 218269 - DNA, 1371 bp, synthetic construct
  misc_feature 1..1371: note = Description of Artificial Sequence: Synthetic coding sequence
  source 1..1371: mol_type = other DNA
atgcggaaaaagtggaagatgggcggaatgaagtatattttctctctcctgttctttctcctgctagagggagggaagaccgaacaagtcaaacatagtgagacttactgtatgtttcaggacaaaaagtatagggtaggcgaaagatggcacccatacctcgagccgtacgggctggtgtattgtgtgaattgtatttgcagtgagaacggaaacgtgctctgttcccgcgtaaggtgtcccaacgtacattgtctatcgcctgtgcatatcccccacctgtgctgtccgaggtgtccagacagtctgcccccagtaaacaacaaggtaacgagcaagtcttgtgaatataatgggactacctatcagcacggggagctctttgtggccgaaggactgttccaaaataggcagcctaatcagtgcacccagtgtagttgttccgagggcaacgtgtattgtggcctgaagacctgtcccaagttgacgtgtgccttcccagtatccgtgcccgattcctgttgtcgggtgtgcaggggcgacggggaactgtcatgggagcactcagatggagacattttcagacagcctgcaaatagagaagccagacactcttaccaccgttcccactatgatccccctccatcaaggcaagctgggggattatctagattccccggagccaggagccacagaggcgcacttatggattctcagcaggccagcggcaccattgtccagatcgttataaacaacaaacataagcacggtcaggtgtgcgtttccaatggaaaaacatatagtcatggcgaatcttggcatcctaatctgcgggctttcggtattgtggaatgcgttctctgcacttgtaacgtgaccaagcaggaatgtaagaagatacattgccctaacaggtacccctgcaaatatccccagaagatcgatggcaagtgttgcaaagtttgccccggtaaaaaagctaaagagttgccaggccagagcttcgacaacaaaggctatttttgcggtgaagagacgatgccagtttatgagagtgtattcatggaagatggtgaaacgacgaggaaaatcgcgctagaaacagagaggcctccccaggtcgaagtgcacgtctggaccattcgtaaaggaatcctgcagcactttcacatcgaaaagatttccaagagaatgttcgaggagttgcctcattttaagttagtgactaggactacactttcgcagtggaagatatttactgagggggaagcgcaaatcagccaaatgtgttcctctcgggtctgtagaaccgaactcgaggaccttgtgaaagtgctctacctagagcgatcagaaaagggacattgttag

SEQ ID NO: 218270 - DNA, 1134 bp, synthetic construct
  misc_feature 1..1134: note = Description of Artificial Sequence: Synthetic coding sequence
  source 1..1134: mol_type = other DNA
atgagaaaaaaatggaaaatgggaggaatgaaatacatcttctccctcctgttctttctgctgctcgagggcggaaaaacagagcaggtgaaacacagcgaaacgtactgcatgttccaagataagaaatacagggtgggcgaaagatggcacccatacctggaaccttacggcttagtatattgtgtgaactgcatttgctctgagaatgggaatgtactgtgttcccgagtgcgctgtccgaatgttcattgcttgtctccagtccacatcccccacctttgctgcccacggtgccctggtgacggggagctgtcttgggaacatagtgatggggatatatttcgccagccagccaatcgcgaggccagacacagctatcatcggtcccactatgacccaccgccatcccgccaggccggaggtctcagtcgttttcctggtgccaggtcacatcgtggggcattgatggatagtcagcaagcctcaggcacaatcgtgcagatagtgattaacaacaaacacaagcatggtcaagtttgtgtgagcaacggtaagacatactctcatggcgagagttggcacccaaacttacgcgctttcggcatcgtagaatgcgtcttgtgtacctgtaacgtgacaaagcaagagtgcaaaaaaattcattgccccaacagatacccttgtaagtacccccagaagattgacggaaagtgctgtaaggtatgccctggtaaaaaagccaaggaactgcccggtcaatccttcgacaacaaaggttatttttgtggtgaggagacaatgcccgtgtacgaatcggtttttatggaagatggagaaaccactcggaagattgccctagagaccgaacgcccaccacaagtggaggtacacgtttggaccatcaggaagggcatcctgcagcatttccatattgaaaagattagcaagcgcatgttcgaggagctgccccattttaagctggtgaccagaactacccttagtcaatggaagatcttcacagaaggggaagcccagatttcacagatgtgtagtagcagggtttgtcgaaccgaacttgaagacctcgtgaaagtcctgtatctggagaggtctgagaaaggtcactgctag

SEQ ID NO: 218271 - DNA, 1374 bp, synthetic construct
  misc_feature 1..1374: note = Description of Artificial Sequence: Synthetic coding sequence
  source 1..1374: mol_type = other DNA
atgcgtaagaaatggaagatgggcggtatgaagtatatttttagtcttctgtttttcttgctcctcgaagggggaaagaccgagcaggtgaaacattccgaaacatactgtatgtttcaggacaagaagtacagggtgggggagagatggcacccttatttagagccttatggtctggtatactgtgtaaattgcatttgctcagaaaacgggaacgtactgtgctctcgcgtgaggtgcccgaatgtccactgcttgtctcccgtacacattccacatctttgttgtcccagatgtcctgatagcctccccccagttaacaataaggtgacctcaaagtcgtgtgagtacaacggtaccacataccaacatggagaattattcgtcgccgaagggctgttccagaaccgtcaacctaatcagtgcacacagtgtagctgctccgaaggtaacgtttactgcgggcttaagacctgccctaagctgacctgcgctttccccgtgtctgtgccggatagctgctgtagggtgtgcagaggagatggggagctctcctgggagcacagcgatggtgatatcttcagacagcccgcaaacagggaggccagacactcgtaccacagaagccactacgaccccccaccctctcggcaagccggtggcctgagtcggttccccggtgcaagaagccaccggggagccctcatggactcccaacaggcctcggggacaattgtgcagatagtgattaataataagcacaaacacggccaagtctgcgtgtcaaacggcaagacatattcacacggtgagtcctggcatcctaatctgcgagcattcggcattgtggagtgcgttctgtgcacttgtaatgtcaccaagcaggaatgcaaaaagattcactgccccaataggtacccctgtaaatatccacaaaaaatcgatggaaaatgctgtaaagtttgtcccggaaagaaggcgaaggaagagctgcctggccagtccttcgacaataaaggctacttttgtggtgaggagaccatgccggtctatgagtcggtttttatggaggatggcgaaaccacacggaagatcgctttagaaactgaacgcccacctcaagttgaggtgcacgtgtggaccatccgcaagggaatcctgcagcactttcatatcgaaaaaatcagcaagcgcatgtttgaggagctgcctcatttcaagttggtgactaggacgacactgtcccagtggaaaatcttcactgagggagaggcgcaaatcagtcaaatgtgcagcagtagggtctgtcgaactgaactagaggatttggtcaaagtgttgtatcttgagcgttccgagaagggccactgctag

SEQ ID NO: 218272 - DNA, 1137 bp, synthetic construct
  misc_feature 1..1137: note = Description of Artificial Sequence: Synthetic coding sequence
  source 1..1137: mol_type = other DNA
atgcgtaagaagtggaagatgggtgggatgaagtatatcttcagccttcttttttttctactgctcgaaggtggaaagactgaacaagtgaagcactcagagacttactgcatgtttcaggacaagaagtaccgcgtcggggaaaggtggcatccatatttggagccctatgggctggtgtactgcgtgaactgtatctgctctgagaacggaaacgtcctctgtagcagagtgcgatgcccaaatgtccattgcctgagtccagttcatatccctcatttgtgttgcccccgatgcccaggcgacggcgaactctcctgggagcactctgacggggatattttcagacagcccgctaaccgggaagctagacacagctaccatcgatcccattatgacccccctccgtccagacaagccggtggcttgagtcggtttccaggcgctaggtctcaccgcggtgccctgatggactctcagcaggcttcaggcaccatcgtgcagatcgtaatcaacaataagcacaagcacgggcaagtgtgcgtttccaacggcaaaacttattcccatggcgagtcttggcaccccaacttacgtgcgtttgggattgtggagtgcgttttgtgcacgtgcaacgttaccaaacaggagtgcaagaagattcactgtcctaaccgatatccatgtaaatatcctcagaaaatagacggcaagtgctgcaaagtctgtccaggcaaaaaggccaaggaggagttacccggacagagtttcgacaataagggatatttctgcggcgaggaaacaatgcctgtgtatgagtctgttttcatggaggacggagagacaactagaaagattgctctggaaacagagcgtccaccacaggtggaggtccacgtgtggaccattagaaagggcattctgcagcatttccacatagaaaaaatatctaaacgcatgtttgaggagctgccacactttaagctcgttacccgcactacattaagtcagtggaagatcttcacagagggtgaggcccagatcagccagatgtgctcctctagggtgtgtcggaccgaactggaggatctggtgaaagtgctttacctcgagcgaagcgagaaaggccattgctag

SEQ ID NO: 218273 - DNA, 1356 bp, synthetic construct
  misc_feature 1..1356: note = Description of Artificial Sequence: Synthetic coding sequence
  source 1..1356: mol_type = other DNA
atggttccggaagttcgggtcctctcttccctgctcgggctggcacttctttggttcccactggatagccatgccagggccaggcccgatatgttttgtctgtttcacggaaagcgttattctcctggggagagttggcatccctacttagagccccagggcctgatgtactgtctgcgttgcacttgttccgagggcgctcacgtcagctgctaccgactgcattgcccgccagttcattgtccacagcctgtaactgagcctcaacagtgctgccccaagtgtgttgagccgcatactccctcgggccttagagccccaccgaagagttgccagcataacgggactatgtaccagcacggcgaaatcttcagcgcccacgagctctttccttcccgactgcctaaccaatgcgttctgtgctcctgcaccgagggccagatttactgcggtctgaccacttgtccagaacccggttgccccgcacctctccccctgcctgacagctgttgtcaggcttgtaaggatgaggcctcagagcagtctgatgaagaggacagtgttcagagcctgcatggtgtgagacatccgcaagatccctgttccagcgatgccggacgaaagaggggacccggaacccccgcacctaccggccttagcgccccactgtctttcattccaagacacttcagaccaaagggagccggttcaactacagtgaagatcgttctgaaggagaaacataaaaaggcttgcgtgcatggaggcaagacttactctcacggggaagtatggcaccccgctttccgggcatttgggcctcttccctgtattctctgtacatgtgaggatgggaggcaagattgtcagagagtgacctgcccaacagagtacccttgccggcacccggaaaaggtagcagggaagtgctgcaagatttgtcctgaggataaggcggaccctggccattcagaaatttcctcgactcggtgccccaaggcccctggaagggttttggtgcacacatccgtctccccatcccccgacaatcttagaagattcgccctggaacacgaggccagcgatctggtggagatctacctctggaaactcgttaaagacgaagaaaccgaggcacagcgtggcgaggttccaggacctcgtccacactctcaaaatctgccactggatagcgatcaggagtcgcaggaggccaggctccctgagaggggcaccgctcttccgacagcccgatggcccccacggagatctttggagaggttaccgtcacccgatcctggtgccgaaggtcacgggcagagtaggcagtctgatcaggacatcacaaagacctag

SEQ ID NO: 218274 - DNA, 846 bp, synthetic construct
  misc_feature 1..846: note = Description of Artificial Sequence: Synthetic coding sequence
  source 1..846: mol_type = other DNA
atgtaccagcacggcgagattttctcggcccatgagctgttcccatcaaggttacccaaccagtgtgtgttgtgtagttgcactgaagggcaaatctattgcggcctgactacctgccccgaaccaggctgcccggctccattgcctctccccgacagttgttgccaggcatgcaaggcgggtagttcctggggactgttgtgtagcgtcagcgattttcaccctagttgtcatttgcagagacatccccaggacccttgttcgtctgatgccggacgcaagcggggtcccggtacacctgctcccacaggcttaagtgcgcctctgtctttcatccccagacactttagacccaagggtgcaggctctaccaccgtgaagatcgtactgaaggaaaagcataagaaagcctgtgttcacggaggcaaaacttattcccatggcgaggtgtggcatcccgctttcagggcattcggacccctgccttgcatattgtgcacatgtgaggatgggcgtcaagactgtcagagggtaacctgtcccacggaatatccatgccgtcatccagaaaaagtggctgggaagtgctgcaagatctgtcctgaggataaagctgatccagggcacagtgagatctcatctactcggtgtccaaaagccccaggaagggtcctcgtgcacacctcagtgagtccctcacctgacaaccttcggagatttgccctggagcacgaggcctcagacttagtcgaaatctacctgtggaagctggtgaaaggagtgtttctggctcagactttagagctgaaagtcaccgcaagccctgataaagtcaccaagacctag

SEQ ID NO: 218275 - DNA, 1290 bp, synthetic construct
  misc_feature 1..1290: note = Description of Artificial Sequence: Synthetic coding sequence
  source 1..1290: mol_type = other DNA
atggtgcctgaagtgcgagtcctgtcttcactcctgggtctggccctgctctggtttccacttgacagccacgccagggccagaccagacatgttctgcctgtttcacgggaaacggtactctcccggagagtcatggcacccataccttgagccccagggactgatgtattgtctgcggtgtacctgctccgagggagctcacgtaagctgctacagactccattgtcctcccgtgcactgccctcagcccgtaaccgagccccagcaatgttgccctaagtgcgtggaaccccacactccctctggccttagagcacctccgaagagctgtcagcataatggtacaatgtatcagcacggcgagattttctctgcccacgagctgttccctagcaggctgccaaatcagtgtgtactttgcagctgcacggagggtcagatctactgcggccttacgacgtgtccagagcctggctgccctgcgccactgcctttgcctgatagttgctgtcaggcttgtaaagacgaggcttcagaacagtctgacgaggaagacagtgtgcagtccctccacggagtgcgtcaccctcaagatccttgctcttccgatgctggacggaagcgaggacccggtacccctgcccctacaggtctgtccgcccctctatctttcataccgaggcattttagaccaaagggcgctgggagcactacagtgaagatcgtgctgaaggagaaacataaaaaagcgtgcgtacacggcggaaagacatactcccacggcgaggtgtggcacccggcttttagagccttcgggcctctcccctgcatcctttgcacttgcgaagacggaaggcaggattgtcagagggtgacgtgccccacggaatatccatgccgtcacccagaaaaggtcgcaggtaagtgttgtaagatttgtccagaggataaggctgatcccggacattcagagatatcatccacgaggtgccccaaggcccctggcagggtcctcgttcacacttcagtcagccctagtcctgacaacttacggaggtttgccctcgagcatgaagcgtccgaccttgtcgaaatttatttgtggaagctggtgaaaggcatctttcacttgactcagatcaaaaaagtgaggaagcaggacttccaaaaagaggcccaacactttcgattgttggccggacctcatgagggccactggaacgtgttcctggcacagaccttagaactgaaagtaacagcatcaccagacaaggtgactaagacttag

SEQ ID NO: 218276 - DNA, 840 bp, synthetic construct
  misc_feature 1..840: note = Description of Artificial Sequence: Synthetic coding sequence
  source 1..840: mol_type = other DNA
atgtaccaacacggtgaaatcttttccgctcacgagctctttcctagccgtctgcccaatcagtgcgttctctgtagttgtaccgaggggcagatatactgtggtctgaccacatgtccagagccagggtgcccagcgcctctaccgctgcccgattcgtgctgtcaggcgtgcaaagatgaggcatctgagcagagcgacgaagaggatagtgtgcagagtctccacggggttcgccaccctcaagatccatgctcatccgacgcaggtagaaagcggggtccagggacgccagcacctactggcctctcagccccacttagtttcatcccccgacacttccgacccaagggtgccggatctaccacggtgaagatcgtacttaaggagaagcacaaaaaggcatgcgtccatggaggaaaaacctacagccacggcgaagtctggcaccccgcattccgggctttcggaccactgccctgtattctgtgtacctgcgaagatggccgacaggattgtcagagagtgacgtgtcccaccgaatacccttgccgccaccccgagaaggtggccggtaagtgctgtaagatctgtccagaggataaagccgaccccggtcacagtgaaatcagcagcactcgctgcccaaaggccccaggaagggtcctggtgcatacatcggtttctccaagccctgacaacttaagaagatttgcactggaacacgaggcttcagacctggtcgaaatctacctatggaagctcgtcaaagacgtgttcctggcccagacactggaactgaaggtgacggcttccccggacaaagtgactaaaacctag

SEQ ID NO: 218277 - DNA, 498 bp, synthetic construct
  misc_feature 1..498: note = Description of Artificial Sequence: Synthetic coding sequence
  source 1..498: mol_type = other DNA
atggaaatgtttcaaggcctcttgttgctgcttctcctgtccatggggggtacatgggcaagcaaagagccattgcgcccacggtgccggcctatcaacgctaccctggctgtggagaaagaaggctgtccggtctgtatcacggtgaatactacaatctgcgctggttattgtcctacaatgaccagggtgctccagggagtgttgcctgccctcccccaagtggtgtgcaattatcgggatgtgagattcgaatccattcgattgcccggatgccccaggggagtgaaccctgtcgtatcctatgcagtcgccctgtcctgtcagtgtgcactctgtagacgaagcactactgactgtggcggacctaaagaccatccactgacctgtgacgaccccaggtttcaggattctagttcttctaaggcaccaccaccctctctcccgagtccaagtaggctgcctgggccttctgacactcctattctcccccagtag

SEQ ID NO: 218278 - DNA, 507 bp, synthetic construct
  misc_feature 1..507: note = Description of Artificial Sequence: Synthetic coding sequence
  source 1..507: mol_type = other DNA
gctcctcggatggagatgtttcagggtttacttctccttcttctgttatcaatgggtgggacctgggctagtaaggaaccactgcggccaaggtgccggcctattaacgccactctggcagtggagaaggagggctgtccagtctgcatcactgtgaacaccactatctgcgcagggtactgtcctacaatgacccgcgtgctgcagggagttttacctgccctgccacaagtggtgtgcaattacagggacgttcgctttgagtccataagactccccggatgtcccaggggagttaacccagttgtgagttatgctgttgccctctcatgtcagtgcgctctctgcaggaggagcaccactgactgtggcggtcccaaagaccaccccctgacatgtgatgaccccaggttccaggatagctcgtcgagtaaggcacccccaccgtcactgccgagcccctcgcggctccccggtccatccgacaccccaatcttaccgcagtag

SEQ ID NO: 218279 - DNA, 654 bp, synthetic construct
  misc_feature 1..654: note = Description of Artificial Sequence: Synthetic coding sequence
  source 1..654: mol_type = other DNA
atggcgcctggcagcagaacgagtctcctgcttgcctttgctctgttatgtcttccctggcttcaggaagctggggctgtgcaaactgttcccttaagccgcctgttcgaccatgctatgctgcaagcccatagagcacaccagctcgctatcgatacttatcaggaattcgaggaaacctacatacccaaagatcagaagtactcttttctccatgattcgcagacgtctttctgtttcagtgattctatccctacaccgtcgaacatggaagaaacacaacaaaagagtaacttagaactactcagaatctctctcctgttgattgagagctggctcgaacccgtgcgcttccttcggagtatgttcgccaataacctggtgtatgacacctccgactcagacgattaccatctgctgaaggatctagaagagggaatccagacgctgatggggcgattggaggacggttcccggaggacagggcagatcttgaaacagacctactccaaattcgatactaattcccacaaccatgatgcgcttctgaagaactacggcttgttatactgcttcagaaaggatatggacaaggtggaaaccttcctgaggatggttcaatgccggtctgtcgaaggttcttgcgggttctag

SEQ ID NO: 218280 - DNA, 771 bp, synthetic construct
  misc_feature 1..771: note = Description of Artificial Sequence: Synthetic coding sequence
  source 1..771: mol_type = other DNA
atggctcctggtagccgcacatcgctgctcttggcctttgcactcctgtgtttaccatggctccaggaggccggagccgtgcagaccgtgccactatcccggcttttcgaccacgcgatgttgcaggcccaccgggctcaccagctggccattgatacataccaggaattcgaggagacctatatccccaaggatcaaaagtactcatttctgcatgattcacagaccagcttctgcttctcagacagtattcccactccaagtaatatggaagagacccagcagaagtcaaatctcgagcttttgagaatttcgctcctgctcatagagagctggttagagccggttcggtttctgcgttccatgttcgctaacaatctcgtgtatgatacaagcgacagcgacgattatcaccttctgaaagatctggaggaagggatacagacactaatgggcgtgcgtgtggcccctggcgtgactaaccctgggactcctctcgctagtagagcgggaggggagaaatattgctgccctttattcagttctaaggcactgacacaggagaactccccatactcctcttttaggcttgttaatccaccaggtttgtccctacatccagagggggagggtgggaaatggatcaacgagcggggtagggaacagtgcccgagtgcctggcccctgctcctgtttctgcattttgctgaggctggcagaagacagccacctgattgggccgatccccaagcagatcttcagcaggtctag

SEQ ID NO: 218281 - DNA, 369 bp, synthetic construct
  misc_feature 1..369: note = Description of Artificial Sequence: Synthetic coding sequence
  source 1..369: mol_type = other DNA
atggcacccggttctcgaacctctctcctgctggcatttgcattgttatgtcttccctggctccaggaggccggagcggtccagacagtgccactgtctaggctgtttgaccacgctatgcttcaagctcaccgggctcaccagctggcaattgacacgtaccaggagtttcggcttgaggatggctctcggagaactggccagatactgaagcaaacgtattccaaattcgacactaacagtcacaatcacgatgccctgctgaagaactacggactgttgtactgtttcaggaaagatatggacaaggttgaaactttcctccgcatggtacaatgtcgtagcgtggagggcagttgcgggttctag

SEQ ID NO: 218282 - DNA, 552 bp, synthetic construct
  misc_feature 1..552: note = Description of Artificial Sequence: Synthetic coding sequence
  source 1..552: mol_type = other DNA
atggctccaggttccaggacatccctgcttctggccttcgccttactctgtctcccgtggcttcaggaggccgaaacttatatcccgaaggaccagaagtattctttcctacacgatagtcagacatccttctgtttttcagactccatcccaaccccatcaaacatggaggaaacccaacaaaaaagcaatttggaattattaaggatttccctgctccttatcgagtcatggctggaaccagtcaggtttttgcgatctatgttcgccaataacctagtttatgacacctccgactccgatgactaccacttattgaaagatctggaagaaggtatccagacccttatggggcgtctggaggatggtagcagaaggactggacagatactgaaacaaacatacagcaagttcgataccaactcccataatcacgacgcactgcttaaaaattatggtctcctgtactgtttccggaaggacatggataaagtggaaaccttcctgcgcatggtgcaatgccgcagtgtggaagggtcttgcggtttctag

SEQ ID NO: 218283 - DNA, 504 bp, synthetic construct
  misc_feature 1..504: note = Description of Artificial Sequence: Synthetic coding sequence
  source 1..504: mol_type = other DNA
atggccgctgggagtaggaccagcctgctgcttgccttcgccctactgtgcctcccatggctgcaggaggccggtgccgtccagaccgtcccattgagcagactcttcgatcacgccatgctgcaagcccaccgggcacaccaactggctattgacacctatcaggaatttgaagagacttacatccctaaggatcagaagtactctttccttcacgatagtcagacttccttctgcttcagcgattcgatccccaccccgagcaatatggaggagacccagcagaagtcaaacctggaacttttacgtataagcctcctgcttattgagtcctggcttgagcctgtgcgcttccttaggtctatgttcgccaacaatctcgtctatgataccagtgatagcgacgactaccacttactcaaagacctcgaggagggcatccaaactttaatgggggtccgagtggctccaggggtggctaatcctggtacacctctcgcatag

SEQ ID NO: 218284 - DNA, 369 bp, synthetic construct
  misc_feature 1..369: note = Description of Artificial Sequence: Synthetic coding sequence
  source 1..369: mol_type = other DNA
atggccgcagggtcgaggactagcctgctgttggccttcgctctgctttgcctgccgtggctgcaagaagctggcgctgtgcagaccgtgcccctttctcgcttattcgatcacgcaatgctgcaggcacaccgggcacatcagctggccattgatacctaccaagaattccggttggaagacgggtctcggcgaacgggccagattctgaaacagacgtattccaagttcgacaccaatagtcataaccacgacgctctgttaaaaaactatggtcttttatattgctttagaaaagatatggataaagttgagactttcctaaggatggtgcagtgccgctcagtcgaggggtcatgcgggttttag

SEQ ID NO: 218285 - DNA, 654 bp, synthetic construct
  misc_feature 1..654: note = Description of Artificial Sequence: Synthetic coding sequence
  source 1..654: mol_type = other DNA
atggccgcaggctctcggacgtcgttgcttctcgcttttgccttgttgtgccttccttggctgcaagaggccggtgccgttcagacagtgcctctctcccgcctctttgaccatgcaatgcttcaggcgcaccgcgctcaccagcttgccatcgatacctatcaggaatttgaggagacttatatacccaaagaccagaaatactccttcctccacgactcgcagactagtttctgcttttctgacagcatacctactccatcaaacatggaggagacccaacagaaaagcaacttggagctgctgcggattagtctgttgctgattgagtcatggcttgagccagtgcggttcttgaggagcatgttcgccaacaatcttgtttacgacacctctgatagtgacgattaccatctactgaaggacctggaggagggtatacagacccttatgggaagactggaggacggctcgaggaggacagggcaaatcctgaagcaaacctatagcaagttcgacactaattcccacaaccacgacgccctgcttaagaattacggcttgctttattgtttccgcaaggatatggataaggtggagacgtttctccgcatggtgcagtgtcgcagcgtggagggctcttgtggtttctag

SEQ ID NO: 218286 - DNA, 483 bp, synthetic construct
  misc_feature 1..483: note = Description of Artificial Sequence: Synthetic coding sequence
  source 1..483: mol_type = other DNA
atggcagctggctcgaggacctccctgctccttgcctttgcattgctgtgtctgccctggctccaggaggcggattccattccaactcctagcaatatggaggaaacccagcagaaatcgaacttagagctgctccggatctcactgctccttatcgagagctggcttgagcccgtacgctttctgcgctcaatgttcgccaacaacttggtctacgacacatcagacagcgatgattatcacctgctcaaggatctggaggagggaatccagacactcatgggacggctggaggacggatctcgtcgcactggtcagattttgaagcagacttattctaaatttgatacgaatagtcacaatcatgacgccctgctgaaaaattacggcctcctctattgctttcgaaaagacatggacaaagtggagaccttcctgaggatggtgcagtgtaggagtgtagagggcagttgtggattctag

SEQ ID NO: 218287 - DNA, 498 bp, synthetic construct
  misc_feature 1..498: note = Description of Artificial Sequence: Synthetic coding sequence
  source 1..498: mol_type = other DNA
tgaggatctcgaacctccttgctcctggccttcgcactcttatgcctgccatggcttcaggaagccggtgcggtacagaccgtccccctgtccagactgtttgaccatgctatgcttcaggcccacagagctcatcagctagccatagacacttaccaagaattcgaagagacatatatcccaaaagaccagaagtacagctttctgcacgatagtcagactagcttttgttttagcgattctattccaactccttcaaacatggaagagacacagcagaaatccaacctcgaactcctccggatcagcctcctcctcattgagtcttggttagagcccgtgcggttcctgcgcagcatgtttgccaacaatctcgtgtatgacacgtctgactccgacgactaccatttgctgaaagatttggaggaggggattcagactctcatgggcgtcagggtggctcctggtgtggccaacccgggaacccctctggcgtag

SEQ ID NO: 218288 - DNA, 669 bp, synthetic construct
  misc_feature 1..669: note = Description of Artificial Sequence: Synthetic coding sequence
  source 1..669: mol_type = other DNA
atggccgcaggttcccgcacctccctcctccttgcctttgctctgctctgcctgccatggctgcaagaggcaggggcagtacaaacagtgcccctctctcggctgttcaaggaggctatgctacaggcccacagagctcatcaacttgccattgacacgtatcaggagtttattagcagttggggtatggaggcgtacattacaaaggagcagaaatatagcttccttcatgattcccagacaagtttttgtttttctgattctatccctacatcgtcaaacatggaagagacccaacagaaatccaacctggagttgctccatatctctcttctgttgatagagtcccgcctggagccggtccggttcctgaggagtacatttaccaacaacctggtgtatgatacttctgacagcgacgattatcatttactaaaggacctggaggaaggcattcagatgctcatgggtcggctggaggacgggtcacacctgacaggccagacactgaaacagacatactcaaagtttgataccaactcccacaatcacgacgccctgctgaagaactacggacttctgcattgctttaggaaggatatggacaaggtggagacgttcctaaggatggtgcagtgcaggagcgtggagggcagttgtgggttctag

SEQ ID NO: 218289 - DNA, 387 bp, synthetic construct
  misc_feature 1..387: note = Description of Artificial Sequence: Synthetic coding sequence
  source 1..387: mol_type = other DNA
atggaagagactcaacaaaagtccaacctcgagctgctgcatattagcctgctgttgatagagtctcggctggaaccagtgaggttcctgaggtccacgtttacaaacaatctagtctacgacacatctgactctgatgactaccacctgctcaaggatctcgaggaaggcatacagatgctgatgggcaggctggaagatggatcccacctgacggggcagaccctcaagcagacttactccaagttcgacacaaattcccataatcacgacgccctcctcaaaaactacggcctgctgcactgcttcagaaaagatatggacaaagtggaaacgttcctgcggatggtgcagtgtaggtctgtcgagggctcttgtgggttctag

SEQ ID NO: 218290 - DNA, 522 bp, synthetic construct
  misc_feature 1..522: note = Description of Artificial Sequence: Synthetic coding sequence
  source 1..522: mol_type = other DNA
atggccacaggaagtcgcaccagcctgctgttagccttcgccctgctatgcctgccttggttgcaggaggcgggtgctgtgcaaaccgtccctctcagtaggttgtttaaggaggccatgcttcaggcccatcgcgcacatcagctcgccatcgacacatatcaggaattcatttcctcatggggcatgggtgctggtcagggttggcaagagggcgtgactttccctcactggggatccaatggtcggcgactccgtagctctggattattctcagaagccaagatgcaggccgacgagcatcggttgagtcaggtgcccaggcgtgttacggtaggcgcagggcttcagcaccgcaaacagtggagtttccttgtgggaggtccctctccccgtaagaaacctatcagccagcgaaatcggtccatccattcatgcatgactccaaggccaccttctgcctcccagactcttttcaggcatccgcctacctggcggaaacggtccaggaatccgacgtag

SEQ ID NO: 218291 - DNA, 420 bp, synthetic construct
  misc_feature 1..420: note = Description of Artificial Sequence: Synthetic coding sequence
  source 1..420: mol_type = other DNA
atggccgctgattctatacctaccagtagcaacatggaagagacgcagcagaaatctaatcttgaactgctgcacatctctctactactgattgagtccagacttgagcccgtgcgcttcctgcgtagcacctttaccaacaatttggtctatgatacctctgactcggacgattatcatctgctgaaggatctggaggagggtatacaaatgctgatggggcgactggaagatgggagccacctgactggccagacactgaagcagacttattccaagtttgacacaaatagtcataatcacgatgctctgttaaagaactacggactgctgcactgtttccgaaaagacatggataaggtggaaaccttccttagaatggtccaatgtcgttccgtcgaggggagctgtggcttctag

SEQ ID NO: 218292 - DNA, 1962 bp, synthetic construct
  misc_feature 1..1962: note = Description of Artificial Sequence: Synthetic coding sequence
  source 1..1962: mol_type = other DNA
atggctgacactctgccctctgagtttgatgttatcgtgattggaacaggactccccgagagtatcatcgccgcagcttgtagtcgatccgggagacgtgtattgcatgtggattctagaagttattacgggggaaattgggcttcctttagcttctcaggattgttatcctggctcaaggaatatcaggaaaacagcgacatagtgtccgatagccctgtctggcaggaccagatcctggaaaatgaggaggccatcgccttgtctcgaaaagataaaactattcagcacgtggaagtattttgctatgcatcccaggacctgcacgaggacgtggaagaagctggggctctgcagaaaaaccatgcgctggtgacctcggccaactctaccgaggccgcagatagtgcctttctcccaacagaggatgagtccctcagcactatgtcatgtgaaatgctgaccgagcagacacccagcagcgaccctgagaatgcactggaggttaacggggcagaagtaacaggtgagaaggaaaaccattgcgacgacaaaacttgtgttccatcaacgtccgctgaggacatgtctgagaatgtgccaatcgcagaggacactactgaacagcccaaaaagaatcggattacctactctcaaatcatcaaggagggccgtcgattcaacattgaccttgtgtcaaagctgttgtactcaagagggttgttgattgatctactgattaaatcgaacgtttctagatacgcagagtttaaaaatataacccgtatcctcgctttccgggaggggagggtggaacaagtaccgtgttcgagggctgacgtgtttaactcaaaacaattgaccatggttgagaaacgtatgcttatgaagtttctgactttctgtatggaatacgagaaatatccagatgagtataaagggtacgaggaaatcactttttatgaatatctgaagactcaaaaacttaccccgaacttgcagtacatagtgatgcatagcatcgcgatgacgtcggaaaccgcgagctcaaccattgacggactgaaggcaactaagaacttcctgcactgtctaggcaggtatggaaatacaccatttctatttcctttgtatggccagggagagctgccacagtgtttttgtaggatgtgcgctgtgttcggaggcatctactgcttacgccattccgttcagtgtctcgtagtcgacaaggagtcgcgaaaatgtaaagcaattatcgatcagtttggacaacgcatcatctccgagcacttcctcgtggaagattcatacttccctgagaacatgtgctcaagagtgcagtaccgccaaattagccgggcagtgctgatcacagatcgatctgtgcttaaaacagatagtgaccaacagattagtatcctgactgtgcccgcagaggagcccggtacgttcgcagtgagggtgattgagctgtgtagctctactatgacttgcatgaagggtacctacctcgttcatctgacgtgcacctcctctaaaacagctcgagaggatctcgagtctgttgttcagaagttgttcgtcccttacaccgaaatggaaatagaaaatgaacaggtggagaagccccgaatcctatgggcactatacttcaacatgcgcgatagtagcgacatatcacgatcctgttacaacgacttgccatctaatgtatatgtgtgctccggtcccgactgtggcctgggtaatgataatgctgttaaacaggctgagaccttgttccaggagatttgcccgaatgaggatttttgccccccaccacccaatccagaggatatcatactggatggtgacagccttcaacctgaggcatccgagtccagtgcgatacctgaagccaattcggagaccttcaaggaatcaactaacctgggcaacctggaagagagtagtgagtag

SEQ ID NO: 218293 - DNA, 333 bp, synthetic construct
  misc_feature 1..333: note = Description of Artificial Sequence: Synthetic coding sequence
  source 1..333: mol_type = other DNA
atggcagatacccttccaagcgagttcgatgtcatagtgatcggaacaggcctgcccgaatcaatcatcgccgctgcctgttctagatccggtcggcgagtcctgcacgtggactcccgttcttactacgggggaaactgggcctccttctcgttctcgggattactcagttggcttaaggagtaccaggagaactccgacatcgtgagcgatagtccagtctggcaggatcaaattctggaaaatgaagaggctattgccttgagtaggaaagacaaaacaatacagcacgtcgaggtgttctgttatgccagatcgacactcctgctttag

SEQ ID NO: 218294 - DNA, 1518 bp, synthetic construct
  misc_feature 1..1518: note = Description of Artificial Sequence: Synthetic coding sequence
  source 1..1518: mol_type = other DNA
atgtcctgcgagatgctcacagagcaaacgccctcaagtgaccctgaaaatgctctggaggtgaatggggcagaagtaacaggggaaaaagaaaaccattgcgatgataagacctgcgtcccaagcacgtctgccgaagatatgtcagagaatgtgccaattgccgaggatactacagagcaaccaaagaaaaatcggatcacctattcccagattataaaagagggcaggaggttcaatattgacctagtcagcaaactgctgtattctcggggtctcctcattgatctgctcataaagtccaacgtatctagatacgccgagtttaagaacattaccaggatcctcgcctttcgcgaggggagagtcgagcaggtaccctgctccagggcagacgtgtttaactcaaaacagttaactatggtggaaaaaagaatgcttatgaaatttctgaccttctgcatggagtatgagaagtatcccgatgagtacaagggctacgaggagattacattctatgaatacctcaagacgcagaaactgacgcctaacctgcaatacatcgtcatgcacagcatcgcaatgacatctgagacggcttcgagcacaattgacggtctgaaagctacgaaaaattttctgcactgtttaggcaggtacggcaatacaccatttctatttccactgtatggccagggggagcttccccagtgtttttgccggatgtgcgcggtgttcgggggaatctactgcctgcgccattctgtgcaatgcctcgtagttgataaagagagcaggaagtgcaaggctattatcgaccagttcgggcagcggatcatcagcgagcattttctggtggaagattcttatttcccggaaaacatgtgctctagagtgcagtatagacagatttcaagagccgtgctgataaccgacaggtccgttttgaaaacagactcagatcaacagatttcaattttaactgtgcccgctgaggagcccggaactttcgctgtcagggtcatcgagctgtgtagtagtacaatgacatgtatgaaaggcacatacctggttcatctgacgtgcacatctagcaaaaccgccagggaggatctggaaagcgtggtgcaaaagctgttcgtgccctatacagagatggaaattgagaacgaacaagtggagaagcctcgcatcctgtgggccctgtactttaacatgagggactcaagcgacatcagtagaagttgctataatgacctgccctccaacgtctacgtctgctccggcccagactgtggcttgggtaatgataacgcggttaagcaggcagagactttgttccaggaaatttgccctaatgaagacttctgcccccctcctcctaacccggaggatatcatcctagatggggatagcctgcaacctgaagccagcgagtcgtcggccattcccgaggccaactccgagactttcaaggaaagcaccaacctgggcaacctggaagaatcctcagagtag

SEQ ID NO: 218295 - DNA, 1971 bp, synthetic construct
  misc_feature 1..1971: note = Description of Artificial Sequence: Synthetic coding sequence
  source 1..1971: mol_type = other DNA
atggcagataatctcccaacagagtttgacgtcgtgataatcggaacaggcctaccggaaagtatcctggcagccgcatgtagtagatccggccagagagtgctccatattgattcgaggtcttattacgggggtaattgggccagcttctctttttccggactgctaagttggctgaaagaataccagcaaaacaacgatatcggagaggaaagcactgttgtctggcaagacctaatccacgaaaccgaagaagccatcaccctgcgaaagaaggacgagaccattcagcatacagaagcattttgttatgcctcccaagatatggaggataacgttgaggaaattggggctctccaaaagaatcctagtttgggagtctcaaacaccttcactgaggtgcttgactcggcattacccgaggagtctcagctgagctatttcaattctgacgagatgccagcaaaacacacccagaaatcagacaccgagattagcctggaggtgacggacgtggaggagagtgttgagaaggaaaagtactgcggggacaaaacgtgcatgcatacggtgagcgataaggacggggataaggatgaatcaaaaagcactgtggaggacaaggctgatgagcctatccggaaccgtattacttacagccagatcgtaaaagagggtagacgttttaatattgacctagtatcaaagcttctatacagtcaggggttgttgatcgacctcctcatcaaaagcgatgtcagtagatacgttgaattcaagaacgtgaccagaattctggcgtttagagaggggaaggtggaacaggtgccgtgcagtcgcgctgatgtgttcaatagcaaggaactgaccatggtcgagaaacgaatgctgatgaagttcctgaccttttgtctggagtacgaacagcatcccgacgaatatcaagctttccgccagtgctctttttcagagtaccttaagactaaaaaattgaccccaaacctgcagcacttcgtacttcacagcatcgcaatgacttccgagagcagctgcaccacaatcgacgggctaaacgctacaaaaaactttcttcagtgtctaggcagattcggaaataccccttttctctttcccctgtatggccaaggagagatcccacagggattctgcagaatgtgtgccgtgtttggaggaatctactgtcttcgccacaaggttcagtgctttgtcgtcgataaagagtcaggtaggtgtaaagccatcatcgaccattttggtcaaagaatcaatgcaaaatatttcatcgtggaggactcataccttagcgaggaaacctgtagtaacgtacagtacaaacaaatctcccgtgccgtgctgatcacggatcagtctatcctgaagactgacctcgaccaacagaccagtatcctgattgtgccaccggcagagccgggtgcctgtgccgtccgagtgaccgagctttgctctagcactatgacatgtatgaaggatacttatttggtccatctcacttgtagcagttccaaaacagcacgagaggatcttgaaagcgttgtcaagaagctgttcactccctacaccgaaactgagatcaatgaggaggagctgacgaagccgaggctgctgtgggccctctactttaatatgcgggactcttccggcatctctaggtcttcttacaacgggcttccgagtaatgtctatgtttgctccggcccagattgcggattgggcaatgagcatgccgtaaagcaggccgagaccctctttcaggaaatctttccaactgaagaattttgtccacccccaccgaaccctgaggacatcatcttcgacggggatgataaacagcccgaggccccagggacaaataacgtcgtcatggccaaacttgagagctcggaggagtccaaaaatctggaatcccccgaaaaacatttgcaaaactag

SEQ ID NO: 218296 - DNA, 1641 bp, synthetic construct
  misc_feature 1..1641: note = Description of Artificial Sequence: Synthetic coding sequence
  source 1..1641: mol_type = other DNA
atggagcagcgtcgagtgaccgacttcttcgccaggcggaggcctggaccaccacgcatcgctcccccaaagctagcctgccggacaccaagccctgcgaggcctgctctgcgcgcaccagcttcagccacctccggaagccgtaagcgggcaagaccacctgctgcacccggtagagatcaggccagacctccggctcgaagacggctgcgactgagtgtggatgaggtttcgtcaccgtccacgccagaggcccctgatataccagcttgcccgagcccgggacaaaagatcaagaaatctacaccggctgccggacagccgcctcacctaactagcgcccaagaccaggacaccatttccgagctggcctcttgtctgcaacgggctcgcgagctgggcgctcgcgttcgagctcttaaggcgtctgcacaggacgcgggagaatcatgcacccccgaagctgaagggagacctgaagagccctgcggggagaaggcacccgcatatcaacgttttcatgcactagctcagcccggtttgccaggtctcgtgctgccatataagtatcaggtgcttgcagagatgtttaggtccatggacacaatagtgggaatgctccacaaccgcagtgagactccgaccttcgcaaaggtgcagcgcggtgttcaagatatgatgagacgtagatttgaagaatgcaacgtgggccagattaagacagtgtaccccgctagctatcggttccggcaggaacgcagtgtgcccacattcaaggatggaactcgacggtccgactatcagctcaccatcgagccactgctcgagcaggaggcagacggcgctgcaccgcagcttaccgctagtaggctgctgcagcgcagacagattttttcccagaaattggtcgagcatgtcaaagaacaccacaaggcgttcctcgccagcttatctccggctatggtagtacccgaggaccagctgacccgttggcatcccaggttcaatgtggacgaggtgcccgacatcgaaccagctgctctgccgcaaccgcctgcgaccgagaaactgacgactgctcaggaggtactcgccagagctcgcaatttaatttcccccaggatggagaaggctctaagccagctggccctcaggagtgctgctccaagttcacccggaagcccacgcccagcgctgcctgccactccaccagccacacctcccgctgccagtccgtctgccctgaaaggtgtaagtcaggacctcctcgaacggattagagccaaagaggcacagaaacaactcgctcagatgacaaggtgccccgaacaggaacagcgccttcagcggcttgagcgtctgcctgaactcgcacgggtgcttcgctctgttttcgtgagcgagcgaaaacctgccctctcaatggaggtggcgtgtgccagaatggttggttcttgttgtaccattatgagcccaggcgagatggagaagcatttgctgctgctgagtgagctgcttcccgattggctctctcttcacaggatccggaccgatacctatgtaaagctggataaagctgctgacttagcccatattaccgctcggttggcccaccagactagggccgaagaagggctttag

SEQ ID NO: 218297 - DNA, 306 bp, synthetic construct
  misc_feature 1..306: note = Description of Artificial Sequence: Synthetic coding sequence
  source 1..306: mol_type = other DNA
atgcaacagcagcaacaactggcaagtgctcgaaacagacgcctagcccagcagatggaaaataggccgtctgtgcaggccgcattaaagctcaagcaaaaatccctgaagcaaaggttaggcaagagcaatattcaggctcggctgggacgtcccataggcgctctcgccagaggcgcaatcgggggtcggggactccccattatccaaagggggttgcccaggggaggcctgaggggtggacgggctacccgaacactgcttcgagggggaatgtcactgagaggacaatgttgtgtgccatag

SEQ ID NO: 218298 - DNA, 672 bp, synthetic construct
  misc_feature 1..672: note = Description of Artificial Sequence: Synthetic coding sequence
  source 1..672: mol_type = other DNA
atgctcaagaacaagcagcctacaccagtgaatataagagcttcaatgcaacagcaacaacagctggcttctgcgaggaacaggcggctagcccagcagatggagaaccggcctagcgtgcaagcggcattgaaactgaagcagagtttaaagcagaggctcggcaaaagtaacatacaagcaaggttaggcaggcctattggcgctctggctcgaggggcaatcgggggaagagggctcccaataattcaacgcggattaccccgaggtgggttaagaggcggtcgtgcgacacggacccttctgcgtggagggatgtctcttcgagggcagaacctgctacgcggaggacgcgcagtggctccaagaatggggcttcgccgtggtggggttcgaggcagaggagggcctggaagggggggactgggacgtggggctatggggagggggggaatcggcggaagaggcagggggatgatcgggagaggcagaggcggattcggcggaagaggcaggggtcggggtcggggtagaggtgccttagcccgtcccgtgttgaccaaggaacagctcgataatcagctcgatgcctatatgagcaagaccaagggccacctcgatgcagagttagacgcatatatggcacagacagaccctgaaacaaacgactag

SEQ ID NO: 218299 - DNA, 609 bp, synthetic construct
  misc_feature 1..609: note = Description of Artificial Sequence: Synthetic coding sequence
  source 1..609: mol_type = other DNA
atggccgctcagtccgctcccaaggtggtcttgaagtcaactacaaagatgagcctgaatgagcgcttcacaaacatgctgaaaaacaagcaacccacacccgtcaacatacgtgcctctatgcagcagcaacaacagctcgcaagcgcaagaaaccgccgtctagcacagcaaatggagaataggcccagtgtgcaggccgctttgaagctaaaacagagtctgaagcaaaggctgggtaagtctaacatccaggcacggttggggaggccaataggggctctggccaggggagccattggaggtagaggccttccaataattcagcggggactgcctagaggtggtcttcggggaggccgtgcaacccgaacactgctgagggggggaatgagcttgcggggaaggggtatgattggaagaggcaggggcggttttgggggaaggggcagaggccgagggagaggcaggggcgcactggcgaggcccgtgctgaccaaggaacagctggacaaccagctggacgcatatatgagtaagactaaggggcacctggatgcagaacttgacgcgtacatggctcagactgatccagagacaaacgactag

SEQ ID NO: 218300 - DNA, 747 bp, synthetic construct
  misc_feature 1..747: note = Description of Artificial Sequence: Synthetic coding sequence
  source 1..747: mol_type = other DNA
atggccgcacagtcagcacctaaggtggtgctgaagtctacaaccaaaatgagcctgaatgagcgcttcacgaatatgttaaagaacaagcagcctacgcctgtcaacataagagcaagtatgcagcagcagcagcagttggcctccgcacgtaaccggagactggctcagcaaatggaaaaccgacccagtgtgcaggcggcacttaagctgaagcaatccctgaagcagaggctgggaaaatcgaacattcaggcacggctcggaaggccaatcggagctctcgccagaggggcaatcgggggtaggggtctccctatcatccagcggggtctgccaagaggtggactccggggtgggagggctactaggactttgcttagaggcggtatgtcactgaggggacaaaatttgctgcggggaggtagagctgtcgctccacggatgggattgagacggggaggagtgcggggtagggggggaccaggaagaggcggattgggcagaggggctatggggaggggcggaattggaggaaggggccgtggcatgatcggtcgaggcagaggaggatttggcggtcgagggcgtggtaggggtcggggaagaggagccctagctcggcctgtgctaacgaaagaacaactagacaatcagctggacgcgtacatgtccaagacgaaggggcatctggatgctgagttggatgcgtacatggctcaaacagaccccgaaacgaatgactag

SEQ ID NO: 218301 - DNA, 609 bp, synthetic construct
  misc_feature 1..609: note = Description of Artificial Sequence: Synthetic coding sequence
  source 1..609: mol_type = other DNA
atggctgcgcagtccgcccctaaagtggttctaaagagtacaacgaaaatgtcgctgaatgagaggttcaccaacatgctcaagaacaagcaaccaacccctgtcaatatccgagcgagcatgcagcagcagcagcagttggcgagtgcccgtaacaggcgcctggctcagcagatggagaacagaccttctgtgcaggccgcactgaaactaaagcagtccctcaaacagaggctaggcaagtcaaatattcaggctagattgggacgccctataggagctttagcacgcggagccatagggggtcggggactgccaattattcaacgcggtctgccaagaggtgggctccggggtgggagagcgactaggacactgctccgaggcggaatgagcctcagagggagaggaatgataggaaggggcagggggggatttggtggcagaggccgtggccgagggaggggcaggggtgccctggcacgccctgtgctgacgaaggaacagctagataaccagctagacgcctacatgtcgaaaacaaaagggcatctagatgcagaactagatgcttacatggcacagaccgaccccgagacaaacgattag

SEQ ID NO: 218302 - DNA, 636 bp, synthetic construct
  misc_feature 1..636: note = Description of Artificial Sequence: Synthetic coding sequence
  source 1..636: mol_type = other DNA
atggaggagctgtcttcggtaggggagcaagttttcgctgccgagtgtattctgagtaaacgcctccgcaaaggcaagctggaatatctggtaaagtggaggggttggtcaagcaagcataattcctgggagcctgaggaaaacatcctggaccccaggttgctactcgccttccagaaaaaggagcacgagaaggaggtgcagaacaggaagaggggaaaaaggccaagagggagacccagaaagttgaccgcaatgtcatcctgctcccggaggtccaagctcaaagtgggtgggtgcgctggatatgcggatcccacaagccagcaccccttgggcgtgggcggtcggcagcgggagggcctgggaccttccgggagaggttggcatttttgccagcagagcgttcccctgcttggaaagcaagagccaccgttttttctaagtctttcgttctgttgccaagggcctcagcctgctgaaagctcttcaccccctctaccaggcgcaagctgcttctcactatcatgcacacccctatgttgggttgcgggatctaattgctgcaggcaggcgctcttcccaccgaggggcagtttgggtgacggaaaggaacaggaagcatgtgtgcaatag

SEQ ID NO: 218303 - DNA, 1599 bp, synthetic construct
  misc_feature 1..1599: note = Description of Artificial Sequence: Synthetic coding sequence
  source 1..1599: mol_type = other DNA
atggaggagcttagtagtgttggagaacaagttttcgctgccgaatgtattcttagcaaaagattgagaaaaggcaagctggagtacctggtcaagtggcgaggatggtcatcgaagcataattcttgggagcctgaagaaaacatcctggatcccagactcctcctggcatttcaaaagaaagaacacgaaaaggaggtacaaaatcgtaagcggggaaagagacctagaggtcgccctagaaagctcaccgccatgtctagttgcagcaggcggtcaaaattgaaagagcccgacgccccttctaagtcaaagtcaagttcctcctcctcctccagcacttcttcctctagcagttccgacgaagaagacgatagcgatctggacgccaaacggggtccacgagggagggagacccaccccgtgcctcagaagaaggcccagatcctagtcgccaagcctgaactcaaggacccaattcggaaaaagcgaggcagaaagccccttcctcctgaacagaaggctacacggaggcctgtgtccctcgcgaaggtcttaaaaaccgcccgtaaagacctgggcgcacctgcctccaagctgcctccccctttgagtgcgcctgttgccggtctggctgccctaaaagcgcacgctaaggaggcttgcggcggaccttccgctatggcgacgcccgaaaatctggcgtcattgatgaaaggaatggcgtcttcacccggaagaggtggaatttcatggcagtccagcatcgtgcactacatgaaccggatgactcagtcccaggcccaggcagcctcaagattagcgttaaaagcacaagctacaaacaaatgtggccttgggcttgatcttaaggtgcgaactcagaaaggagaactcggtatgagcccccctggatcaaagatacctaaggcaccgtccggaggggcagttgaacaaaaagtggggaatacgggcggacctccacatactcatggtgctagtcgggttcccgctggctgccccggtcctcagcctgcccctacacaagaactgagtctgcaggtgctcgacctgcaaagtgttaagaatggcatgcccggagtggggttgctggcaagacatgccaccgccactaaaggggtgcccgcaactaaccccgcacccggaaaggggacaggctcgggcctgattggagcctccggcgctaccatgccaaccgatacctcaaaatcagaaaagctggccagtcgggctgtggctccacctaccccagcctccaaacgcgattgtgtgaagggatccgctacaccatccggacaggagtcccgcaccgctcccggtgaggccaggaaagcagcaacccttcccgagatgtccgccggagaagagtcctcatcatcagacagtgatcctgacagcgctagccctccaagcaccggacagaacccttcagtgagtgttcaaacatcacaggactggaagcccactagatctttaattgagcacgtcttcgtcaccgatgtcacagcaaacctgatcacggttaccgtcaaagaatccccaaccagcgtgggcttcttcaacctgcggcactactag

SEQ ID NO: 218304 - DNA, 1935 bp, synthetic construct
  misc_feature 1..1935: note = Description of Artificial Sequence: Synthetic coding sequence
  source 1..1935: mol_type = other DNA
atggaggcagaaaggggcccagagagaagacctgccgagaggagcagtccaggtcagaccccggaagagggggctcaagccctggcggaattcgcagccctacacggacccgcactccgtgcgagtggcgtccccgagcggtactggggcagactcttgcacaagcttgaacatgaggtgttcgacgcaggtgaagtgttcgggatcatgcaggtcgaggaggtggaagaggaagaggacgaagctgccagagaagtgcggaagcagcagcccaatccgggaaacgagctgtgttataaggttatcgttactcgcgagtccggcctgcaagccgctcatcctaattcaatttttctgatcgaccacgcatggacatgtcgcgtagagcacgctagacaacagttgcagcaggtgcccggactgctccaccgtatggccaacctaatgggcattgagttccatggtgagctgccaagcaccgaggccgttgccctcgtgcttgaagaaatgtggaaatttaatcaaacataccaactggctcatggcacggctgaagaaaagatgcctgtgtggtatatcatggacgagttcgggtcccggattcaacacgcagacgtgccatcatttgccacggcccctttcttctacatgccgcagcaggtagcctacactttgctatggccacttagggatctagatacaggtgaggaggtcacccgagactttgcctacggagagactgaccccctgataagaaagtgtatgctactgccttgggccccaaccgacatgttggacctatctagctgtacgccggagccgcctgcggaacactaccaggctatactcgaggagaataaagaaaaactgcctttagacatcaaccccgttgtccacccccacgggcacatattcaaagtttacacagacgtgcagcaggtagcttcttccctgacacatccacggttcacattgacccaaagcgaggcggacgcagatatcctgttcaacttttcccattttaaggactaccggaaattgagccaggagcggcctggcgtcctcttgaaccagttcccttgcgaaaacctgttaacagtcaaagattgtctcgcgtcaattgcacgcagagccggtggccctgagggcccaccctggctgcctaggacctttaacttacggactgagctgccccagtttgtgagttatttccaacagcgggaaagatggggggaagataaccattggatctgcaagccttggaacctagctaggtccctcgacacccatgttaccaaatctttgcactctataatccgccacagagaaagcacacctaaggtggttagtaagtatatcgaaagtcctgtgctgtttctgcgggaagacgttggaaaagtcaagttcgatatacgctatatcgtactcttgcgctccgtgcgccctcttcgcctgtttgtatatgacgtcttctggctgcggttcagtaacagagccttcgcactcaatgacctggatgactacgaaaagcactttaccgtgatgaactatgacccagatgtggtgctgaagcaggtacattgtgaggagtttattccagagtttgaaaaacagtatcctgaatttccctggacagatgtccaggctgagatctttcgagcgtttactgagctgtttcaggtggcttgtgccaagccacctcccctcggattgtgcgattacccttcctctagagctatgtatgcagtagatctgatgctaaagtgggacaatgggccagatggacgtcgggtgatgcagcctcagatcctggaggtcaacttcaatcccgattgcgaacgcgcttgtaggtatcatccaacattctttaacgacgtgttctcaactcttttcttggatcagccaggaggctgccatgtcacctgcctggtttag

SEQ ID NO: 218305 - DNA, 477 bp, synthetic construct
  misc_feature 1..477: note = Description of Artificial Sequence: Synthetic coding sequence
  source 1..477: mol_type = other DNA
atggaattgagcgccatcggggaacaggtgtttgccgtggagagcatccggaagaaacgagtgaggaagggcaaagtggagtacctggttaagtggaagggttggcctccaaaatactccacttgggagcctgaggagcacatccttgaccctcgactggtaatggcctacgaagagaaggaagagagggatcgagcctcaggatatagaaaacgcggaccaaaacccaaacgtctactcctccaagagcctcctgcgccagacgtcttacaggccgctggggagtgggaacccgcagcccagccccctgaagaggaggccgatgcggacctcgctgaggggccacccccatggactccagcattgccctcttccgaagtcacagtgactgacattaccgctaactcaataaccgtcacatttcgcgaagcgcaggctgcagaagggttcttcagagatcggtcaggcaaattctag

SEQ ID NO: 218306 - DNA, 366 bp, synthetic construct
  misc_feature 1..366: note = Description of Artificial Sequence: Synthetic coding sequence
  source 1..366: mol_type = other DNA
atggaattgagtgctattggtgagcaggtgttcgcggtggagagtatcaggaagaagcgtgttaggaagggcaaggttgagtatctggtgaagtggaagggttggcctcctaaggaggagagggatcgggcatcgggctaccgaaagagaggccctaagcctaaaaggctcttactgcaacgattgtatagcatggatctgcgcagcagtcacaaggccaaaggaaaggagaagttgtgctttagcttaacatgccccttgggtagcggctcgccagagggcgtggtgaaggctggcgctccagagctcgtagataaaggccctctggtaccaacattgcctttcccgctgaggaagcccagatag

SEQ ID NO: 218307 - DNA, 5133 bp, synthetic construct
  misc_feature 1..5133: note = Description of Artificial Sequence: Synthetic coding sequence
  source 1..5133: mol_type = other DNA
atgaacggccactctgacgaagaatccgtgagaaactccagcggtgagtcctcccagagcgacgatgatagtggcagcgccagcggaagtggtagtggatcatccagcggatcaagcagtgatggctcttcctcccagtccggatcgtcagacagtgactctggtagtgagtctggttcccagtcagagtccgagtccgatacctcccgggaaaataaagtacaggctaagcctcctaaagtggacggcgcagagttctggaagagcagcccctccatactcgcagtgcagagatccgccatcctgaaaaagcagcagcagcaacagcagcaacagcaacatcaagcgtcttctaactccgggtccgaagaggactcctcaagctcggaggactccgacgactcaagtagtgaggttaagcgcaaaaaacataaggacgaggattggcaaatgagcggcagtgggagcccatcccagtccggctccgatagtgagtccgaagaggaacgtgaaaagtcttcttgcgatgaaaccgaatcagactacgagcctaagaataaagtcaagtcgagaaagccccagaaccgcagtaagtcgaaaaatggcaaaaagattctggggcagaagaaaagacagatcgattccagtgaggaagatgatgatgaagaagactacgacaatgacaagcgcagtagcaggaggcaggccacggtgaacgtctcatataaagaggatgaggaaatgaaaacagactcagacgacctcctcgaagtgtgcggggaggacgtcccacagccagaagaagaagagttcgaaacaatcgagcgattcatggactgcaggatcggaagaaagggagccaccggcgctaccaccacaatctatgccgtagaggcagacggagaccccaatgccggattcgaaaagaacaaagaacccggagagatccagtatctgattaaatggaagggatggtcacatatccataatacttgggaaaccgaggagacgttgaaacaacagaacgtgcgaggtatgaagaaattggacaattataaaaagaaagaccaggaaaccaagcgctggctgaagaacgcaagtcctgaggacgtggaatattataattgccaacaggagctaacggacgaccttcataaacaataccagattgtagagcggattatcgcacacagcaaccagaaatcagctgctggatacccagactactattgcaagtggcaaggtttgccatacagcgagtgttcatgggaagacggggctttgatcagtaagaagtttcaagcctgcattgacgagtacttctcccggaatcagtctaagacaaccccttttaaggattgtaaagttcttaagcagcggccacgtttcgtggctctcaaaaaacaaccaagttacatcggcggacacgaaggtcttgaacttagggactatcaactgaacggcttgaattggctggctcactcttggtgcaaaggaaactcatgcattctcgctgatgagatgggacttggaaaaaccatccagacaatctcttttcttaattacctgttccacgagcaccagctgtacgggcctttcctgctagttgtccctctgagcacactgacctcctggcagcgggagattcaaacctgggcaagccaaatgaacgctgtggtctacctgggcgatattaacagtcggaacatgatccgcacccacgaatggactcaccaccagacaaagcgcctaaagtttaatatactcctaacaacttatgagattcttcttaaggataaggcgtttttggggggactcaactgggcatttattggtgtcgacgaagcgcatcgcctgaagaacgatgacagtctcttatacaaaactttgattgactttaagtcaaaccaccgcctcctgattactgggacacctctgcagaacagccttaaggaactgtggagcctattacacttcattatgcccgaaaagtttagcagctgggaagattttgaagaagaacatggaaaagggagagagtacggctatgcctcacttcacaaggagcttgagccctttctgctgcggagggttaaaaaggatgttgaaaaatctcttccggcaaaggttgaacagattctgcgcatggagatgagtgctctgcagaagcagtactataagtggatacttacccggaactacaaagccctgagtaaggggagcaagggttccacgtccggtttcctgaatatcatgatggaattgaaaaagtgctgtaatcactgctatttgattaaaccaccagacaacaatgagttctacaacaaacaggaggcactgcagcatctcatccggagtagcgggaagctgatcctgctggacaaactcctcattcgattacgggagaggggaaatcgagtcctaattttctcacagatggtccggatgctagatatactggccgaatacttgaagtaccgccagttcccctttcagcgacttgacggcagtatcaagggagaactaaggaagcaggctctagaccacttcaatgctgaggggagtgaagatttctgttttctgctgtccacgagagcgggaggtctgggtatcaatctggcaagcgcagacaccgtcgtgatattcgacagcgactggaacccgcagaatgatctccaggcccaggccagagctcaccggataggacagaagaaacaggtgaacatatacaggctggtcactaaaggtagtgtggaagaggacattttggaacgggctaagaaaaaaatggtgctggatcatctcgtgatccaaaggatggacaccaccggtaagaccgtgctgcacaccggaagcgcacccagctcatctacaccttttaacaaggaggaactgagcgcgatactcaagttcggcgcagaggagctgttcaaggagcctgagggagaggagcaggagccccaagagatggatatcgacgaaatactaaaacgagctgaaacacacgagaatgagcccggtcctctaaccgtcggcgacgaacttctttcccaattcaaggtcgcaaacttctcgaatatggacgaagacgacatcgaactggagcccgaacgaaattcgaaaaactgggaggagataattcctgaggatcagcggcgaaggctcgaggaggaggaacgccagaaggaactggaggaaatttacatgctacctcgcatgcgcaactgcgcgaaacagatttctttcaatggctcagaggggagacgatctcggtctcggagatattcggggagcgattccgatagtatctcagaggggaagaggcctaaaaagcgcggacgtccccgaacaatacccagagaaaatatcaaaggcttctcagacgcagaaatcagacggttcatcaaaagttacaaaaagttcggtggacctttggagcgcctggatgccatcgccagggatgcagaactggtcgataaatccgagacggatctgcggaggctgggggagctcgtacataacgggtgtataaaagctctgaaggactctagctctggaactgagagaaccggaggcaggcttggcaaggtgaaaggcccaacttttcggatcagcggtgtacaggtgaacgcaaaattagtgatcagtcacgaggaggagcttattccactgcacaaatcaatcccttccgatcctgaggagcgcaagcaatacaccatcccctgtcatacaaaggcagctcattttgatatagactggggcaaagaggacgatagcaacttgttgataggtatctacgagtacggatacggcagctgggaaatgatcaagatggatcctgacctttccctgacgcataaaatcctgccagatgaccctgataaaaaaccgcaggccaagcagctccagaccagagctgactacctcattaagctcctcagtcgggatttggccaagaaagaggccctttctggtgccggtagttctaaacggcgaaaggctagggctaaaaagaataaagctatgaaatccattaaggtcaaagaggagatcaagtcggatagctcaccactcccaagcgagaagtcagacgaggacgacgataagctgagtgaatctaagagcgatggaagggagaggagcaaaaagtcctccgtttcagatgcgcctgttcacatcaccgcgagcggggaacccgtgcccatcagcgaagaaagcgaggagttggatcaaaaaaccttctccatctgtaaagagagaatgcgtcccgtcaaggcagcactgaaacagcttgacaggcctgagaagggcttgtctgagagagaacagctagaacacacccggcagtgtttaatcaagatcggcgatcacatcactgagtgtctgaaggagtacacaaacccagagcaaatcaagcagtggcgtaagaacctctggatttttgtttcaaagttcacagaatttgacgccaggaagctacataagctttataagcatgccattaagaagcgccaggaatctcagcagaattccgaccagaactccaatcttaacccccatgtgattcgtaacccagatgtggaacggctgaaggagaacactaaccatgacgattcctctcgtgattcttactctagtgatagacatttgacgcagtaccacgatcatcacaaggatcgacaccagggagacagctacaaaaagtccgactcacggaagaggccatactcaagcttctcgaatgggaaggaccaccgcgactgggaccactataagcaggacagccgctactattccgacagggagaagcatcgtaaactcgatgaccatcggagccgggatcacagatccaacctggagggctctctgaaagataggtcacatagtgaccatagatctcactccgatcatagactgcattctgaccatcgatcctcatcagagtacacccatcacaaatcctcacgtgactaccgctaccattcggactggcaaatggaccatcgcgcttctagctcgggcccacgatctcccctcgatcagagaagtccttacgggagccggtccccctttgaacattccgtcgaacacaagtccacgcctgagcatacctggagctcccggaagacctat

SEQ ID NO: 218308 - DNA, 903 bp, synthetic construct
  misc_feature 1..903: note = Description of Artificial Sequence: Synthetic coding sequence
  source 1..903: mol_type = other DNA
atgttcagctttactggggtcctggtaatctacgaggtcttaaaaaaatgcatagggaaacttatttcactgcgggtatgtagtattgaaggttgtgtatgtgtctatgtgttcgttcctggagggaaagagttccacgagaaactcaacatattccaccagactaatctgatctgtctctttcttaattcctccaggaacttatggatctttgtttctaagtttaccgagttcgacgcccgaaaactccacaaactgtacaaacacgccatcaagaagcggcaggagtcccagcagaactccgatcaaaattcaaatcttaacccacacgtgatccgcaacccagacgtggagaggctgaaggagaacaccaaccatgacgacagctcaagagactcttactcctccgaccgccacctgactcagtaccacgaccatcacaaggacagacatcaaggcgactcctacaagaagtcagattcccgaaaaagaccctacagctccttttccaacggaaaagatcacagagactgggaccattacaaacaggattcgcgttactattcagaccgggaaaaacacagaaagctggatgatcaccggtctagagaccatcggtctaatctcgaaggatctcttaaggaccggtctcactctgatcatcgttcccatagcgaccatcgtctgcactccgatcatcggtcatcttctgagtatacacatcacaaaagctctcgcgattacagataccatagcgattggcaaatggaccacagggcttctagcagcggtccgaggtcgccactagatcaaaggtccccctatgggagtagatcgcctttcgagcattccgttgagcataaaagcactcctgaacacacttggagcagcaggaaaacctag

SEQ ID NO: 218309 - DNA, 624 bp, synthetic construct
  misc_feature 1..624: note = Description of Artificial Sequence: Synthetic coding sequence
  source 1..624: mol_type = other DNA
atgaacggacactctgatgaggagtccgttcgtaacagttccggcgaatcatcccagtccgacgatgatagcgggtctgctagcggcagcggcagtggctcgtcatccgggtcttcgtcggacgggtccagttctcaatcaggatcatctgattcagactccggcagcgagagcgggagtcaaagcgagtctgagtcggataccagccgcgagaataaagtgcaggcgaaacctcctaaggtcgacggagcagaattctggaaatcctcccccagcattcttgctgtccaacgttccgctatcctgaagaaacagcagcagcagcagcagcaacagcagcaccaggcaagttccaatagtgggagtgaggaagatagctcctcttcagaagattctgacgacagtagcagcgaggttaaacgaaaaaaacataaagatgaagattggcagatgtccggttctggttcaccctcccagagcgggagtgactctgaatctgaggaggagcgagagaagagcagctgcgatgagaccgagtctgattacgaaccaaagaacaaggtgaaatcccggaaaccacagaaccgttctaaatctaaaaacgagaagaagaaaaagaagtag

SEQ ID NO: 218310 - DNA, 660 bp, synthetic construct
  misc_feature 1..660: note = Description of Artificial Sequence: Synthetic coding sequence
  source 1..660: mol_type = other DNA
gtcggcgcagatagggactcaccaaccctgctacccgcaggaggctccaactggttagctcagaggttccactgccagaatggttgcatactgggggatgagatggggttgggcaagacttgtcagacaatcgcactcttcatttacctcgcaggtcgtttaaatgacgaaggaccgtttcttatcctctgccctctgagtgtagagcagctcgaaaggagaaatgctgagatatgctcacgttcctttctgtgcaacatctgtggggataaagaggaacgggcttgtctccagcaggacctgaaacaggagagtcgtttccacgtgcttctgaccacatatgaaatttgcctgaaggatgcatcatttcttaagagctttccatggtccgttctggtcgtggacgaggcacatcggttgaaaaatcagtctagcctcctgcacaaaacactgagcgaattctctgttgtgttctcattgctgctgactggcacccccatacaaaactcattacaggagctgtactccctcttgagcttcgttgagccagatcttttttctaaggaagaatgggaaatccttttcaacgccacacgcatactgcgaaagaatttatcccagcaggttaattgcaccaattcttgtagccacttctgctag

SEQ ID NO: 218311 - DNA, 1851 bp, synthetic construct
  misc_feature 1..1851: note = Description of Artificial Sequence: Synthetic coding sequence
  source 1..1851: mol_type = other DNA
atgtccgccctacagaaaaaatattacaaagctatccttatgaaggacttggacgcgtttgagaacgaaacagccaaaaaggttaagctacagaatattctgagccagctccgaaagtgtgttgatcatccgtacctgttcgacggtgtagaaccagagcccttcgaggtgggagatcatctcacggaggcctcaggcaagctacatttgttggacaaactattggctttcctctactcaggtggtcatcgagtgctgctattctctcagatgacacaaatgcttgacatacttcaggactatatggattatcgcggatactcttatgaaagagtggacgggtccgtacgcggagaggagcgtcacctggcaattaaaaatttcggccagcagccaatctttgtgttcctgttatctacacgggctggcggagtcggaatgaacctcaccgccgcagacaccgtcattttcgtggacagtgatttcaatccccaaaatgacttgcaggcggctgcgagagcccacagaataggccagaacaaatccgttaaagtgattcgacttattggacgggatactgtcgaggaaatcgtgtatcgtaaggcggcttccaaactccaattaactaatatgataattgaaggaggccatttcaccctgggcgctcagaaacctgctgcggatgccgaccttcagctgtctgaaattctgaagttcggccttgacaaattactcgcgagtgaggggtccacaatggatgagatcgacctggaatctatccttggggagacgaaagacgggcagtgggtctcagatgcactgccagccgcagagggcggatcaagagaccaggaagaggggaagaaccacatgtatttgtttgagggtaaagactattccaaggaaccttctaaagaggaccggaagtcctttgaacagctggttaacctgcagaagaccctcctggagaaagcttctcaggaagggcgatcactccggaataaaggatcagtgctgattcctggactggtggaagggtctaccaagaggaagcgggttctgtctcctgaagagctcgaggatcgtcagaagaagcgacaggaggctgctgccaagcggaggaggctgattgaggagaaaaaacggcaaaaagaagaggccgagcataagaaaaaaatggcctggtgggaatcaaataactaccagagtttttgcttacctagtgaggagtccgaacctgaggacttggaaaacggggaagaatctagtgctgagcttgactaccaggatccagatgccacaagccttaaatacgtgagcggtgacgttactcatccacaagccggtgcggaggatgccctgatcgtgcactgtgtcgatgattccgggcattgggggaggggcggtttattcaccgctctcgagaagagaagcgccgaacctagaaaaatatacgagctggctgggaagatgaaggacctgtccctcgggggagtcctgctgttccccgtggacgacaaagaatctcggaataaaggacaggacctccttgccctgattgtggcccagcatagagaccgctctaacgttctgtcggggattaagatggcagccttggaggagggtctcaagaagatcttcctggccgcaaagaagaaaaaagctagcgtgcatctaccgcgaatagggcatgccactaaagggtttaattggtacggcaccgagcgacttatcagaaagcatttggcggcaaggggaatcccaacctatatatactatttccctaggagtaaatcggcagtcctgcacgctcagtcgtcttcctcctcaagtcggcagctcgttccctag

SEQ ID NO: 218312 - DNA, 2694 bp, synthetic construct
  misc_feature 1..2694: note = Description of Artificial Sequence: Synthetic coding sequence
  source 1..2694: mol_type = other DNA
atggaacgggcaggcgctacttcccgtggcggacaagcacccggatttcttctgcggctgcacaccgagggccgtgccgaggcagcccgtgtgcaggagcaggatctgcgacaatggggcttgaccggaattcacctcaggtcctaccagttagaaggagtgaactggttggcccaacgtttccactgtcaaaacgggtgtatccttggtgatgagatgggactgggaaagacatgtcaaaccatagccctctttatttacttagcgggaaggttgaatgatgaagggcctttcttgatcctctgcccgctgagcgttctttccaattggaaagaggagatgcagcgttttgctccaggcctcagttgtgttacctacgccggagataaggaagagagagcgtgtctccaacaggaccttaaacaggagagccggttccacgttcttctgactacatacgaaatttgtctcaaagacgccagctttctcaagtccttcccatggtcagtgcttgtagtcgatgaggcacatcggcttaagaaccagagtagcctccttcacaagaccctttctgaattttccgtggtttttagcctgctcctgacgggcacaccgattcagaatagcctacaggagctgtactccctcctgagcttcgtggagcctgatttgttctccaaggaagaggtgggagactttatacagaggtatcaagatatcgagaaagagagcgagagtgcaagcgagctgcacaaacttctgcagccctttctgctacgtcgcgtaaaggcagaagtagccaccgaactgccgaaaaagacagaggttgtaatctatcacggcatgtcagctctacaaaagaagtactataaagccatcctgatgaaagacttggacgccttcgagaacgaaactgccaagaaggtcaagctgcagaacattctgtcccagctcaggaaatgtgttgaccatccttacttgtttgatggagtggagcccgaaccttttgaagtaggggaccatttgaccgaggccagtgggaagctccatcttctcgacaagctgctcgcttttctctattccggtgggcatcgtgtcctcctgtttagccagatgacccagatgttagacatcttgcaggactacatggactataggggttattcctatgaaagggtggatggtagcgtgcggggtgaagagaggcacctggcgataaagaacttcgggcaacagcccatcttcgtcttcttgctatctacaagagctggtggcgtcgggatgaatctcactgcggctgacacggttatcttcgtggattctgattttaatcctcagaatgacctgcaggccgcagcgcgagcgcatcgcattggccagaataagtctgtgaaggttatcagactgataggcagggacaccgtggaagagatagtgtatcgcaaagctgcatcaaagttacagctgaccaacatgattatagagggtggacactttacccttggcgcacagaagcccgcagccgacgccgatctgcaactcagcgaaatcctgaagtttggtctggacaagctactggccagtgaagggtctactatggacgagattgacctggagtccatacttggtgagaccaaggacggccagtgggtctctgacgctctccccgcagcagagggcggttcgcgcgaccaggaggagggcaaaaaccatatgtaccttttcgagggaaaggattactcaaaggagccaagtaaggaggatcggaagtccttcgagcagctggttaatctgcagaaaaccctgctggaaaaagcgtcccaggagggtaggtctctgaggaataaaggcagtgtcctcattccaggattggtggaaggctcaacgaaaagaaagagagtcctgagccccgaggaattagaggaccgccaaaagaaacgccaggaagccgcagccaagagacgacgcctgatcgaagagaaaaagcgacagaaagaggaagccgagcataaaaagaaaatggcatggtgggaatcaaacaactaccagtctttttgcctaccctcagaagagagtgagcccgaagatcttgaaaatggggaggagtcaagtgctgaactggactatcaagaccctgacgctacctctttaaaatatgtctccggtgacgtcactcatccgcaggcaggagccgaggatgccctgattgtccactgtgtcgatgattcggggcactggggtagagggggtctgtttaccgccctggaaaaaagaagcgcagaacctagaaaaatttacgagttagcaggcaagatgaaagatctctctttggggggtgtcttactttttcctgtcgacgataaagaatcacgaaacaagggccaggacctcttagcactgatcgtcgctcaacatagagaccgctcaaatgtgctgtctggtattaagatggcggcactggaagagggtcttaagaaaatttttctggcggcaaaaaagaaaaaagctagtgtgcatctgccccgtatcggccatgcaaccaagggatttaattggtatggcacggagagacttattagaaagcatctggccgctcggggaatccccacctacatatactacttcccaagatcaaaatcagccgtactgcacgcccagagttcctctagcagttcgcgacaattggttccttag

SEQ ID NO: 218313 - DNA, 2082 bp, synthetic construct
  misc_feature 1..2082: note = Description of Artificial Sequence: Synthetic coding sequence
  source 1..2082: mol_type = other DNA
atggaaagagccggagccaccagccggggaggccaggcccctggatttcttttgagactgcacacagaaggaagggcagaggccgcaagggtgcaagagcaggatcttcgacagtggggcttgacagcgtcggagctacataaactcctccagcctttcctgctgagaagagttaaggccgaggtggcaacggaactcccaaaaaaaactgaagtggtgatttaccacggaatgagtgctctccagaaaaagtactataaagctatcctgatgaaggacctagatgccttcgaaaacgagactgccaaaaaggtgaaactgcagaacatcctgagccaactacggaagtgcgtggatcacccatatcttttcgacggagtggaaccggagccctttgaagtcggtgaccacctcaccgaggctagcggcaagctccacctcctagacaaactgctggcatttctatattctgggggtcacagagtcctactgttttctcaaatgacgcagatgctcgacattcttcaggactacatggactataggggttactcatatgaaagggtggatggcagcgtgcgtggagaggaacgtcacttagcaattaagaacttcggccagcagcccatcttcgtgtttctgttaagtacccgggctggcggagtcggtatgaatctgacagcagccgatacagttatattcgtcgacagtgacttcaacccccaaaacgatttgcaggccgcagcacgggctcatcgaatagggcagaacaaaagtgtgaaagtgatacgcctcatcgggagggataccgttgaagagattgtgtatagaaaggcagccagcaaactgcagctcacgaacatgatcatcgagggaggtcattttacccttggagcccagaagcctgccgcagatgctgatttacagttgtccgagatcctgaagtttggactggacaaacttctggctagtgaggggagtacaatggatgagatcgatttggagtcaattctgggcgagacaaaagacgggcagtgggtcagcgatgcccttcctgcggcagagggtggcagtagggatcaggaagaaggtaagaatcacatgtacttatttgaggggaaagactattccaaagagccgagcaaagaggaccgcaagtcattcgagcaactggtcaatctccagaaaacattgctcgagaaggcctcacaggagggtaggagtcttaggaacaaagggagcgtgctgattccaggccttgtggaaggctcaactaaacggaaacgggtactgagcccagaggaactggaggatcgccagaagaagaggcaggaggctgcggctaagcgcaggcgcttaattgaggagaaaaagaggcagaaggaggaggcggaacataaaaaaaagatggcctggtgggagtccaataattaccagtctttctgtctgccctcagaagaaagtgaaccagaggacctcgaaaacggagaggagtctagtgccgagctcgactaccaggatcctgacgccacatcactcaagtacgtcagcggagacgtgacccacccccaggccggagccgaagatgccctgattgtccactgtgtcgatgattcaggacactggggcagaggaggactgtttacagccttagaaaaaagatctgcagaaccacgcaaaatctatgagctggccggtaaaatgaaggacctgtcccttgggggtgtcctgctgtttccggtagacgacaaggagtcacgtaacaaagggcaggacctgctggctctgatagtcgcacagcatcgcgacaggtcaaacgttctctctggaatcaagatggcggcacttgaagagggcctcaagaaaatctttctggccgctaaaaaaaaaaaagccagtgtccatcttcccagaatcggtcatgccaccaagggatttaattggtatggcaccgaaagactgatcaggaagcacctggccgctagaggcatccccacatacatctactatttcccacggtcaaagagtgcagtgcttcatgcccagtcgtctagcagctcttcacgccagctggtgccctag

SEQ ID NO: 218314 - DNA, 2412 bp, synthetic construct
  misc_feature 1..2412: note = Description of Artificial Sequence: Synthetic coding sequence
  source 1..2412: mol_type = other DNA
atggagagggcaggagccacatcccggggagggcaggcacccggtttcctgttgagactacacaccgagggtcgtgccgaagctgcgcgagtgcaggaacaggacctcagacagtggggcctgaccgggatccatctcaggtcttatcagctcgaaggtgtaaactggctggcccagaggttccattgccaaaacggctgtattctgggcgatgaaatggggctgggaaagacctgtcagaccattgcactgtttatctatttagcgggtcgactcaacgatgaaggtccattccttatcctgtgtcctttgtcagtgctaagcaactggaaagaggagatgcagaggttcgcacctgggctttcatgtgtgacctacgcaggcgacaaagaggaacgggcttgcttgcagcaagatctaaagcaagaatccaggtttcatgtgttgctgactacatacgagatctgcctaaaggatgcctctttcttgaagtccttcccttggagcgtcctggtggtggacgaagcgcatcgcctgaaaaaccaatccagtttactccataagaccctttctgagttttccgtggtcttttccctgcttttgacgggcacccctatccaaaattctttgcaggagctgtactcactgctgtcgtttgtcgaacctgatttgttctccaaggaagaagtgggagattttatacagcggtaccaggatatcgaaaaggagagtgaaagtgcatccgaattgcataagctgctccagccctttctcttgagacgcgtgaaggccgaagttgctacagagcttcctaagaaaaccgaagttgttatttatcatggcatgtcagccctgcagaagaagtactataaagccatattgatgaaggacctcgacgcgttcgaaaatgagaccgccaagaaagtaaagctgcagaatatcctgtctcagctccgtaagtgcgtggatcatccctacctcttcgacgggggtgttgggatgaacctcactgccgcagacaccgtcattttcgtggacagcgacttcaacccccagaacgatctccaggccgctgcccgagcccatcgaatcgggcagaacaagtcagtgaaagtcatcaggctgataggtagagacactgtggaagaaatcgtctatcgaaaggctgctagcaaactacagctcaccaacatgatcatcgagggcggacattttaccttaggggcacagaaacctgccgctgacgccgacctgcagctgtctgagatcttgaaatttggtctcgacaaactactagcctccgagggatccacaatggatgagattgacctcgagtcaattcttggtgagaccaaggacgggcaatgggtctctgatgctcttccagcagccgagggcggtagccgcgatcaggaagagggtaagaatcatatgtacctgttcgagggtaaggattactctaaggagccctctaaggaggatcggaagtcctttgagcagttagtgaatcttcaaaagaccctcctggagaaagccagccaggagggccgttcgcttcggaataagggatccgtactgatcccagggctggtggaaggcagtacaaaaaggaaacgagttctatcaccagaggaacttgaagacagacagaagaaaagacaggaggcagcagctaaacggagaaggcttatcgaggagaagaagcggcaaaaggaagaggccgagcataagaagaagatggcttggtgggaatctaataattaccagtccttctgcctgccctccgaggaaagcgagccggaggatctcgagaacggagaagagagctctgcggagctggactatcaggatccagacgctacctctctgaaatatgtatctggcgatgtgacacacccacaagccggagccgaagacgccttgattgtacattgtgtcgatgatagtgggcactggggacgtggcggattgtttactgctctggaaaagaggtccgcagagccacgcaaaatctatgagctcgcaggcaaaatgaaggatctgagccttggcggagtgttactctttccagtagatgacaaggagagcaggaacaagggacaagacctactagccctgatcgtggcccagcaccgcgaccgatccaatgtactgtccggaattaagatggcagccctagaagaaggcttaaagaaaattttcctggcagccaagaaaaaaaaggccagtgttcatctgcctcggataggccacgcaactaagggcttcaattggtatggaaccgagcgcctgatccgcaagcatttagcagcccgtgggattccgacatacatctattattttcccagatccaagtccgccgtgctgcatgcccaaagctcgtcttcctcttctagacagctcgtgccttag

SEQ ID NO: 218315 - DNA, 1305 bp, synthetic construct
  misc_feature 1..1305: note = Description of Artificial Sequence: Synthetic coding sequence
  source 1..1305: mol_type = other DNA
atggccgtcagctgggagatgcgttgggcgtggggtcgtccagcacggttcgctccaggtctttcatgtgtcacttacgcaggcgacaaggaggaaagagcctgcctgcagcaagacttgaagcaggaatccagattccatgttttacttaccacttacgagatctgtctcaaagatgcttcttttctgaagtccttcccgtggagtgttctggtcgtggacgaggcccacaggctaaaaaaccaatcgtcccttcttcacaagactttatccgagttcagcgtggtgttctctctgttgctcaccggaacccctattcagaactcattacaggagttatactctttgttaagcttcgtggagcccgatctcttctccaaggaagaggtaggcgatttcatccagagatatcaagacattgagaaagagagtgaatctgcatcagagcttcacaagctgctccagccgttcctcctgaggagggtcaaggccgaagtcgcaactgaactgccgaagaagaccgaggtggttatttaccacgggatgagcgcattgcagaagaaatactacaaggcaatcttgatgaaagaccttgacgccttcgaaaatgaaactgccaaaaaggtgaaacttcaaaatatactaagccagctccgcaagtgcgtcgaccatccctatctgtttgacggtgtggaacccgagcccttcgaggtgggcgaccacctgacagaggcgagcgggaagctgcacctcctggacaaactgttggcctttctctacagtggagggcatagagtgcttctcttttcgcaaatgacccagatgctggacattttgcaggattacatggattaccgtggctactcatatgagcgcgtggacgggtccgtccgaggcgaggagcgccacctggctattaagaacttcggccagcaaccgatatttgtctttctgcttagcacccgtgcaggaggcgtgggcatgaacttaactgccgcagataccgttattttcgtggatagcgactttaatccacaaaatgatttgcaggctgcagctcgcgctcacaggatcggccagaataaatccgtcaaggttattagacttattggtagggacactgttgaggagatcgtgtacagaaaagccgcttcaaagctccagctcactaatatgatcatcgagggcggtcatttcaccctcggtgcccagaaacccgctgcagacgccgacctgcaggtgagatatagcaacttagtgtggatcaactgctggcccctgcgtggagccccttggatgaagtag

SEQ ID NO: 218316 - DNA, 5486 bp, synthetic construct
  misc_feature 1..5486: note = Description of Artificial Sequence: Synthetic coding sequence
  source 1..5486: mol_type = other DNA
atgatgcgcaacaaggacaagagccaggaagaggactcaagtctgcacagcaatgcgtcatctcacagcgcaagcgaagaggcaagtgggagtgactctgggtcgcagtctgaatcagagcaggggtcagatcccggttccgggcatggaagtgaatccaattctagttcggaaagctccgagagccagtccgaatcagaatctgagagcgcagggagtaaaagccaacctgtgttaccagaggcgaaggaaaaacctgcttccaagaaggagagaatagcggatgtaaagaaaatgtgggaggagtatcccgacgtgtacggagtgcggagaagcaatagatcccggcaggaaccttcacggtttaacatcaaagaagaggccagcagcggcagtgagagtggatctccgaagcggagaggccaaagacaactgaaaaagcaggaaaaatggaaacaggaaccaagcgaggacgaacaggaacagggcacgtccgcagagagcgagcctgaacaaaagaaagtgaaggctcggcgacctgttccccgacgcacagtccctaaaccaagggtgaagaaacagcccaagactcagcgcggtaagcgcaagaaacaggattcaagcgacgaggacgacgacgacgacgaagcacccaaacggcaaacaagacggagagccgcaaaaaatgtgagctataaggaagatgacgattttgaaaccgacagcgatgacctgattgaaatgaccggggagggcgtggatgaacagcaggacaatagcgaaacaatcgagaaggtgttggatagcaggttgggcaaaaagggagccaccggtgcttcaacaactgtgtacgccattgaggctaacggagacccctctggtgatttcgatactgagaaagatgaaggagaaatccagtatttaatcaaatggaagggctggtcctatatccacagtacttgggaaagcgaggagagcctccaacaacagaaagttaagggcctgaaaaaactcgaaaatttcaagaaaaaagaagatgagatcaagcagtggttaggcaaagtgtcgcctgaggacgtggagtattttaactgtcagcaggaactcgcgtccgagctgaacaagcagtatcagatcgtcgagcgggtaatcgcagtcaaaacgtccaaatctaccctgggccaaacggacttcccggctcattcaaggaagcctgccccatccaacgagcccgagtatctctgtaaatggatgggcctgccttactctgagtgctcctgggaggatgaagccctgatagggaaaaagtttcagaactgcatagactctttccactcaaggaataacagcaaaactatccctaccagagagtgtaaggccctcaaacagcgaccacgcttcgttgcgctgaagaagcagccggcttacctgggaggggaaaacttggagctgcgcgactatcagcttgaggggctcaactggttggcccactcctggtgtaaaaataattctgtgatactcgcagatgaaatgggcctcggcaaaacgatccagaccatctcttttctgtcttatttgtttcatcaacaccagttgtacggcccattcctgatcgtcgtgccactcagtactttaacaagctggcaacgggaatttgagatttgggcccctgaaatcaatgtggtggtatacattggggatctgatgtctcgaaatacgatccgagaatatgagtggatccacagtcagaccaagagactcaaattcaacgcgcttatcacaacatacgagatcctactcaaggacaagaccgtcctgggctccattaattgggcctttctcggtgtggacgaggcccatcggctcaagaacgatgactctttattgtacaaaactctgatcgattttaagtccaaccaccggctcctcattaccggtacaccattgcagaacagtctaaaggaactgtggagcctgctccattttattatgcccgaaaagtttgaattttgggaggacttcgaggaggaccatggaaaggggagagagaatgggtaccaatcactgcacaaggttctcgagccatttcttttgagacgcgttaagaaggatgtagaaaaatcccttccagcgaaggttgagcaaattttgcgggttgaaatgagtgccttgcagaaacagtattataagtggatcctcaccagaaattataaagcacttgccaaaggcacccgcggaagcacttccggctttctaaacatcgtgatggagctgaagaaatgttgcaaccactgctacctgattaaacctccagaggagaacgagcgggaaaatggtcaagagatcttgttgagcttaattagatcctctgggaagctgattctacttgacaagctgctgaccaggctcagagagcgagggaaccgcgtgctgatcttcagccagatggtgcggatgcttgatattctcgcagaatacttaaccattaaacactatccttttcagaggctcgatgggtcaatcaaaggcgagattaggaaacaggcactcgaccattttaacgccgatggatctgaagatttctgcttcctgctatctacccgggctggcggactgggcatcaatctggcttctgccgataccgttgtcatattcgattctgattggaaccctcagaacgatctgcaggcccaagcgagagcgcataggattggacagaaaaagcaggtgaatatttaccgcctggtgaccaaggggacagttgaagaagagatcatagagagagctaagaaaaagatggtgctcgatcacctagtgatccagagaatggacacaactggccgaactatactggagaataattcgggcaggagcaactctaacccattcaataaggaggagttaacagccatcctcaagttcggggctgaggatctgtttaaagagctggaaggcgaagagtccgaaccacaggaaatggacattgacgagattctgcggctggccgaaacacgggaaaatgaagtgtcaacctccgcaactgacgagttattgtcacagtttaaggtggcaaatttcgctactatggaagacgaggaggaactggaagaaagacctcataaagattgggacgaaatcatccctgaggagcagcggaaaaaggttgaagaggaggaacggcagaaggagctggaggagatttatatgctgcccagaatccgatccagtaccaaaaaggcccaaacgaacgattctgactccgacacagagtctaagagacaagcccagagatcttctgcctcggagagcgaaaccgaggactcggatgatgacaagaaacccaaaaggagggggcgacccaggtcggtgcgcaaggaccttgttgaggggtttactgatgccgaaatacggaggtttatcaaggcctataagaagtttggtctgcctttggagaggcttgagtgtatcgcacgagatgccgagctggtcgataaaagtgttgctgatctgaagcggttgggagaactaattcataacagttgtgtttccgctatgcaggagtatgaggagcagctgaaagagaacgcgtccgagggcaaaggccctggaaagaggcgaggcccaaccatcaagatctcgggtgtgcaggttaacgtgaaaagtattatccagcacgaagaagaatttgagatgcttcacaaatccatccccgtagatccggaggaaaaaaagaagtactgtctcacttgtagggtgaaggctgctcacttcgacgtggaatggggtgtagaggacgatagtagattgctgttgggaatctatgagcatggatacggtaactgggagttaattaagaccgatcctgaacttaagctgaccgacaagatcctccctgtggagacagacaagaaaccccaaggcaagcagctgcagaccagagctgactacctcttgaagctgctccggaagggactggagaaaaaaggcgcagtaacagggggtgaagaggcgaaattaaaaaaaaggaagcctcgggtgaagaaggaaaacaaggtgccaagattgaaagaagagcatggaattgagttatctagtcccagacactctgacaatccaagcgaggagggcgaagtgaaggatgacggactggagaagagtccaatgaagaagaaacagaagaagaaggaaaataaagagaacaaggaaaaacagatgagctcaagaaaggacaaagaaggcgataaggaaaggaaaaaatcaaaggataagaaggagaagcccaagtcaggcgacgctaaaagcagttccaagtccaaacgcagtcagggtccagtccacatcactgccggatcagagccagtgcctataggcgaagacgaggacgatgacctggatcaggagaccttttctatttgcaaggagcgtatgagacccgtaaagaaagctctgaagcagctggacaagcccgataagggactgaatgttcaggaacagttagaacacaccagaaattgcctgcttaagataggggaccggatcgccgagtgtctgaaagcctattcagaccaggaacacatcaagttatggcggcgtaacctgtggatttttgtgagcaagtttacggaatttgacgcccgaaaattacacaaactatacaaaatggcccacaagaagcgctctcaagaggaagaggaacagaagaagaaggatgatgtgaccggcggaaagaaaccatttagacccgaagcgtccggaagctccagggactctctgatctcccagagtcatacctcacataacctgcacccacaaaaaccccatctgcccgcatcacatggccctcagatgcacggccaccctagagataattataatcacccgaacaagagacatttttcaaacgctgaccggggagattggcagagagagcgcaagtttaattacgggggtggcaataataatcctccgtggggatctgataggcatcaccagtacgaacagcattggtacaaagaccaccattacggggatcgtcgccatatggacgcgcatagatcgggctcatatcggccaaataatatgtcgcgaaaaaggccctacgaccagtattcctccgatcgcgatcacagaggtcatagagattactatgaccgtcaccatcatgactctaagcgtcggcgtagcgacgaattccgcccacaaaactatcatcagcaggatttccggagaatgtctgatcataggcccgctatgggctatcacggccaaggaccttcagatcattatagatcatttcataccgataagctgggcgaatataagcagcctttgccacctttacacccagctgtatccgatccaagatcgccgccttcacagaaatcccctcatgactctaaatccccattggaccaccgctccccactcgagagaagcctggaacagaagaacaatcctgattataattggaacgtgcgaaagactta

SEQ ID NO: 218317 - DNA, 1506 bp, synthetic construct
  misc_feature 1..1506: note = Description of Artificial Sequence: Synthetic coding sequence
  source 1..1506: mol_type = other DNA
atgatgcgcaacaaggataagtcccaggaggaagactcatcgctgcactcaaatgctagctctcattcggctagcgaggaagcaagcggcagtgactctggctcgcaatccgaaagcgaacagggatccgatcccggatcaggccatggctccgaatcaaatagtagttctgagtcctccgagagccagagcgaatcagaaagcgagtccgcagggagcaagtcccaacctgtgctacccgaagcgaaggagaaacccgcttccaagaaagaacgaatcgcagacgtaaaaaagatgtgggaggagtatccggacgtatacggggttcggagatcaaatcggtcaaggcaagagcctagccgcttcaacatcaaagaggaagcgtcctctggatccgagtctggatcccctaaacggcgtggccagcgacagctgaagaaacaagagaaatggaaacaggaaccatctgaggacgagcaggaacaaggtactagtgccgaatctgaaccagagcagaagaaggtgaaggccaggcggcctgtgcccaggagaaccgtgcccaaacctcgagttaagaagcagcctaagactcagagaggcaaacggaaaaagcaggatagctcagatgaggacgacgatgatgatgaggcccctaagaggcagacgagaaggcgagcagccaagaatgtctcctataaggaggatgatgacttcgaaaccgattctgatgatctgatagagatgaccggcgagggcgtagacgaacagcaagataatagcgaaaccatcgagaaagtgttagactcccgtctgggaaagaaaggcgctaccggtgcctctactactgtgtacgccattgaggcaaacggggaccccagtggtgactttgatactgagaaagacgagggcgagatccagtatcttatcaaatggaaggggtggagctatattcattccacctgggagagtgaagagagtcttcagcagcagaaagtcaagggcctgaagaaattggaaaactttaaaaagaaggaagacgagattaagcagtggctcgggaaggtaagccccgaggacgtggaatacttcaactgtcagcaggaactggccagtgagttgaataagcagtatcagatcgtggagcgggtaattgcagtcaaaacgtccaagagtacactgggccagaccgacttcccggcacatagtcggaaacctgcccctagtaacgaacctgagtacttgtgcaagtggatgggactgccttatagtgaatgttcatgggaggatgaagctctgatcggcaagaagttccagaattgcatcgattcctttcattcacgcaataactccaagactatacctaccagagagtgtaaggccctgaagcaaaggcccagattcgtagcactcaaaaagcaaccggcatacctgggcggtgagaatctggagctgagagattatcaattagaggggttaaattggctggctcattcctggtgcaagtag

SEQ ID NO: 218318 - DNA, 1545 bp, synthetic construct
  misc_feature 1..1545: note = Description of Artificial Sequence: Synthetic coding sequence
  source 1..1545: mol_type = other DNA
atggctcacaagcagagggaagactacctgaatctctcaccctgcgtctttacctggtacaggacattttcccagctggcgtttgatggggagaagctgagtcactccgcatccgaggaagccagtggttccgactccggctcacaatccgagtccgagcagggctcggatccaggttccggacatgggtccgaaagcaacagctccagcgagagctccgagtcccagtcggagagcgagagtgagtctgctggcagcaaaagccagccagttctccccgaagcaaaggaaaagcctgcgtctaagaaggagcgaattgccgatgtgaagaagatgtgggaggagtatcctgacgtgtacggcgttagacgatcaaataggagccggcaagagcctagtcggtttaacattaaagaggaagcgagctccggatctgagtccgggtcaccgaaaaggagaggacagagacaactcaagaagcaggaaaagtggaaacaggagccaagcgaagacgagcaggaacagggcacctcggctgagagcgaacccgaacagaaaaaggtgaaagcgaggaggcctgtgccaaggcggactgtgccgaaaccgagggtcaagaaacagcccaaaactcagaggggcaagcgcaagaaacaagattcttcagacgaggacgatgatgatgacgaggcaccaaaacgacaaacccgtagacgagcagcaaaaaacgtgagctataaggaggatgatgatttcgagacagacagtgacgatcttatcgagatgaccggggagggcgttgacgaacagcaggataattccgaaaccattgagaaggtcctagattcaaggctgggcaaaaagggggcaacgggcgctagcactacagtttacgccattgaagcgaatggcgatcccagcggcgacttcgacactgagaaggatgagggagaaatccaatacctgattaagtggaagggttggtcgtatattcatagtacgtgggagagcgaagagtctctgcaacaacagaaagttaaaggcctcaagaagcttgaaaattttaagaagaaggaggacgaaattaaacagtggctgggcaaagtcagcccagaagacgtagagtatttcaattgtcagcaggagctcgctagtgaactgaacaaacaatatcagattgtggagcgggtgatcgctgtgaagactagtaaatctacactgggccaaaccgatttccctgcccacagccgcaagccagctcccagcaatgaaccggagtatctctgcaaatggatgggcttgccctacagcgagtgctcctgggaagacgaagccttgatcggaaaaaaattccaaaactgcattgacagtttccactcgcggaacaatagcaagaccattcccacaagggagtgcaaagcactaaaacaaaggccccgtttcgtcgcgttgaagaagcagcccgcttatcttgggggagagaaccttgagctcagggattaccagctcgaggggcttaactggctggcccactcctggtgcaagtag

SEQ ID NO: 218319 - DNA, 552 bp, synthetic construct
  misc_feature 1..552: note = Description of Artificial Sequence: Synthetic coding sequence
  source 1..552: mol_type = other DNA
atgatgcgcaacaaggacaaatcccaagaagaggattcttccctgcattcaaatgcctcttcccattctgcatcagaggaggcttctgggtctgacagcggatcgcagagcgagtccgaacagggctccgaccccggttcgggccatggaagtgagtctaattcatcttcagagtcctcggagagccaaagtgagagcgagagtgagtcggccggatctaaaagccagccggtcctgcccgaagccaaagaaaaacctgctagcaagaaagagaggattgctgacgtgaaaaaaatgtgggaggagtatcccgatgtttatggggtccgcagatctaacagaagtcgccaggaaccaagcagatttaacatcaaggaggaggctagttcaggctctgagtcaggatcgcccaagcggaggggtcagcggcagctcaaaaagcaagaaaaatggaaacaggagccctcagaggatgaacaggagcagggcacaagtgcggaaagcgagccagagcagaagaaggtgaaggctcgacggccagttccacggtag

SEQ ID NO: 218320 - DNA, 5220 bp, synthetic construct
  misc_feature 1..5220: note = Description of Artificial Sequence: Synthetic coding sequence
  source 1..5220: mol_type = other DNA
atgatgcgcaacaaagacaagagccaggaggaggactcatcgctccactcgaatgccagctcccattctgccagcgaagaggcgtccgggagcgattctgggtctcaaagtgaatccgaacaggggtccgatcccggaagcggccatgggtccgaatcaaattcttcttcggaatcctccgaaagtcagtcagaatccgaaagtgaaagtgctggtagcaagagtcaaccagtgttgcctgaagccaaggagaagccagcatctaagaaagagcgcatcgccgacgtaaaaaagatgtgggaagaataccccgatgtgtacggcgtgcgtcggagcaacagatccagacaagagcctagcaggtttaatatcaaagaggaagcatccagtggcagtgaatctggcagtccaaaaagaagaggacagagacaactcaagaaacaagaaaagtggaaacaggaaccatccgaggatgagcaagagcagggaaccagcgctgagagcgaacctgagcaaaagaaggtgaaagccaggcggcctgtaccacggagaacagtgcctaaaccccgagtaaaaaagcaaccaaaaacgcaacgcggtaagcgcaaaaagcaagacagctctgatgaggatgatgacgacgatgaagcgcctaaaaggcaaacaagacgacgagccgctaagaacgtcagctacaaagaggatgacgatttcgaaacagattccgacgacctgattgaaatgacaggcgaaggggtggacgaacagcaggataactccgaaactattgagaaagtcctagactcccgactcggcaaaaagggcgctaccggtgctagtacaaccgtgtatgctattgaagctaacggcgatcccagtggagatttcgatacggaaaaggacgaaggtgaaattcaatacttgattaaatggaaaggatggtcttacattcactcaacctgggaatccgaagagtcacttcagcagcagaaggtcaaaggcttgaagaaactggaaaatttcaagaagaaggaagatgagattaagcaatggctgggcaaggtgagccccgaggatgtcgaatactttaattgccaacaagagctagcctcagaactcaataagcagtaccagatagtagagagagttatcgcagtaaagaccagcaaaagtacactgggtcagaccgactttccagcccacagccggaaacccgctccgtctaacgagccagagtatctttgtaagtggatgggattaccttacagtgagtgctcttgggaggatgaggcactgattgggaaaaagttccagaattgcattgactcatttcactcgcgcaataattcgaagacaatccccacaagggagtgcaaagccttgaagcagcgccctaggttcgtggctttgaaaaaacagcccgcttacctggggggtgagaatcttgaactgcgcgattatcagctagaagggcttaattggctggcccattcctggtgcaagaataattccgtaattctggccgacgaaatggggttaggcaaaactattcagactatctcgttcttatcttacctctttcatcagcaccagctctacgggccattccttattgtcgtgcccctttccacgttgactagctggcaaagagagtttgaaatttgggcacctgagattaacgtggtggtctacataggcgacttaatgtccaggaacaccattagggagtatgagtggatacattctcaaactaaaagactgaaatttaacgccctgattaccacgtacgagattttactcaaagataagactgtcctggggtccatcaattgggcattcctcggggtggacgaagcccatagactgaaaaacgatgattcactgctgtacaaaacgctgattgatttcaagagcaaccaccggcttctgatcacggggaccccattgcagaactcgttgaaagaactttggtctctgctgcatttcatcatgcccgagaaatttgagttttgggaagatttcgaagaggatcacggcaagggcagagaaaatggttaccaaagcctgcataaagtgctggaaccgttcttactgagaagagtaaagaaggatgttgaaaaatccttgcccgcaaaagtggaacaaatcctcagagtggagatgtccgcgctgcagaagcagtactataagtggattttgacacgtaactacaaggctctggcaaaggggactaggggatccacctccggattcctaaatatagtcatggagttgaaaaaatgttgtaatcactgctatctgatcaagccccctgaggaaaatgaacgtgagaacgggcaagaaatcctcctgagcctcatcaggagcagcggtaaactgatcctgctggacaaactgttaacccgtctgagagaacgaggcaatcgcgttttgatatttagtcaaatggtgcgcatgttggacattctcgcggaatatctcacaatcaagcattatccattccagaggctagatggttctattaaaggggagataagaaagcaagctctcgatcacttcaatgctgacgggagtgaggacttttgttttctgctcagcacacgagcagggggtttgggaatcaatttagcaagcgcggacaccgtggtgattttcgatagcgattggaatccccagaacgatctgcaggcccaagccagagctcacagaattgggcagaagaaacaggtcaacatctaccgactggtgacaaagggaaccgtcgaggaggaaattattgaacgggcaaaaaagaaaatggtgttggatcacctcgttattcagagaatggatacaacaggaaggacaatccttgaaaataactcaggtcgatcaaacagtaatccgttcaataaagaggagctgacggccatcttgaaattcggagcagaagatctttttaaagaactggagggtgaagagagtgagccgcaagagatggacattgacgagatcttacgtctcgcagagacaagagaaaatgaagtctctacctcagccacggatgagctgctgtctcagttcaaggttgccaacttcgccactatggaggacgaggaagaattagaagagcgtccccacaaggactgggatgagatcatccctgaggaacaaaggaagaaagtagaggaggaagagagacagaaagaattagaagaaatctatatgctgccgcgaataagatcctctaccaaaaaggcgcagacgaacgatagcgacagcgacaccgaaagcaagcgccaggcacaacgtagcagtgcgtctgaatcagaaacagaagatagtgacgatgataagaaacccaaaaggcggggacggcctagaagtgtgcggaaagatctggtggaaggttttacagatgcagaaattcgcagatttattaaggcatacaagaagttcggactgccgctcgaaagactggaatgtatcgccagagatgccgaattggttgacaagtcagtggctgatctcaaacggttaggggagctaatacacaactcatgcgtaagcgcgatgcaggaatacgaggagcaattgaaggagaatgcctcagaggggaagggccctgggaagcgtcgagggcctacaattaaaatcagtggcgtccaagtcaacgtgaagtctattatacagcatgaggaagaatttgagatgttgcacaagtctattccagtcgaccctgaagagaagaaaaagtactgtctcacctgtagagtgaaagccgcacattttgacgtggaatggggcgtcgaagacgactccagactgctgctaggaatttacgagcacggatacgggaattgggaactcatcaaaaccgatccagaactgaaacttacagataaaatactgccggtggaaacagataaaaaaccacaggggaagcagttacagactagagcagactacctactgaagctgctgagaaagggactggaaaagaagggcgctgttacaggaggcgaggaagcaaagctcaaaaagagaaaacctcgcgtcaaaaaggagaacaaggtacctcgtttgaaggaggagcatggcattgagctgagtagtccaagacactctgataacccatcagaggaaggggaagttaaagatgacggtctggagaaaagtcctatgaagaaaaagcagaaaaagaaagagaacaaggaaaataaggagaagcagatgtcttcccgaaaagataaggaaggcgacaaagagcgaaaaaaatccaaagataagaaagagaagcccaagtccggcgatgcaaagagcagcagcaaaagcaaaagatcccaagggcctgtacatattacggctgggagcgaaccagtgcctatcggagaggacgaagatgacgatctggatcaggagactttcagtatttgtaaggagcgcatgcgacccgtaaagaaagctctgaagcagttggacaagcccgataaaggtctcaatgtgcaggaacaactcgaacacacacgcaactgtttactgaagataggagatagaatcgctgaatgcttgaaagcgtacagcgatcaggagcacataaagctctggcgtagaaatttatggatcttcgtgagtaagttcactgagtttgacgcgagaaaactgcacaagctctataagatggcccacaagaagcggagtcaggaagaggaagaacagaaaaaaaaggacgacgtcaccgggggaaaaaaaccatttagacctgaagcatcagggtcctcacgggattctctgatctctcagtctcatacgagtcataatttgcacccacagaaacctcacctgcccgcatcacacgggcctcagatgcatggtcatcctagagacaattacaaccaccctaacaagcgtcacttttccaatgccgataggggagattggcagagagaaaggaagttcaattacggtgggggtaacaacaaccctccgtggggatctgacaggcaccatcagtacgagcaacactggtacaaggaccatcactacggagaccgtaggcatatggatgcccatcgcagcggatcctacaggcccaacaacatgagccggaaacggccatacgatcagtatagctctgatcgcgatcatagaggacatagggactactacgacagatacgctaagggttgtgaaacacctggggcaaacttgtgccaggagctcttcctgggacgcaagtac

SEQ ID NO: 218321 - DNA, 6002 bp, synthetic construct
  misc_feature 1..6002: note = Description of Artificial Sequence: Synthetic coding sequence
  source 1..6002: mol_type = other DNA
atgaaagctgccgacacggtcattctctgggcaaggagcaagaatgatcaacttaggatttcctttccaccaggactttgttggggggaccggatgccagataaagatgatattcgtctcctgccgtctgctctcggagtgaaaaaaagaaagcgtggtccaaaaaagcagaaagagaataagcctggaaagcctcgcaagcggaagaaacgcgactcggaagaagaatttgggagcgaaagagacgaatacagagagaagtctgaatctggcggttccgagtacgggaccgggcctggccgtaagcgcaggagaaaacatagagagaagaaggaaaagaagaccaagagacggaagaagggtgaaggagacggcggacagaaacaggtagaacagaagagctcagccaccctccttctgacatggggattagaagatgtggaacatgtctttagcgaggaggattatcatacactgacaaactacaaggcctttagccagtttatgcgaccgttaattgcaaaaaagaatccgaaaatcccaatgtccaagatgatgacgatcctgggcgcaaagtggcgggagttttccgccaataaccctttcaaggggtcagctgctgctgtggccgcagcagcagcagctgctgcagccgctgtggccgagcaggtcagcgcagcagttagttctgcaactccaatcgccccatcaggcccaccagccctgcctccacctccagccgcagatatccagcctccacccataaggagggccaagaccaaggagggaaaaggtcccggacacaaacggagaagtaagagtccgagagttccagacggccgtaagaagcttcgtggcaagaagatggccccattaaagataaaactggggctgctcggcggaaaaagaaaaaaaggcggtagttatgtgtttcagtctgacgagggcccagaacctgaagctgaggaatccgatctggactctggttctgtgcacagcgcatcaggcagacctgacggtccagtccggacaaagaaattgaaacgagggaggcccggacggaagaaaaagaaggtgctcggatgtcccgcagtcgccggtgaggaggaggtcgacggctatgagacagaccatcaagactactgtgaggtttgccagcaaggaggcgaaattattctctgtgacacctgtcctagagcctatcaccttgtgtgccttgatcccgagcttgacagagcccctgaggggaagtggagttgtccacactgcgagaaggagggcgttcaatgggaagctaaggaggaggaggaagaatatgaggaggagggcgaagaagagggggagaaggaggaggaggacgatcacatggagtactgcagggtgtgcaaggacggcggtgagctgctgtgttgcgacgcatgcatctccagttatcacatacactgtctcaaccctcctctgcccgatatcccaaacggagaatggctctgcccaagatgcacctgccctgttctgaagggcagggtacagaaaattctgcactggcgctggggggagcctcccgtggccgtgccagcacctcagcaggcagatggtaacccggatgtcccacctccacgacctctgcaaggcagatctgagagagaattcttcgtaaaatgggtggggctcagctactggcactgcagctgggcgaaggagctacagcttgagatctttcacctcgtgatgtatcggaactaccagcgcaaaaacgatatggacgagccccctcccctggactacgggagcggagaagacgacgggaaatccgacaagcggaaggtcaaagacccccattacgccgaaatggaagaaaagtattacagatttgggatcaagccagaatggatgaccgtgcatcgaatcataaatcactcagtggataagaaggggaattaccattatctggtgaagtggcgcgacctgccatacgatcaatctacgtgggaggaagatgaaatgaatattccagagtatgaagaacataaacagtcatactggcgccaccgggaactgattatgggtgaggaccctgcgcagcctcgcaagtacaaaaagaaaaaaaaggaattgcagggcgacggcccacccagtagtcccacaaacgatcctacagtcaaatatgaaacccagcctagatttataaccgcaacaggaggaaccctccatatgtaccagctagagggactcaattggctcagattctcctgggcacagggtacagatacgattcttgcagacgagatggggctgggaaaaactatccagacaattgtgtttctgtatagcctctacaaggagggacacactaagggcccattccttgtgtcagcccctttgtctaccatcatcaactgggagcgggagttccagatgtgggcccctaagttttacgtggtaacgtatacgggcgacaaggattcccgcgctataattcgcgagaatgaattttcattcgaagataacgccattaaggggggtaaaaaggccttcaagatgaaacgggaagctcaagttaagtttcacgtgctgctcacctcgtacgagctcattaccatcgaccaagctgctttgggatccatcagatgggcatgtcttgtggttgacgaagctcataggctgaagaataaccagagcaagttcttcagggttcttaatggctataagattgaccataaattgcttctgacagggacacctctccaaaataatctggaggagctgttccacttactcaatttcctgacaccagagagatttaataaccttgagggatttcttgaagagttcgcagacataagcaaagaagaccaaatcaaaaaactgcacgatctcttaggtccgcatatgctgcggcgactgaaggccgacgtgtttaaaaacatgcctgccaagacggagctgatcgttcgggtagagttatcccccatgcagaagaagtactataagtacatcttgacaagaaacttcgaggccctaaactctcgaggcggtggcaaccaggtgtctctcctgaatataatgatggatctcaaaaaatgctgtaatcatccataccttttcccagtggcagctatggagtctcctaaattgcctagcggagcatatgagggcggagcactgatcaagagcagcggcaagctaatgctactgcagaaaatgctgcgtaaactgaaggagcaaggccatcgggtgttgatcttttcccagatgacaaaaatgttggacctcttggaggacttcctggactacgaggggtacaaatatgagagaatagacgggggtatcaccggcgctctaaggcaggaagcgatcgacaggtttaatgcccctggcgcacagcagttttgcttcttgctgtctacccgggcaggcggtctgggcattaatctcgccaccgccgatacagttatcatttttgacagcgattggaacccccacaatgatatacaggcattttcaagagcacaccgcattgggcaggccaataaggtgatgatctacagatttgtgacacgtgcgtctgtggaggagaggataacccaagtggcaaagaggaagatgatgcttactcatcttgtcgtcagaccaggactcggaagtaaagccggaagtatgtcaaaacaggaactcgatgatattctgaagttcgggactgaggagctcttcaaagatgagaacgaaggtgagaacaaagaagaggactcttctgtgatccactatgacaacgaggcaatcgcacgactcctcgatcgaaaccaggatgctaccgaggataccgatgtgcagaacatgaacgagtacctaagcagttttaaggtggcacagtacgtggttagggaggaagacaagattgaagaaattgaacgagagatcattaaacaggaggaaaatgtcgaccccgactactgggaaaaactgctccggcaccactatgagcagcagcaggaggacctggcacgcaacctggggaagggcaagagagtgaggaagcaggttaattacaacgacgctgcccaggaggaccaagataaccagagcgagtatagtgttggttccgaggaggaggatgaagacttcgacgagcgacccgagggaaggcggcagtccaagcggcaacttaggaacgagaaagacaaacctcttccccctctgttggctcgtgtgggtgggaacatagaggttctgggattcaataccaggcaaagaaaagcattcctgaacgctgtgatgcgttggggcatgcccccacaggatgcttttaccactcagtggctcgtgcgcgacctccgcggaaagacagagaaagaatttaaagcctacgtgtctctttttatgagacacctgtgcgagccaggggctgacggaagcgagactttcgccgacggagtgcctcgagaggggttatctcggcagcaagtcctgactcgaataggcgttatgtctctcgtgaagaagaaagtgcaagaatttgagcacattaacgggcgttggtcaatgcccgaactcatgccagacccatccgcagactctaaacgaagtagtcgtgcatcatcgccaaccaagacctcccccactacccccgaagccagcgccacaaactccccctgtacctccaaacccgcaactccagcaccatcagaaaaaggcgaagggatcagaacacccctggagaaagaggaagctgagaaccaggaagagaaacctgaaaaaaattctagaatcggagagaaaatggagaccgaagccgatgcaccgagtccggcaccaagcctgggcgagcggctcgaacccaggaaaataccactggaggacgaagtccccggtgttcctggcgaaatggagcccgaaccaggttacagaggcgaccgcgagaaatctgcaacagaatctaccccaggggagcgcggagaggaaaagccgctggacggtcaagagcatagagaacgaccagaaggcgaaacaggtgatctgggtaaaagagaagatgttaaaggcgatcgggagttacggccaggtcctagggatgaaccacgaagcaatgggagaagggaggaaaagacagagaagcccaggttcatgtttaatatcgcagacggaggatttaccgaactgcacacgctctggcagaatgaagagagggctgccatctcctccggcaagttaaatgagatttggcatcgcagacatgattactggctacttgccggtattgtcttgcacggctacgctaggtggcaagacattcaaaatgacgctcagtttgccattattaatgagcccttcaagaccgaggccaacaaagggaactttctggaaatgaagaataaattcctggccaggcgattcaaactccttgaacaggcactggtgattgaggagcagctgagacgggcagcatatcttaatttgtcccaggagcctgcacacccagccatggcgttacacgcaaggttcgctgaggccgagtgcttggccgagtctcatcagcatctgagcaaagagtcattggcagggaacaagcccgctaacgcagtacttcacaaagtgctgaatcaattagaagaactcctttctgacatgaaagctgatgtgactcggctcccggctaccctgagtcgtatcccgcctattgctgctcgcctgcagatgtcagaaaggagtattttgtctaggctggctagcaaagggaccgagccccaccctacacctgcttatcctcctggcccttacgctaccccacccggatatggagcggcttttagtgctgctccggtgggggcactggctgccgcaggtgctaactacagtcaaatgcccgcaggctcattcattaccgccgctaccaatggacctcccgtactggtgaagaaagagaaagaaatggttggagccctggttagtgatggccttgacaggaaggagcccagagcgggagaggtgatctgcattgacgacta

SEQ ID NO: 218322 - DNA, 5900 bp, synthetic construct
  misc_feature 1..5900: note = Description of Artificial Sequence: Synthetic coding sequence
  source 1..5900: mol_type = other DNA
atgaaagccgcagacactgtgattctctgggctcggtctaaaaacgaccagctccgaatttcattcccaccgggattatgttggggagatagaatgcccgacaaggatgacattaggctgcttccctctgctctgggtgtcaagaaaaggaaacgcggacctaaaaagcagaaggagaacaagccagggaaaccacgtaagcgtaagaagcgagatagcgaagaggagttcggcagcgaacgcgacgagtatagggaaaagagcgagtctgggggtagcgagtacggtactggtcctggcagaaagagaagacgcaaacaccgggagaagaaggagaaaaagactaaacgaagaaagaagggcgagggtgacgggggtcaaaagcaggtcgagcaaaagagctccgcaacattattgctgacatggggattagaggacgtggaacatgtgttctcagaggaggattaccacaccctgactaactacaaagccttctcacaatttatgcggccactcattgccaagaaaaatccaaagatccctatgtctaaaatgatgactatactaggcgctaagtggcgagaatttagtgctaacaatccattcaaggggtctgctgctgcagttgcagctgctgctgcagcagctgccgctgctgtcgctgagcaggtgtccgccgcagtttccagtgctacacccatcgccccttcaggccctccagccctccctccgcctccggcagccgacatacaaccccctcccattaggagagccaagaccaaagaggggaaaggtcccggtcacaagaggcgctccaagagtcctcgcgtgccagatgggcgtaaaaagctgcgcggaaagaagatggcacccctgaaaatcaagctgggtctcctcggcggaaaacggaaaaaaggtggttcatatgtgtttcagtctgatgaaggcccagagccagaggctgaagagtcagacctcgacagcggctccgtgcactctgcttcaggtaggcccgatggtcccgttcggaccaagaagttaaaacgcggtagacccggacggaagaaaaagaaggttttaggttgtccagcagtggcaggagaggaagaagttgacggttacgagacagatcaccaggactattgcgaagtgtgccagcaggggggagaaattatactgtgtgacacctgtccccgagcctaccacctggtgtgtcttgaccccgaactggaccgggctcctgaaggcaaatggtcttgtccacactgcgagaaagagggtgtgcagtgggaagctaaagaggaagaagaggagtacgaggaggagggcgaagaggaaggcgaaaaggaggaggaagatgaccacatggagtactgtagagtctgtaaagatggcggagagctcctctgctgtgatgcatgcatcagttcttaccacatccattgtctgaaccccccactccccgacatccccaatggcgaatggttatgcccccgatgtacgtgtccggtactgaaggggcgtgtacagaaaattctccattggcggtggggggagccacccgtcgctgtccccgcaccacaacaagccgacggaaacccagatgtgccccctcccaggccgctgcagggcagaagcgaacgggagttctttgtgaaatgggtggggctgagctattggcattgtagctgggctaaggaactccagctcgagatctttcacctggttatgtatcgcaattatcagcgcaaaaatgatatggacgaaccacctccactggattacggcagcggtgaggacgatggtaagtccgataagcggaaagtaaaggacccgcattatgccgagatggaggagaagtactatcggtttggaatcaagcccgaatggatgaccgtgcaccgaatcatcaaccatagcgtggacaaaaaaggtaactaccactacctggtgaaatggcgcgatcttccttatgatcagtcgacatgggaggaggacgagatgaatattccggagtacgaagagcataagcaatcctactggagacatcgggagctcatcatgggtgaagaccccgcacagcctagaaagtataaaaagaaaaaaaaggaactgcagggggatggacccccaagttcccccactaacgatccaacagtgaaatacgaaacacagccacgcttcattactgccacaggaggaactttgcacatgtaccagctcgaggggctgaactggctccgattcagttgggcacaggggactgataccatactggctgacgaaatggggcttggaaagaccatccagaccatcgtgtttctttacagcctgtacaaggagggtcacaccaaaggtccgttcctggttagcgctccccttagcactattatcaattgggagagagaatttcagatgtgggcacctaagttctatgtagtgacgtacaccggggacaaggactcgcgagctatcatccgtgaaaatgagttctcttttgaagacaatgccatcaaaggaggtaaaaaagcattcaagatgaaacgcgaagcacaggtgaaattccatgtgttattgacctcttatgaactcatcaccattgatcaggctgcattaggatcaatacggtgggcttgtctagtggtggacgaggctcacaggctcaaaaataatcagtccaagtttttcagggtcctaaacggatacaagattgatcacaagctattgctgactgggactcctttgcagaacaacttagaggaactgttccacctcctgaattttttgaccccagagcggtttaataacctggaagggttcctggaagaattcgccgacatcagtaaggaagatcagattaagaagctacacgacctactggggcctcacatgctacggaggttgaaggccgacgtgttcaagaacatgcctgctaaaacagagctgatcgtgcgcgtggagctcagtcccatgcagaaaaagtactacaagtatatactgacacggaactttgaggccctgaattcaaggggaggtggcaaccaggtgagccttctgaacatcatgatggatctgaagaaatgttgtaaccatccatatctcttcccggtggccgctatggagtcccccaaactcccttccggagcctatgagggaggcgctctaataaagagctctggcaagctcatgctcttacagaagatgctcaggaaactcaaggagcagggacaccgggtgctcatcttttcacaaatgacaaaaatgctcgacctcctcgaggatttcttggactatgagggatataaatatgagcgcatagatggtggcatcaccggcgctctccggcaggaagcaatcgacagatttaacgcacccggtgcccagcaattttgctttctgttgagcacccgagccggaggcctcggcatcaacctggcaacggctgatacagtaatcatctttgactctgattggaatcctcacaatgacattcaggcctttagtcgggctcacaggatcggacaggccaacaaggtgatgatttaccgatttgttacaagggcctctgtcgaagaaagaattacacaggtggcgaaaagaaagatgatgctgacacacctggtcgtccgtcccggtctgggcagtaaagccggttcaatgtcgaagcaagagctagatgacattctgaagtttggaactgaggaactgtttaaggacgagaatgagggtgagaacaaggaagaagacagtagtgttatccactatgacaacgaagccatcgcccgtctcctagatcgtaatcaggatgccactgaggacacagacgttcaaaatatgaatgaatatctcagcagctttaaggtagctcagtatgtggtccgcgaggaggataaaatcgaggagatagaacgggagataatcaagcaggaggagaacgtcgacccagattactgggagaagctcctgagacatcactacgaacagcagcaggaagacctggccaggaacctcggcaaaggcaaacgcgtccgcaaacaagttaactacaacgacgcagctcaagaagatcaagataaccaatctgaatactccgtcggctctgaggaggaagatgaggacttcgatgaaagaccagagggcaggcgccaaagtaagcgccagctccgtaatgagaaggataagcctctcccgcctctcctggctagggtgggaggtaacatagaggtcctggggttcaacacaaggcaacgtaaggctttcctgaacgccgtgatgaggtgggggatgcctcctcaagacgcctttaccacacagtggctggtgcgggacctcagagggaagaccgagaaggagttcaaggcgtacgtcagtctcttcatgagacacctgtgtgagccgggtgctgacggctctgagacctttgccgacggggtgccaagagagggcttgagccggcagcaagttcttacacggattggagtcatgagcctagtaaaaaaaaaagttcaagagtttgagcacatcaacggcagatggagcatgcctgagctgatgcccgatcctagcgcagactcaaaaaggtcctccagggcctccagtccaaccaagacgtcgcccaccacacctgaagcttctgctaccaattctccttgcacaagcaaacctgccaccccagcaccatccgaaaagggggagggaatccgaacgccactggagaaagaggaggctgaaaaccaggaagagaagccagagaaaaactccagaattggggaaaagatggagacagaggccgatgccccaagccctgcacccagcctcggggaacggctggagccccgtaagatccccttggaggacgaggttcccggagtcccaggagagatggaacccgagcctggttatcgcggtgaccgggaaaaaagcgaggacgtgaagggagacagggaactgcgaccgggtcctagggacgagcccagaagcaatggtaggcgagaagagaaaacggagaagccgaggtttatgttcaacatcgccgacggcggatttacagaattacacactctgtggcagaatgaggaaagggccgctattagtagtggcaagttaaacgaaatctggcacaggagacatgattattggctgttggccggaatagtgctccacggatacgcaaggtggcaggatatccagaatgacgcccagtttgccattattaatgaacccttcaagacagaagcaaataagggcaactttctggaaatgaagaacaagttcctcgctcgacgctttaaactgctcgagcaggcactcgtgatagaggagcagctgcgtagggctgcctacctcaacctgtcgcaagaacccgctcaccccgcaatggcactccacgctcgcttcgccgaagcagagtgtctcgcagagagccatcagcacctttccaaagaaagcttggccggaaacaaaccagcaaatgcagtgctccataaagtgttgaaccagctggaggagctgctttcagatatgaaagcggacgtgactcgcctgcctgctaccctgtccaggattccaccaatagcggctcgcctgcagatgtccgagcgcagtattttatcccggctcgcttctaagggcaccgagccgcatcccacacctgcctacccacctgggccttacgctacacctcccggatacggggctgccttcagtgcagcacctgttggcgcactcgcggcagccggtgccaattacagccagatgcctgcagggtcattcatcacagccgctaccaacggtcctcctgtcctcgtgaaaaaagaaaaggaaatggttggcgctctggtttcagatggcttagacagaaaggagccaagagcaggcgaagtgatttgcatcgacgatta

SEQ ID NO: 218323 - DNA, 6179 bp, synthetic construct
  misc_feature 1..6179: note = Description of Artificial Sequence: Synthetic coding sequence
  source 1..6179: mol_type = other DNA
atggcttctccgcttcgcgatgaagaagaggaggaggaggagatggttgtgtctgaggaggaggaagaggaggaggaagagggcgacgaggaagaggaagaggaagtggaagccgctgatgaagacgatgaagaggacgatgatgagggcgtgcttggcagggggccaggccatgataggggcagggataggcattctcctcccggatgccacctgtttccccctcctccaccccctcctccgccactacccccacctcccccaccaccacctccagacaaggatgacatccggcttctgccctctgcgctcggtgtgaagaaaaggaaacgcggtcctaaaaaacagaaggagaataagccaggtaaacctcgcaagcggaagaagagggatagcgaagaagagttcggctccgagagagacgagtatcgggaaaagtcagagtctggcggttctgaatatggtaccggaccaggaaggaaacgtcgaaggaaacaccgtgagaaaaaagagaagaaaaccaagcgtaggaaaaagggcgaaggagatggaggtcagaaacaggttgagcagaaatcatcggccacattactgctaacctggggtctcgaagatgtcgaacacgtgttcagcgaggaggattaccacacactgactaattacaaggcattcagtcaatttatgcgccctctgatcgccaaaaagaaccctaagatacccatgagtaagatgatgacgatcctcggagcgaaatggcgggagtttagtgctaataaccccttcaaggggagcgccgctgctgtcgcagcagctgcagcagcggcagccgctgccgtggccgagcaggtatccgccgcagtgtccagcgctactcccattgccccaagcggcccacctgcccttccccctccccctgccgctgatattcagccacctcctatcaggcgcgcaaagactaaagaaggcaagggacccggtcacaaacggagatcaaaatcgcctcgtgttcccgatggacggaaaaaactacgcggtaagaagatggcaccactgaagattaagctcggcctcctcggcggtaagaggaaaaagggtggcagctacgttttccagagcgatgagggccctgagcccgaggccgaagaaagcgacctcgatagtgggtccgtgcattcggccagtggcaggcctgatggacctgttaggaccaagaagctaaaacgcggacggccaggcagaaagaaaaagaaggttttgggctgtcccgctgtcgcaggagaagaggaagtcgacgggtatgagactgaccaccaggactactgcgaagtgtgccagcagggcggtgagatcatcctgtgcgatacttgtccacgggcataccacctggtttgccttgacccagaactggatagagctcctgagggtaagtggtcatgtccccattgtgagaaagaaggggtgcagtgggaagcaaaggaagaagaggaggagtatgaggaagagggcgaagaagaaggagagaaagaggaggaggatgaccatatggaatactgtagggtgtgtaaagacggtggagaacttctgtgctgtgatgcatgcatcagtagctaccacatacactgtctgaatcccccactgcctgacatacctaatggagagtggttgtgtccccgatgcacttgcccagtgttgaagggccgagtgcagaagatcctgcactggcggtggggtgaaccgccagtagctgtgcccgcaccacagcaagccgatggaaaccccgatgtgccaccccctaggccactgcagggacgctcagaaagagaatttttcgtgaagtgggtcggactctcctactggcactgcagttgggcaaaagagctccagctggaaattttccaccttgtgatgtataggaattaccagaggaagaatgacatggatgaaccacccccactggactacggaagtggggaagatgacggtaaaagcgacaaacgcaaagtaaaggatccccactatgccgaaatggaggaaaaatactatcggtttggaatcaagccggaatggatgaccgtgcatcgcattataaaccactccgtcgacaagaagggtaattaccactaccttgtgaagtggcgcgatctcccctatgaccagtctacttgggaagaggatgagatgaacatccctgagtatgaagagcacaagcagtcatactggcggcaccgcgagctcattatgggtgaagatcctgcacagcctcggaaatacaaaaagaagaagaaggagctgcagggagacgggcctccatcctcccctaccaatgacccaactgtcaaatatgaaacccagccacgatttatcacagccacaggaggaacattacacatgtaccaactggagggcctgaactggctgcgcttctcttgggcacagggaactgatactatactagccgacgaaatgggcctggggaagaccatccagacgattgtgttcctgtactccctgtataaggagggtcacacgaaaggtcccttcctagtctctgcccctttatccaccatcataaactgggagagagaattccagatgtgggccccaaagttttatgtggttacatacaccggcgacaaggattccagggcaataatacgggagaatgagttcagcttcgaagacaatgctataaagggcggtaaaaaagcctttaagatgaagcgagaggcacaggtgaaattccacgttctgctgaccagttacgagttgatcactatcgatcaagctgccctgggcagtattcggtgggcttgcctggtggtcgatgaggcccaccgcctcaaaaataatcagtcaaaattcttccgagtcctcaatggatataagattgaccacaaactcctgctgacagggacacctctgcaaaataaccttgaagagcttttccatctcctcaacttcctgacccccgaaagattcaacaacttggaggggtttttggaggagtttgccgatatctccaaggaggatcagattaaaaaactacatgacctgctgggaccccacatgttgaggcgactaaaagccgacgtgtttaaaaacatgcccgctaagacagagttgattgtccgcgtcgagctaagtcccatgcagaaaaaatactacaaatacatattgacacgaaacttcgaggccttgaacagtcggggaggcggtaaccaggtgagcttactgaacattatgatggatctgaagaagtgttgcaaccacccttacctgttcccggtcgcggctatggaatcacccaagctgccaagcggggcatacgagggcggagccttgataaagagctccgggaaacttatgctgctgcagaaaatgctccgcaagttaaaagagcaaggccacagagtgcttatctttagccagatgaccaaaatgctagatcttctagaggacttcttggattacgaagggtacaagtacgaacgcattgatggcggaattacaggcgcactgcggcaggaggccattgatcgtttcaatgcccctggagcccagcagttctgtttcttgctttctacgagggctggtggactggggatcaatctggcaacggccgacaccgtcattattttcgattcagactggaacccccacaacgatattcaggcgttttctcgcgctcatcggattggtcaggctaataaggtgatgatataccgttttgtcacaagggcgtcagtcgaggagagaatcacacaagtggccaagagaaagatgatgctgacacatctcgtcgtgcgtcccggtttaggctccaaggcaggctccatgagcaagcaggaactcgacgatatcctgaaatttgggaccgaggaactgttcaaagatgagaacgagggtgaaaataaagaggaggatagctcagtgatccactatgacaacgaggcaatagctcgcctccttgacagaaaccaggatgccacagaagataccgacgtgcaaaatatgaacgagtatcttagtagtttcaaagtggcccagtatgttgtgcgggaggaagataagatcgaagagatcgagcgagagatcatcaaacaagaagagaacgtggaccccgattattgggagaagcttctgcgacatcattacgaacagcagcaggaggatcttgccagaaatttaggaaaaggcaaacgcgtccgtaagcaagtcaattataacgacgccgcacaggaggatcaagacaaccaatcggagtattcagtaggaagtgaagaggaagatgaagattttgatgaaaggcccgaaggtcgtcgacaatcaaaaagacagctgcgaaatgaaaaagataagcccttgccacctctgctcgcaagagtcggagggaatattgaggtcctggggttcaacacccgacagaggaaggccttcctcaacgccgtcatgcggtggggtatgccccctcaggatgcatttacaactcaatggttggtgagggatcttaggggcaagactgagaaggaatttaaagcctatgtatcactgtttatgcgacatctttgtgaaccaggagctgatggctcagagacttttgcggacggagtgcccagggaggggctgtcccgtcagcaagttctgactcgtattggcgtcatgtctttagtgaagaaaaaagttcaggaattcgagcatatcaatgggagatggagcatgccagagctgatgcctgacccttctgcagactctaagaggtccagccgcgctagttcccctaccaagacgtcccccaccacaccggaagcctccgctactaactctccctgtaccagcaaacctgccacacctgcaccatcagaaaaaggcgagggcattcggacccctctggagaaagaagaagccgaaaatcaggaagaaaagccggagaagaactcgcggattggggagaagatggaaactgaagctgacgcgcctagtccggctcctagtcttggagaaaggctggagccgagaaagattccgctcgaggacgaagttcctggtgtacctggggagatggagccagagccaggatatcggggagacagggaaaagtctgccaccgaatctactcccggagaacgcggtgaggaaaagccactggacggacaagagcaccgggaaaggcctgaaggcgagacaggcgacctggggaagcgggaggacgtcaagggggaccgagaactgcgacctggaccgagagatgaacccaggagtaacgggagacgagaagaaaagacagagaaaccaagatttatgttcaacatagcggatggcggttttacagagctgcataccctttggcagaacgaagaaagagcagctattagttctggcaaattaaatgaaatctggcacaggagacacgactactggctcttagcagggatagttcttcacggctacgcccgttggcaggatatccaaaacgatgcacaatttgctatcatcaacgagccattcaaaaccgaggccaacaagggtaatttcctggaaatgaagaataagtttcttgctcggagattcaagctcttggagcaggcgctcgtgatcgaagaacagttgaggcgcgctgcttacctgaacctgtcccaggaaccagcccatcccgctatggctttgcatgccaggttcgccgaggccgagtgccttgccgagagtcatcagcatctgagcaaggaatccctggcaggcaacaagcctgccaatgcagtgctccacaaggtgctcaatcaactggaggaactattatcagatatgaaagccgatgtcacgcgcttgccggctaccttatcgagaattcccccaatagccgctcggttacagatgagcgagcggtccattctctctaggcttgccagcaaaggcaccgagccacaccctacacccgcatatccaccagggccttatgccactccacctggttacggagcagctttcagtgctgcccctgtgggcgctttggctgccgctggggcaaattattcccagatgccagccggaagtttcatcaccgcagccacaaacggccctcccgtgctcgtgaagaaagaaaaggagatggtaggtgcactggtgtccgatgggttggatagaaaagagccacgcgcaggtgaagtaatctgcatcgacgatta

SEQ ID NO: 218324 - DNA, 5865 bp, synthetic construct
  misc_feature 1..5865: note = Description of Artificial Sequence: Synthetic coding sequence
  source 1..5865: mol_type = other DNA
atgcggggacccgtcgggacggaggaggagctcccgcgtctctttgccgaggaaatggaaaatgaggacgagatgtcggaggaagaggacggaggcctggaggcttttgacgacttttttcccgtggagcctgttagtctgccgaagaaaaagaagcccaagaagctgaaagagaataagtgtaagggtaaaaggaaaaaaaaggagggctcaaacgacgaactatccgagaatgaggaggacctcgaggaaaagtccgaatctgagggcagcgactactcccccaacaagaaaaaaaagaagaaattgaaagataagaaggaaaagaaagccaagagaaagaaaaaagacgaggacgaggatgataacgatgacggctgcttgaaggagccgaagagctcagggcaactgatggctgagtggggtctggacgatgttgattacctgttctctgaggaggattatcataccctaactaattataaggccttctctcaattccttcgccctttgattgccaaaaaaaatccaaagatcccgatgtctaagatgatgaccgtgcttggggcaaagtggcgggaattctctgcaaacaacccctttaagggatcatccgccgctgctgctgctgctgcagttgcggcagccgtggagacagttacgatcagtcccccactcgccgtgtccccgccacaggtcccacagcccgtgcccatcaggaaggcaaagaccaaagagggcaaaggccctggcgtcagaaagaaaattaaggggtccaaggatggaaagaagaaagggaaaggaaagaagacagcaggtctgaaattccgattcgggggtattagtaacaagcggaagaagggcagctcatccgaggaagatgagcgggaagagtccgactttgatagcgcatccattcacagtgcatcagttcggagcgaatgttccgcggcactgggaaagaaatccaagaggcgcaggaagaagaagcgcattgacgacggcgatggttacgagacagaccatcaagattattgtgaggtgtgccagcaggggggtgagattatcctctgtgacacttgcccccgagcttatcacctggtgtgcctggacccagaattagaaaaagcccctgagggcaagtggtcctgtccgcactgtgaaaaggaggggatccagtgggagccaaaggacgatgatgacgaggaggaggaggggggatgtgaggaagaggaagacgaccacatggagttctgtcgtgtctgcaaagatggcggagaactactctgctgcgacgcgtgtccaagttcctaccatctccactgcctcaatccgcctttgccggaaattccaaatggcgagtggctctgtccacggtgcacatgtccccctctcaagggcaaagtgcaacggatcctccattggcgctggacagaaccccctgcccctttcatggtgggactccctggacccgacgtcgagccaagtctgccacctccaaaacccctggagggaattcccgagcgcgaattcttcgtgaagtgggcaggtctgtcatactggcattgcagttgggttaaagagcttcaactggagctgtatcacaccgtgatgtacagaaattaccagagaaagaatgacatggatgaaccacctccgttcgattacggtagcggtgacgaagatgggaagtcggaaaagagaaagaacaaggatccactgtacgctaaaatggaggaacgcttctaccgctacgggattaagcctgaatggatgatgatacaccggatcttgaaccactcattcgacaagaagggagacgtgcattatctgattaagtggaaggacctgccttacgatcagtgtacctgggagatcgacgacatcgacatcccatattatgacaatctaaaacaagcctactggggccaccgcgagctgatgttgggggaggatacaagacttccaaaacgtctgctgaaaaaggggaagaagctccgagatgataaacaggagaagccgccagacactccaatagtagaccccaccgtgaagttcgacaaacagccatggtacatcgattccactggaggaaccctacatccctaccagttagaagggctgaactggcttagattttcatgggcccaggggaccgataccatcctagccgatgaaatgggcttgggaaagacagtgcagacaatagtgtttctgtactccctgtataaggaaggccacagtaaaggaccctacctagtctccgcacctctttctacgatcatcaactgggagcgcgagttcgagatgtgggccccagacttctacgtcgtgacgtacactggggacaaggagtcccgatctgtcatcagggagaatgagttctcctttgaggacaatgccatccggtctggcaaaaaagttttccggatgaaaaaagaggtgcagatcaaattccacgtgctgttgacatcttacgaactaataaccatcgaccaggcaattctggggtctattgagtgggcgtgccttgtcgttgatgaggctcacagattaaagaacaaccagtcaaaattttttagagtgcttaatagctataagattgattacaagcttctgctaactggaacccccttacaaaataaccttgaagagctgttccacttgcttaactttctgactcctgagaggtttaataacctcgaaggcttcttggaagaattcgctgacatctccaaggaggaccagatcaagaaactccatgaccttctgggtccgcacatgctgcgacgcctcaaagctgacgtcttcaaaaatatgccggcaaagactgaactgattgtgagggtggaactgtcccaaatgcagaagaaatactataaatttattctgaccagaaatttcgaagctctcaacagcaagggcggaggcaaccaggtgtccctgcttaacatcatgatggatttgaaaaagtgctgcaatcatccctatctctttcccgtggccgcagtcgaggctcctgtgctgcccaacgggagctacgacggcagttctctcgttaagagttctggaaagctcatgttgctacagaaaatgctgaaaaagttgagggatgaaggacaccgcgtcctgatctttagtcaaatgaccaagatgttggacctgctggaggattttcttgagtacgaaggctataagtacgagagaatcgatggcggaatcaccggcggactccgccaggaagctatcgatcggtttaatgcacctggggctcaacagttctgtttcctgctgtctacaagagctggtggattggggattaatctggccacggccgacacggtgattatatacgactccgattggaatccacataatgatatacaggcttttagccgggctcatcggatcggacaaaataagaaggtgatgatttatcggtttgtgacacgggcttccgtagaggagcggataacccaggtggcaaaacgcaagatgatgctcacccacctcgttgttaggcctggtttgggcagcaagagtggaagcatgaccaagcaggagctggacgatatcctcaagttcgggacagaggaactcttcaaagacgatgtcgaaggcatgatgtctcagggacaacggcctgtgacacctattccggacgtgcagagtagcaaaggcggaaacctggcagcttcagcaaagaagaagcatggcagcacacctcccggagataataaagacgtggaggattctagcgtgattcattacgacgatgctgccatatccaagttgctcgatcgtaatcaagacgctactgacgatactgagctgcagaatatgaatgagtatctcagctcatttaaggtggcacaatacgtggtgcgcgaggaggacggtgtggaggaagtggagcgcgagatcattaaacaggaagagaacgtcgaccctgattactgggaaaaactgcttaggcaccactacgagcagcagcaagaggatctggcaaggaatttgggtaagggcaaaagaatccgaaagcaagtgaactacaacgacgcaagccaggaggaccaggaatggcaagatgagttatctgacaatcagagtgaatattcaatcgggtctgaagacgaggacgaggatttcgaagaaaggcctgagggacaatccgggagacgtcagtctaggcgccagcttaaatctgatagggataagcccctgccccctctcctggccagggtgggtggaaacatcgaggtcctgggttttaatgctcggcagcggaaggcctttctgaatgcaatcatgaggtggggtatgccaccacaggacgcgtttaatagccactggcttgtgagggatctccgtgggaagtccgaaaaagagtttcgagcatatgtcagcctcttcatgcgccacctgtgcgagccgggagcggatggcgctgagacgtttgcggatggtgtgcccagagagggcctgagcagacagcatgtactgactcgaataggagtgatgtcactagtacgtaagaaggtacaggaattcgaacacgtaaatggcaagtacagcactcctgacttgataccagagggacccgaaggcaaaaagtctggtgaggtgatctcttctgatcctaacactcctgtgccagcgagcccggcacacctgctcccggcaccccttggactgcctgataaaatggaggcccagcttggatacatggatgaaaaagaccctggtgcccagaaacctcgacagcctctcgaggtgcaggctttgcccgctgctctggatagggtggagagcgaggacaagcacgagtcccccgcaagtaaagaacgggctagggaagaacgacctgaagagacagaaaaagcgccacccagtcccgagcagctgcctcgagaggaagttctgcccgaaaaagaaaagatcctggacaagctagagctatctttgatacatagtagaggggacagctcagaactacgcccagatgacaccaaagcggaggaaaaagaacctattgaaactcagcagaacggggacaaggaggaggatgacgagggcaaaaaggaggacaagaagggcaagtttaagtttatgtttaacattgctgacgggggatttacagaattacacaccctctggcagaacgaagagcgcgctgcagtctcttcaggaaagatctacgacatttggcacagaaggcatgactactggttgctggctggtatagttactcacggatatgccaggtggcaagatattcagaacgaccctagatacatgatcttaaacgaacctttcaaatcagaggtccacaaaggcaattatctggagatgaagaataagtttttggcccgtcgctttaagctgctggagcaagccttggttattgaagagcagctgcgcagagccgcatatctgaatatgacacaggatcccaatcatcccgcaatggccctgaacgccaggttagccgaggtagagtgcctcgcggagagccatcaacatcttagtaaagagagcttagcagggaataaacctgctaatgccgtcttacataaggtactcaaccagttggaggagctgctgagtgatatgaaagccgatgtgactcggctgccctccatgctgtccagaatccccccagttgccgctagactgcagatgtccgaacgtagcattctctcaaggctcacaaacagggccggagaccctactatccagcagggcgctttcgggtcatcgcagatgtactcaaacaattttgggcctaacttccggggtccaggccctggagggattgtcaattacaaccaaatgcccctcggcccatacgtcactgatatatac

SEQ ID NO: 218325 - DNA, 2427 bp, synthetic construct
  misc_feature 1..2427: note = Description of Artificial Sequence: Synthetic coding sequence
  source 1..2427: mol_type = other DNA
atgatctacaggttcgttactcgcgctagtgtcgaagaaagaattactcaggttgcgaagagaaaaatgatgctcactcatctggtggtcagacctggtctcggttctaaaagtggttcaatgacaaagcaggagctggatgatatcttaaaattcggaactgaagagttgttcaaggacgatgtggaaggtatgatgtcccaggggcagagaccagtgactcctatccctgatgttcaatcctcaaaaggtggaaatctggcagcctctgctaagaaaaaacatgggagcaccccccctggggataataaagacgtggaggactctagcgtaatccattatgacgatgctgctatcagcaagttgcttgatcgaaaccaagacgccactgacgatactgagctgcagaatatgaatgagtatttgtcatcgttcaaagttgctcagtatgttgtcagagaggaggacggtgtggaagaagtcgagagagagatcatcaagcaggaggagaacgtggaccctgattactgggagaaattgttgaggcaccactatgagcaacagcaggaggatttggcgagaaatctcggtaaaggcaagagaatccgcaaacaggtcaactacaatgacgcctctcaggaagaccaggagtggcaggatgagctctccgataaccagagtgaatactcaattggcagcgaagacgaggatgaggattttgaagaacgcccagaaggccaatccggaagacggcagtccagacgacagctgaagtctgaccgagacaagcccttaccacctctgttggcgagggttggcggtaacatcgaggttctgggttttaatgcacggcagagaaaggccttcctcaacgctatcatgaggtggggtatgcctccccaggacgccttcaatagtcactggctggttagagatctgcgagggaaatccgaaaaagagttcagagcgtacgttagcctgttcatgcggcacttgtgcgaacccggagcagatggagccgagacctttgctgacggcgtcccacgggagggcctttccaggcagcatgtgctgacccggattggcgtgatgagcctggtgagaaagaaagtccaggaattcgagcatgtgaatggcaagtactcaaccccagatctcatccccgagggaccagagggtaagaagagcggcgaggtgatcagctcagaccctaatacccccgtacctgcatctcccgctcatcttttgcccgctccattaggcctcccagacaaaatggaggcacagcttggatatatggacgaaaaagacccaggtgctcagaagccacgccagcctctggaggttcaggcattgcctgcagctctggaccgagttgaaagcgaggataaacatgaatccccggcttcgaaggaacgcgctagagaggaaaggcctgaagaaaccgaaaaagcccctccttctcccgagcagttgcctcgagaagaggtcctgcctgagaaagagaagatcctcgacaagctggaacttagcctcatccactcgaggggtgatagcagtgagctccgcccagatgacacaaaagccgaagaaaaagaaccaatagagacccagcagaatggggataaagaagaagacgacgaaggtaagaaagaagataaaaagggcaaatttaagttcatgtttaacatcgcagacggtggattcacagaacttcacacactgtggcagaatgaggagcgggctgctgtgagctcaggtaagatctacgacatatggcataggaggcatgactactggctccttgccggaatagtcacgcatggctatgcccgatggcaggacatccagaacgaccccaggtacatgatactgaatgaacctttcaagtcagaggttcacaaaggcaactacctggagatgaagaacaaattcctggctcgccgatttaaactgctcgaacaggctctcgttattgaggaacaactccgcagagctgcctacctgaacatgacacaagacccaaaccatccagcgatggccttgaacgcccgattggcggaagtcgagtgtttagctgaatcacaccagcatctctctaaggaatcactcgccggaaataagccagcaaacgcagtcctccataaagttctgaatcagcttgaggaattgctgtccgacatgaaggctgatgttacccgcctcccttcgatgctgtctcgcatcccccctgttgccgctcgcctgcagatgagcgaaagaagcatcctgtcccggctcactaatcgagctggagatcctactatacaacagatctcatcccgtcctcgggactttcctgtcctccagaggtcctttccagcagaacccaggctcccgggtcacttgcctgaccctcatggaagggagaagctgcccccattttag

SEQ ID NO: 218326 - DNA, 3588 bp, synthetic construct
  misc_feature 1..3588: note = Description of Artificial Sequence: Synthetic coding sequence
  source 1..3588: mol_type = other DNA
atggtgggccttccgggacccgatgtggaaccaagcctgcctcctcctaaaccccttgaaggaatccccgagcgcgagttctttgttaagtgggctggtttatcctactggcactgttcttgggtgaaggaactgcagctcgagctgtaccacacggtcatgtacaggaattaccagcggaagaatgacatggatgagccccctcccttcgactacggcagcggtgacgaggatggtaagtccgaaaagcggaaaaacaaggaccccttgtatgctaagatggaagagcgcttctacaggtatgggatcaagcccgagtggatgatgattcacaggattttaaaccacagcttcgataaaaagggggacgtgcactacctcataaaatggaaagacttaccgtatgaccagtgcacatgggaaatcgacgacattgatatcccgtactatgataatcttaagcaggcctattggggccacagagaactcatgttaggcgaagatacccgcctgccaaagcggcttctaaaaaaaggaaagaaacttagagatgataagcaggagaagccacccgacacccctatagtggaccctacagttaaattcgataagcagccatggtacatcgacagcactggcggaaccctgcacccatatcaattggaagggctcaattggctgcgcttctcatgggcacaggggactgacaccatactcgcagatgaaatgggcctgggtaaaacagtgcagacaatcgtatttctgtattcgctctataaggagggccacagcaagggcccttatctcgtttccgcacccctttccaccatcattaactgggagagagagttcgagatgtgggcaccggacttttacgtagtcacctatacaggagataaggaatctaggtcagttatcagagaaaacgaattttcctttgaagacaatgccataagatcgggcaaaaaggtctttaggatgaaaaaggaagtgcagattaaatttcacgtgctcctgactagctacgaactgattaccatcgaccaggctatcttggggagtattgagtgggcttgcctcgtggtcgatgaggcccaccggttgaagaacaaccagagcaagtttttccgggttctgaattcttacaagatcgattacaagctgctcctgactggaacaccattgcagaataatcttgaggagcttttccacctcttgaattttctcacaccagaaagatttaataatctggaaggatttctcgaggaattcgctgacatcagcaaagaggatcagattaagaaattgcacgacctgttaggccctcacatgctcagaagacttaaagctgacgtctttaagaacatgccagccaagaccgaactcatcgtgcgcgttgagctgagtcagatgcaaaagaagtattacaaatttatcctgactcggaactttgaggccctgaacagtaaagggggaggcaatcaagtgtctctgctcaatatcatgatggatttgaagaagtgttgtaatcacccgtatctctttccagtcgctgccgtggaggcgcctgtcctgccaaatggctcatatgatggttccagcttagttaaaagtagcggcaagctgatgctgttgcagaaaatgctcaagaaactccgggacgagggtcatcgcgtcctgatctttagccagatgacaaaaatgctcgacctattggaagactttctggagtacgaaggctataagtatgaaagaatcgacggcggaataacgggaggcctgcgacaggaagctattgacagatttaacgcacctggagctcagcagttttgctttctgctatccacgcgtgctggcggtctgggcataaacctcgccactgctgatacagtgataatctacgattctgattggaatcctcataacgatattcaagcctttagcagagcacaccggatcggccagaacaagaaggtcatgatttaccggttcgtgactcgggcttccgttgaggagcgcattacacaggttgctaagcggaagatgatgcttactcaccttgtcgtgcggccaggactgggcagcaagagtgggagcatgactaagcaggagctggatgatatcctcaaatttggcaccgaagagctttttaaagacgatgtggagggcatgatgagtcaggggcagcgtcctgttacgcccatccccgatgtacaaagcagcaagggaggcaaccttgcggcatcagccaagaaaaagcacggtagcacgcccccaggcgataacaaagatgtagaggatagtagcgtgatccactacgatgatgcagctatttcaaagctcctggatcgtaaccaggacgccactgacgataccgaactccaaaacatgaatgagtacctgtcgtcatttaaggtggcccagtatgtcgtgagagaagaggacggagtcgaggaagttgaaagagaaatcattaagcaggaggagaacgtggacccagactactgggagaagcttcttcggcaccattatgagcagcagcaggaggatctcgctaggaaccttggaaagggaaagcgcatcagaaaacaagtgaactacaatgacgccagtcaagaggaccaggagtggcaagatgaactgtctgataaccagagtgagtacagcattggaagtgaggatgaagatgaggacttcgaggagaggcctgaaggccagtcaggcagacgacagtcgcggaggcagctcaagtctgatcgggataaaccgctgcctcccctcttggctagagtgggtgggaacatcgaggtgttgggcttcaatgccagacaaagaaaagcttttctgaacgcaataatgagatggggcatgccaccacaggatgcgtttaatagccattggctggtgcgggacctgcgtggtaaaagcgagaaagagtttcgagcttatgtgagcctattcatgagacatttatgcgagcctggggctgatggagcggagacattcgccgatggggttccgcgtgaaggcttgagtcgtcaacatgtgctgacacggatcggggttatgtcgctggtgagaaagaaagtccaggaattcgagcatgtgaatggaaagtatagcacccccgacctgattccagagggcccagagggcaagaaaagcggggaggttatttcctctgatcctaatacgcccgtccctgcctctcccgctcatctgttgcccgctccccttggcctgcctgacaagatggaggcccagttgggctatatggacgaaaaggatcctggggcacagaaaccacgccagcccttggaagttcaggccctgcccgctgcacttgatcgggtagagtccgaggacaaacacgagtcaccagccagcaaggagcgggctagggaagaacgcccagagcaaacccccccagcgcaggcccagctcagaggagggcgtccattgtcccccggtacggcccctgggtggcaaagggaaggccctgggcttggcgctaggcgtgctaggtcccccagtcagggcggaccagggggtgggggaagctcctttggttcccaagccccactgtag

SEQ ID NO: 218327 - DNA, 2427 bp, synthetic construct
  misc_feature 1..2427: note = Description of Artificial Sequence: Synthetic coding sequence
  source 1..2427: mol_type = other DNA
atgatttatcggtttgtaaccagagcatctgttgaggaacggataactcaggttgccaaacggaaaatgatgctgactcatctggtagtgaggcccggactgggaagcaaaagtggctctatgaccaagcaggagctggatgatatccttaagttcgggacagaggagttgttcaaggacgacgtcgaggggatgatgtctcagggccagcggcctgtgacccccatccctgacgtgcagagctccaaaggtgggaatctggctgcttcagctaaaaaaaaacacggttccacgcccccaggggacaacaaggacgtcgaggactcgtctgttatccattacgatgatgctgccattagcaagttactagaccgtaaccaggacgccacagacgacaccgaactccaaaatatgaatgagtatctctcctcgttcaaagtcgctcagtacgtcgtgcgagaggaggacggtgtcgaggaggtagaacgggaaattattaagcaagaggagaatgtggatccagactattgggaaaagctattacgtcaccactacgaacagcaacaggaggatctcgcaagaaacctcggtaagggaaagcgcatcagaaaacaggttaactataacgatgctagccaagaggatcaggaatggcaggacgagcttagcgataaccaatccgagtattctatcgggtcagaagatgaagacgaggatttcgaggaaaggcccgaggggcagtcgggccgaagacagagtaggagacagttaaaaagcgacagggacaagccgctgcctccgctgctggccagagtcggcggtaacattgaagtactgggttttaatgctagacagaggaaggccttcctgaatgctatcatgagatgggggatgccaccacaggatgcattcaattcacactggttagttcgggaccttcgcggaaaaagtgaaaaggaatttcgggcatacgtcagcctctttatgcggcacctttgtgaaccgggagctgatggcgctgaaacttttgccgatggcgtccctcgcgaaggcctgtcccggcagcacgtgctcactaggatcggagttatgtcacttgttcggaagaaagtgcaagagttcgagcacgtgaacggcaagtattccacaccagatcttattccagagggtcctgagggcaaaaaatcgggcgaggttatcagttctgacccaaatactccagtgcctgcaagcccagcccatctgttacccgcaccgttgggtttaccggacaaaatggaggcacaactgggctacatggacgagaaggaccccggagcccagaagcctagacagccactcgaggtccaggccttacccgctgcactggaccgagtcgagtccgaagataagcatgaaagccccgcttccaaggagcgggcacgcgaagagcgccctgaggagaccgaaaaagctcctccatcaccagagcagctgcccagagaggaagttctgcctgaaaaggagaagatcctggacaagctggagctctcactgatccattcccggggagacagctccgaattgaggccagatgatacaaaagccgaagaaaaggagcccattgagacccagcagaatggcgataaggaagaagacgacgagggaaaaaaggaagacaaaaagggcaaattcaagtttatgttcaacattgccgatggagggttcaccgagctgcacactctttggcagaatgaggaacgagcagcggtctcctctggcaagatttacgatatttggcaccgtagacacgactattggttgctagccggaatcgtgacccatggttacgcccgttggcaggacattcagaatgatcctaggtatatgattctgaatgaacccttcaaatcagaagtccacaagggtaactatcttgagatgaagaacaagttcctggccaggcgctttaaactgctcgaacaggctctagtcattgaggagcagttaagacgggctgcctatttgaacatgactcaagaccccaatcaccccgctatggccttgaatgcccgactcgccgaagtcgaatgcttggcagagtcccatcaacatctctccaaggaatccctggcaggaaacaagccagccaacgcggttctccacaaggtgctgaatcaactggaagagctgctgagcgatatgaaggctgacgtgaccaggttgccatctatgctgagcagaatcccgcctgtggccgcacgcctgcagatgtcagaacgcagcattctgtccaggctcaccaacagggctggagaccctaccatccagcagatatcgtccagaccacgggactttccagtgctccagagatcattcccagcagaaccgaggcttccgggacacctaccagacccccatggtagggagaagttgcccccattttag

SEQ ID NO: 218328 - DNA, 3288 bp, synthetic construct
  misc_feature 1..3288: note = Description of Artificial Sequence: Synthetic coding sequence
  source 1..3288: mol_type = other DNA
atgattcatcgtatcctgaaccactcttttgataaaaagggcgatgtgcactatctgattaagtggaaagatttaccttacgatcaatgtacctgggagattgacgatattgacatcccctactacgacaaccttaagcaggcttattggggccaccgagagctgatgcttggagaggataccaggctgccaaagagactcctgaagaagggaaagaaactgagagacgataaacaggaaaagcctcctgacactcccatcgtagaccccaccgtgaagtttgataaacaaccatggtacattgattccaccggtggcaccctgcatccttatcaactggaaggcctgaactggctgcggttcagttgggcacaaggaacagacacaattctcgctgatgagatgggtctggggaagactgtccagaccatagtttttctctattcattgtacaaagagggccactcaaagggcccttacctcgtgagcgcccctttgtccactattatcaactgggagcgcgagtttgaaatgtgggccccagacttttacgtcgtgacttacactggagataaggaaagccggtcagtcatacgggaaaatgagttttcctttgaggataatgccatccgatcagggaaaaaagtgttccgtatgaaaaaggaggtgcagattaagttccacgtgctcctgactagctatgagcttatcacgattgatcaagccattctcggttcgatcgagtgggcttgtctggtcgtcgacgaagcacatcgtctgaagaacaaccagagtaagttctttcgtgtgctgaatagctataaaatcgactataagctgcttctgactggaaccccgctgcagaataacctcgaagagctgttccacctgctaaatttcctcactcccgagcgcttcaataatttagaaggcttcttggaagagtttgccgacatttctaaggaggaccaaatcaagaaacttcatgacctcctaggcccacatatgttgagacgtttaaaggccgacgtttttaaaaatatgcccgctaaaacagaattaatcgttcgtgtggagctaagtcagatgcaaaaaaagtactataagtttattctgacacggaatttcgaagccctcaactcaaagggtggaggtaatcaggtgtcactacttaatattatgatggatcttaagaagtgttgcaatcatccctacttgtttcccgttgccgctgtcgaggcacccgttctgcccaatggatcctatgatgggtccagcctggtaaagtctagcggtaaactgatgctactgcaaaaaatgctgaaaaagctcagggacgaaggccacagagtgctgatcttctcccagatgacaaagatgctggatctactggaagactttttagagtacgaaggatataagtacgagagaatcgacggcggaatcaccggcggattacgtcaggaagccatcgataggttcaacgccccaggtgctcagcagttttgcttcctgctgtcaactcgggcagggggtctcgggattaacttggccaccgcggacacggtcattatttacgattccgactggaatccacacaatgatatccaggcattctcccgggctcatagaatcggtcagaacaagaaggtgatgatatatcggtttgtgactagagctagcgttgaggagcgcataacccaagttgcaaagcgaaagatgatgctcacccacttggttgtgagacctggacttggttctaagagcgggtcaatgacaaaacaggagctggacgacatccttaagttcggcacagaggagctgttcaaggatgacgttgagggcatgatgtctcaaggccagcgcccagtgacaccaattccggacgtgcaatctagcaagggtggcaacctagccgctagtgccaagaaaaagcatggtagcacacccccaggtgacaacaaggacgtcgaggacagtagtgtaattcactacgatgatgctgcaatctcaaaactgcttgaccgcaaccaggatgccaccgatgacacagagttgcaaaatatgaatgagtatctgtccagctttaaggttgcccagtacgtcgttagagaggaggacggcgtggaagaagtcgaaagagagattatcaagcaagaggagaatgtggacccagactattgggaaaagctattgaggcatcactatgagcagcaacaggaggatttggctaggaatcttggtaagggaaagcgcattcggaaacaggtgaattacaatgacgcctcgcaggaagatcaggagtggcaggacgagctttctgacaatcagagcgaatatagtatcggttcagaggatgaggacgaagatttcgaggagaggccagaggggcagtccggcagacggcagtctaggagacagttgaagtctgaccgagacaaacctctcccaccgctgctcgcccgtgtgggagggaacattgaggttcttggattcaatgcacggcagagaaaagcattcctaaacgcaattatgaggtggggaatgcctccacaggatgcctttaactcacactggcttgtgcgtgatcttcggggtaagagtgagaaagagtttagagcctacgtaagcctgtttatgcgccacttgtgtgagccgggagcagatggagcagagacattcgcagacggagtgccgagggaggggctgtcccgacaacatgtcctgactcgaattggggtgatgtcattggtccggaaaaaggtgcaagagttcgaacacgttaacggcaagtacagtactccagacctcatcccagaaggccctgaaggtaagaaatctggtgaggtaatttcatccgatcctaatactccagttccagcaagtcctgctcacttacttcccgctccgctggggctgcctgataagatggaagcgcaacttgggtatatggatgagaaagacccgggagcacaaaaacctcggcagccgctggaggtccaggccctgcctgcagcgctggacagagtggaaagcgaagacaagcacgagtccccagcttccaaggagcgagccagggaggagcggccagaggaaacggagaaggcgccaccaagtcctgaacagcttcccagagcctcttgtagcgtcacccaagctggcgttcaatggagacatcgattaatgggcgcatttatcagcagcgcacaggctacactgcctccccagctgccggagcagagacgttgctttctgcgtcggcgaaggagttggacctcatggtcgtag

SEQ ID NO: 218329 - DNA, 3258 bp, synthetic construct
  misc_feature 1..3258: note = Description of Artificial Sequence: Synthetic coding sequence
  source 1..3258: mol_type = other DNA
atgatccataggatcttgaatcattccttcgataagaagggtgatgttcattatctgattaaatggaaggacttgccctatgaccagtgtacctgggagatagatgatatagatattccctattatgacaatctgaagcaggcatattggggacacagggaactgatgctgggagaggacacacggctgcccaaacggctccttaaaaagggaaaaaaactgagagacgataagcaggagaagccccctgatacacccatcgttgatcctacagtcaagtttgacaagcagccctggtacatcgactcaacgggaggcacccttcacccttatcagctcgaagggctcaattggctgcgctttagctgggcccaaggaaccgatactatcttagctgacgagatggggcttggtaagactgtacagacgattgtgtttctgtacagtctttacaaggaaggacacagcaaagggccttacttggtatcagccccactctctaccatcatcaactgggaacgcgaatttgagatgtgggctcccgacttttatgtggtgacgtataccggtgacaaggaatcacgctctgtcattagggagaacgagtttagcttcgaagacaacgccatcagaagtggtaagaaagtgtttcgcatgaaaaaggaggtccagattaaattccacgttttgctgacgtcttacgagttgataactatcgaccaagctattttaggatcaattgaatgggcttgcttagtcgtcgacgaagcccacaggctcaaaaataatcaatcaaaattttttcgagtgctgaattcttacaagatcgactataagttgctcctgaccgggacccctctgcagaataatctggaagagctttttcatttactcaatttcttaactccagagcgcttcaacaacctcgagggtttccttgaggaatttgcagacatttcaaaagaggaccagattaaaaaacttcacgatctgctcggccctcacatgctgcgcagactaaaagcagacgtgtttaagaacatgcctgccaagaccgaacttatcgtgcgggttgagctgagccagatgcaaaaaaagtactataaattcatcctgacgcgtaacttcgaggcgctgaattctaaaggaggcggaaaccaagtgtccctgctgaacatcatgatggaccttaagaaatgttgcaaccacccctatttgtttccagtggccgctgtcgaagcaccagtgttgcccaatgggtcttatgatgggagtagccttgttaagtcaagtggcaaattaatgttactacagaaaatgttgaaaaaattgagagatgaaggtcatagagtactgatattcagtcagatgactaagatgctggatttgctggaagacttcttggaatacgaaggttataagtacgagagaattgatggaggcattactggaggacttagacaggaggccatcgacaggtttaacgctccaggcgctcagcagttctgctttcttctaagcacgcgcgcaggcggattaggtatcaacctggctactgccgacacagtgatcatctatgactccgattggaatcctcacaacgacatacaggccttttctagagcccatagaatcggacagaacaaaaaggtgatgatatataggttcgtgacccgagctagcgtggaggagcggatcactcaagtggcgaaaaggaaaatgatgcttacccatctagtggtcaggccaggcctgggcagcaagtcaggttctatgacaaagcaagaactggacgacattctgaaattcgggactgaggagctcttcaaggacgatgtggaggggatgatgtctcaggggcaacgacccgtgactcccatcccagatgtccaatcatctaaagggggaaacctggccgctagcgcgaagaagaagcatggatcgactccaccgggagataataaagacgtcgaggattcaagtgtgattcattacgacgacgccgctatctcaaagcttctcgacagaaaccaggatgcgaccgacgataccgagctgcaaaatatgaatgaatacttatcatccttcaaagtggcccagtacgttgtccgggaagaggacggggttgaggaagtggagcgagaaataattaagcaggaggaaaatgttgacccagattattgggagaaactccttcgccaccactacgaacagcaacaggaggacctggccaggaatttgggcaaaggcaagcgtattcgtaaacaagtcaactacaatgacgcctcccaagaggaccaggagtggcaggacgaactgagcgacaatcaaagcgaatactccatcggcagtgaagacgaagatgaagacttcgaagagcgcccagaagggcaatcaggtcgaaggcagagccgaaggcaactaaagtcagatagagacaaacctctcccaccactactggctcgcgtcgggggtaatatcgaagttttaggattcaacgccagacagcggaaggccttcctaaacgcgataatgcgctggggaatgccaccacaggacgcattcaatagtcactggctcgttcgtgatctgcgcggtaagtcagaaaaggaattccgcgcatacgtgtccttgtttatgagacacctttgtgagccgggagctgacggagccgaaactttcgcggatggcgtgcctagagaaggcttaagtagacagcatgtgctcacacggatcggcgtgatgagcctggtcaggaagaaggtgcaagagttcgagcatgttaacgggaaatatagcactccagacctgatccctgaagggccagaaggaaagaaaagtggtgaggtgataagctctgatcccaataccccagtccccgcttcacccgctcatctgctgcccgctcccctcggcctgcccgataaaatggaagcgcagctcggctacatggatgagaaagacccgggagctcaaaagcctagacagcctctcgaggtccaggcactgccggctgcactagaccgggttgaaagcgaagataagcacgagtccccggcaagcaaagaaagggcacgtgaggagcggccagaggaaaccgagaaagcccctccctcccccgaacaactgcccagagctagctgttcggtcacacaggccggagtgcagtggaggcatctcggtagctgggaacctttgagccctcggttaaaaagaccatcccacctcagtttcctgaaccgcggaggagcatcatag

SEQ ID NO: 218330 - DNA, 8994 bp, synthetic construct
  misc_feature 1..8994: note = Description of Artificial Sequence: Synthetic coding sequence
  source 1..8994: mol_type = other DNA
atggcagatcctgggatgatgagtctctttggcgaggatggcaacatttttagcgaaggactggaaggattgggcgagtgcggctaccccgaaaacccagtcaacccaatgggtcaacagatgcctatcgaccagggcttcgctagtctgcaaccatctttacatcacccttcaaccaaccagaaccagacaaaactgacccacttcgaccactacaatcaatatgagcagcagaagatgcacttaatggatcaaccgaaccgcatgatgtctaacacgcctggaaatggcctggcgtcacctcactcacaataccacaccccccctgtcccccaggttcctcatggcggatctggagggggtcagatgggagtctatcctggtatgcagaacgaacggcacgggcagtcctttgtagatagtagctccatgtggggcccacgtgccgtgcaagtgccggaccagattagggccccataccagcagcagcagccgcagccccagccgcctcaacccgctccatccggaccacccgctcaggggcacccacagcatatgcagcagatggggtcctatatggccaggggtgactttagtatgcagcagcatggccaaccacaacagcggatgagccagttctcccaaggacaggagggcctaaatcaaggcaacccctttattgcaactagtggccctggacatctcagtcacgttccacagcagagtcccagcatggcgccttctcttagacattcagtgcagcagtttcaccatcacccctctaccgcattacatggcgagtccgtcgcacattctccccgtttctctccgaacccccctcagcagggagcagtgagaccccagaccctgaacttttctagtaggtctcagactgttccttcaccgactatcaacaatagcggtcagtacagccggtatccttattccaacttgaaccaaggcctagtcaacaatactggcatgaatcagaacctggggctgactaataacacccctatgaaccagtccgtgccacggtatccgaatgccgtcggttttcctagtaacagtggacaggggctaatgcaccagcaacctatccacccttccggctctctgaaccaaatgaacacacaaacaatgcaccccagccagccacagggtacctacgcgagtccaccccctatgtcacccatgaaggcaatgagcaaccccgctgggactcccccacctcaggtaaggcccggttctgccggaattcccatggaggtcggctcatatccaaacatgccccatccacagccaagccaccagcctccgggagctatggggataggccagaggaatatgggcccaaggaacatgcagcagagtcggccattcatcggcatgagttcagctccccgagaactcactggacatatgcgtcctaatggatgccccggagtggggttgggcgacccccaagccatccaggagaggctcattccagggcaacagcacccagggcagcagccatcattccaacagcttcccacctgccccccactgcaaccccaccctggcctccatcaccagagctctccccctcacccgcaccaccagccatgggcccagctgcatccctccccccagaacaccccccagaaggtgccagtccatcaacacagtccatctgaacctttccttgagaagccagttcccgacatgacccaagtgtcaggccctaatgctcagttagtcaagtccgacgactatctgccttcaattgagcagcagccccagcagaaaaagaagaaaaagaaaaataatcacattgtggccgaggatcccagcaagggtttcgggaaggacgactttcccggtggggtcgataaccaggagcttaaccgaaattcactagacggctctcaagaggagaaaaaaaaaaagaagcgcagtaaagccaagaaggaccccaaggagcctaaagagcccaaggagaagaaagagccaaaagaacccaaaaccccaaaagcgcctaagattccgaaggagccaaaggaaaagaaagctaagactgcaactcccaaaccaaaatcaagcaaaaagtcctcgaataagaagcccgattccgaggcaagcgcgctgaagaaaaaagtcaacaagggaaagactgagggctctgagaactcggacctggacaaaaccccaccacccagtccaccccctgaggaagatgaagatcctggcgtgcagaaaaggcgatcgtctaggcaggttaaacgaaagcgctacaccgaggatcttgaattcaaaatttccgatgaagaagcagatgatgcggacgccgctggcagggattctccctctaataccagccagtcggagcagcaggaatccgttgacgctgaaggtcccgtggtcgagaaaatcatgtccagtaggagtgtgaagaaacagaaagagtctggcgaagaggtggaaatcgaggaattctatgtgaagtacaaaaacttttcctatttacactgtcagtgggcgtcgatcgaagacttagagaaggacaaacgtatccagcagaagatcaagcggttcaaagcaaaacaaggacagaacaagtttttgagtgaaattgaggacgagctgtttaatcccgactatgtcgaggtggataggattatggattttgccagaagcaccgacgatcgcggtgaacccgtgactcactatttggtaaagtggtgtagtctgccttatgaagatagcacatgggagaggcggcaggatatcgaccaggccaaaatcgaggagttcgagaaattgatgagccgtgagccagagacagaacgggtggaaaggccgcctgccgacgactggaagaaaagtgagtcctccagggaatacaagaataacaataaactgcgcgagtatcagctcgagggagtcaactggctgttattcaactggtataatatgcggaactgtattttagcagatgagatgggcctaggaaagaccatccaaagcataacttttctgtatgagatctatcttaaaggcattcacggccctttcttggtgatcgccccactgagcaccatccccaattgggagcgggaattccggacatggacagagctgaatgtcgtggtctaccacgggagtcaggccagccgtagaaccatccagctgtacgagatgtactttaaagacccccagggacgcgtgatcaagggatcttacaaatttcacgccataatcaccacatttgagatgatcctcactgactgccccgaactgcgcaatataccctggagatgtgttgtcatcgatgaggcccaccggctgaagaaccgcaattgcaagcttcttgagggacttaaaatgatggacctggaacataaggtgcttctgacaggaactcccctgcagaataccgtcgaggagctgttttctctcctgcacttcctggagccatccagattcccctctgaaacaacctttatgcaggagtttggagatctgaagacagaagagcaggtccaaaagctgcaggcaatcctcaagcccatgatgctaagacgcctcaaggaggatgtcgagaagaatctcgccccaaaggaggaaactatcattgaggtcgaactgacgaatattcagaaaaagtactaccgagctatcctcgagaaaaatttcacattcctttcaaagggcggaggtcaggctaatgtacctaatttactaaatactatgatggagcttcgcaagtgctgcaatcacccctacctcattaatggtgcggaagagaagattctggaagagtttaaagagacccataatgctgaatcaccagactttcagctgcaggcaatgattcaggcagcaggtaagctggtgctgatcgataaactcctgccaaagttaaaagcaggtgggcacagggtactgattttttcccagatggtgcggtgtcttgacattttagaagactatcttatccagcggcgttacccctacgaacgcattgatgggagagtgcgcggaaatctgcgacaggccgctattgatcgtttcagcaagcccgacagcgaccgtttcgtctttctactctgcactagagccggaggtcttggtattaatttgactgccgctgacacatgtatcattttcgacagcgattggaacccacaaaacgacctgcaagcacaggctagatgccataggattgggcaatctaagtcagtgaaaatttatcgactgattacccgcaattcttatgaacgagagatgttcgataaggcaagccttaaactgggacttgacaaggctgtgctgcaatccatgtcgggcagggaaaacgctacaaacggcgtacagcagctatcgaagaaagaaatcgaggacctactgagaaagggcgcttatggggctctgatggacgaggaggacgaaggtagcaagttctgtgaagaggacattgatcagatattattgagaaggacccatactatcactatagagtcggaaggcaaagggagtacattcgcaaaggccagctttgtcgcctctggcaaccggaccgacatctccttagacgacccaaacttctggcagaagtgggccaaaaaggccgagctggatatagacgctcttaacggcagaaacaacttggttatcgatacccccagagtgaggaaacagacccgactgtactcagcagttaaagaagatgaactcatggagttttcagacctggagagtgatagtgaggagaagccatgcgccaagccgcgacgaccacaggataaaagccagggatacgcgagaagcgagtgctttcgcgtcgagaagaatttattggtgtacggctggggacggtggaccgacatcctttctcacggacgctataagcggcagctcacagagcaggatgttgaaactatttgccgaactattcttgtctactgccttaaccattataaaggcgacgaaaacattaagagctttatttgggatctgatcacccctacagcagatggacagacccgagccctggtgaatcactcaggtttaagcgcccctgtaccccgtggtagaaagggcaaaaaggtgaaagcccagagtacccaaccggtcgtgcaagatgccgactggctggcatcttgtaaccccgatgccctgtttcaagaagattcctacaagaagcatctgaagcaccactgcaataaagtactgctcagagtcagaatgctctattaccttcgtcaagaagtaataggcgatcaagccgacaagatactggaaggtgcggatagcagtgaggccgacgtgtggatcccagagccgttccatgcggaggtaccagctgactggtgggacaaggaagctgacaagagtttgctgattggggtgttcaagcatggatatgagaaatataactctatgcgggctgatcccgctctgtgctttctcgaacgagttggtatgccagacgctaaagcaatcgcagcagagcaacgagggaccgacatgctggccgacggaggcgacgggggagaattcgacagggaagacgaggaccctgaatacaagcctacaagaacgcccttcaaagatgaaatcgatgaatttgcgaactctccaagcgaggacaaggaagaatctatggagatccacgccactggaaaacattcagaatccaacgcggagctcggccagctctactggcccaacacttccacactcaccactcgcctgcggaggctaatcaccgcctatcagcggagctataagcgccaacagatgcgtcaggaagcactgatgaaaactgatcgaaggagaagacgaccacgagaagaggtcagggccctcgaagccgagcgcgaggctatcatctcagaaaagaggcagaagtggacacggcgtgaggaggccgacttttaccgcgttgtgagcactttcggggtcatttttgacccggtgaagcagcagtttgattggaaccagttccgcgcttttgcaaggttagataaaaagtccgacgaatcccttgagaaatacttttcttgttttgtggctatgtgtcgtcgtgtgtgcagaatgccggtcaaacccgacgacgaacctccagacctgtctagcatcattgaacccatcacagaggagagagccagcaggaccctttacaggatcgagcttctacggaaaattcgggagcaggtactgcaccatccacagctgggtgagaggctcaagctgtgtcagccaagccttgacctccctgagtggtgggagtgtgggagacatgatcgcgatctactggtgggcgcagccaaacatggcgtctccagaactgattaccacatcttaaacgaccccgagctgagctttctcgacgctcacaagaatttcgcccagaatcggggagcaggaaatacttcttcactcaatcctctagcagtggggttcgtccagaccccacccgtgatctccagcgcgcatattcaggacgagagggtcctggagcaagctgaagggaaagtggaggagcctgagaatcccgctgccaaggagaagtgtgaaggtaaggaggaggaggaagagacagatgggagtggcaaggagtccaagcaagagtgcgaggccgaagccagtagtgtaaaaaacgagctcaaaggggtagaggtaggagcagatactggctcaaaaagcatcagcgagaaaggatccgaggaagacgaggaggaaaaactggaagacgatgataagagtgaggaaagttctcaaccggaagccggagcagtgagcagaggcaaaaacttcgacgaggaatccaatgcctcaatgagcactgcccgtgacgagactcgggacgggttctatatggaggatggagatcctagtgttgcccagctgctgcacgagagaacctttgctttctcgttctggcccaaagatcgcgtcatgattaacagattagataacatctgcgaggcagtgctgaaaggcaaatggcctgttaatagaaggcagatgtttgactttcaaggcctgatccctgggtatacacctacaaccgtagactctcctctccagaaacgaagcttcgcagaactctcgatggttgggcaagcctccatatcgggttctgaagacattaccacgtccccccagttgtctaaagaagacgccttaaacctgagtgtcccaaggcagcgccgtcgacgccgacggaagatcgagatcgaggccgaacgggcagcaaagcgtagaaatctcatggaaatggttgcccagctcagagagtcacaagtggtgagcgagaatggccaggagaaggtggtcgatctgagcaaagcttcgagagaggcgacaagttccacctctaacttctcctctctgagtagcaagtttattctccctaatgtatccacacccgtgtcagacgcctttaagactcaaatggagctgctccaagcaggacttagcagaaccccgaccaggcacctcctgaatggctccttagttgacggagagcctccaatgaagaggaggagggggagaaggaagaacgtggagggattggacctgctgttcatgagccataagcgcactagcctctctgcagaagatgccgaggtgacaaaggcctttgaagaggatatcgagacccctccaactcggaacattccatctcccggacagctggaccctgacacccgaattccagtgataaatctggaggatggcacacgtctggttggcgaggacgcccctaaaaataaagacctggttgaatggctgaaattgcacccaacatataccgtcgatatgcctagttacgtgcccaaaaacgccgacgtgctttttagctctttccaaaagccaaagcaaaagcgacatcggtgtcggaatcctaacaaacttgatattaacaccctgacaggtgaagagcgcgtgcccgtcgtaaataagagaaatgggaagaagatgggcggagcaatggcccctcccatgaaggatctcccacggtggctggaagaaaaccccgagttcgcagtggcgcctgactggaccgatatcgtcaaacaaagcgggtttgtaccggagtccatgttcgacaggttgcttaccggccctgtcgtgagaggagaaggggcttcgcgccgtggacgcagacccaaatcagaaatagccagagctgccgctgctgctgccgcagtggcttcaacaagcgggattaaccccctgctggtgaactccctattcgcgggaatggatctcacttcattacagaacttacaaaatctgcagtctcttcaattggcaggtctcatgggtttccctcctggtctcgcaactgccgctactgccggtggcgatgcaaagaaccctgcagccgtgctgcccttgatgctgcccggtatggcaggactgccgaacgtgttcggcctgggcggattgcttaataacccactttctgctgccaccggcaacacaaccaccgcaagcagccagggggaaccggaagacagcacaagcaagggggaggaaaaaggcaacgagaacgaagatgagaacaaagattctgaaaagtcgaccgacgcagtgtcagccgctgatagcgcgaacggctcagtgggcgcagccacggcacccgcaggactcccttcaaacccgctggcgtttaatccattcctgctgagcaccatggcgcctggactgttctaccccagtatgttcctcccgccagggctcggcggtctgactctccccggattccccgcacttgccggactgcagaatgctgtgggatcatcagaggaaaaggcggcagacaaagccgaaggaggcccattcaaggatggagaaactctcgaggggtctgacgcagaagaatccttggataagactgcagaaagcagcctcctggaggacgagatcgcccagggcgaagaactggatagcttggacggcggagatgaaatcgagaataatgaaaatgacgagtac

SEQ ID NO: 218331 - DNA, 8993 bp, synthetic construct
  misc_feature 1..8993: note = Description of Artificial Sequence: Synthetic coding sequence
  source 1..8993: mol_type = other DNA
atggccgaccctggcatgatgtccctttttggtgaggacgggaatattttctcggagggtctggagggtttgggagaatgcggatatcctgaaaatccggttaatccaatgggacagcagatgccaatcgaccaaggtttcgcaagcctccagccttccctgcatcatcccagcactaaccagaatcagaccaagctcacccactttgaccactacaaccagtacgagcaacaaaaaatgcacctgatggatcagccaaaccgaatgatgtctaacactccaggaaacggtctggcctcaccccacagccaataccacactccaccagtgccgcaggtacctcacgggggtagcggcggaggacaaatgggtgtttatcctgggatgcaaaacgaacgccatggacagtcgtttgtggattcttcttcaatgtgggggccacgcgcagtacaggtccccgatcagatcagggcgccataccaacagcagcaacctcagccccagcctcctcaacccgcaccatctgggccacccgcacagggtcatccacagcacatgcagcagatgggctcatatatggcgagaggtgacttctcaatgcagcagcacggtcaaccacagcagcggatgtcccagttctctcagggacaggaagggctgaatcagggtaatccttttatcgccacctctggaccgggtcacctgagccacgttccccagcaaagtccaagtatggctccatctttgaggcattcagtgcagcagtttcaccaccaccctagtactgccctacatggcgaatctgtggcacacagccctcggttcagccctaaccctccccagcagggagctgtgagacctcagactctcaatttcagctcacgttcacaaactgtccctagccccacgataaataacagtgggcagtattcgaggtatccgtattccaatctgaaccagggtttagtgaacaacactggaatgaaccagaacctgggactgacgaataatacacctatgaaccaatccgttccgcgttatccaaatgccgtggggtttccctccaactctggtcagggccttatgcaccagcagcccatccacccgtctggctcactgaaccagatgaatactcagaccatgcatccaagccagccccagggaacatacgcttccccccctccaatgagtcccatgaaggctatgtctaaccccgctgggacacccccacctcaggtccgacctggcagcgctggcatccccatggaggtgggttcttacccgaacatgccacatcctcagcccagtcatcagccaccaggcgctatgggcatcggacagcgaaatatgggaccaaggaatatgcagcagtcacgcccattcatcggtatgtcctctgcgcctcgggaattgacgggccacatgagacctaacggctgcccaggcgtgggcctcggtgatcctcaggcgatccaagaacgattaatccctggacaacagcatcccggtcagcagccctcattccaacagttgcccacgtgtccaccattacagcctcacccaggtctgcaccaccagtcctccccaccacacccacaccaccagccttgggcccagctccaccccagtccgcagaacactccccagaaggtgcccgtgcaccagcactcccctagcgagccgtttctggagaaaccagtccccgatatgacgcaggtctcaggacccaacgcccaactggtgaaaagcgatgactatctgccctcaattgaacaacagcctcagcagaaaaaaaaaaagaagaaaaacaaccatattgtagctgaggatccatcaaaaggtttcggcaaggatgactttccaggcggagtggacaaccaagaacttaaccggaacagtctggatggctcacaagaggaaaagaaaaaaaaaaagaggtctaaagcgaaaaaggatcccaaagaaccaaaagaacctaaggagaagaaggaaccaaaggagcccaagacgcccaaagcaccaaagataccaaaggaacctaaggagaaaaaagctaagaccgcaacacccaaacccaaatcctcaaaaaagtcctctaacaagaagcccgactccgaggcttctgctctgaagaagaaggttaacaaggggaaaaccgaaggatccgagaactccgacctggataagaccccccctccgagcccaccacccgaggaggatgaagacccaggtgtgcagaaacgtagaagttccagacaggttaagcgcaagagatatactgaagatctggaattcaagattagcgacgaagaggccgacgatgctgacgcagccggacgggacagcccttctaacacctcacagagcgaacagcaagaatccgtcgacgccgaagggcctgtcgttgaaaaaattatgtcttctaggtccgttaaaaagcagaaggagtccggtgaggaggtggagatagaagagttttatgtgaaatataaaaattttagttacctgcactgccagtgggcttcgatcgaggacttagagaaagataagaggatccagcagaagataaaaaggttcaaggccaagcagggccaaaacaagttcctgagcgagattgaggacgagctatttaaccccgattatgtcgaggtcgatcggatcatggacttcgctaggtcaaccgatgataggggagagcctgtaactcattaccttgtgaagtggtgctcgcttccgtacgaggattctacatgggaaagacgacaagacatcgaccaggctaaaatcgaagaattcgagaaactgatgtctcgagagccggagaccgagagagtagaaagaccgcctgctgatgactggaagaagagcgagtccagcagagagtacaaaaacaacaataagctacgtgagtatcagcttgaaggagttaactggctcttgttcaattggtataacatgcggaactgcatcctcgctgatgagatggggcttggcaaaactatccagagcatcacctttctatacgagatctacctgaaaggcattcatggcccattcctcgtcatcgcccctctgtcgacaataccaaattgggagagagaattccggacctggacggagctgaacgtagtggtctaccatgggtcccaggcgagccgcaggaccatccagctatatgagatgtatttcaaggacccacaaggaagggttatcaagggttcctataagtttcatgccataatcactacatttgagatgatcctgacggactgtcccgaattgaggaatattccatggagatgcgttgtaatagacgaggcgcataggttgaagaatcgaaattgcaagttgctggagggcctcaaaatgatggacctcgaacataaagtcctgctcaccggaactccattgcaaaatacggtggaggaactgtttagccttctccacttcctagagcccagtaggtttccttcagaaacaacctttatgcaggagtttggcgacctgaaaactgaggagcaggtgcagaagctccaggccattctgaagcctatgatgctccggaggctgaaggaggacgtggaaaaaaaccttgctccaaaagaagagacaattattgaagttgagctgaccaacattcagaaaaaatattaccgggctattctcgaaaagaactttacttttctgagcaagggtggcggacaagctaacgtgcctaatctcttaaacacaatgatggaactcaggaagtgttgcaaccacccatatctgattaacggtgccgaagaaaaaatcctggaggagttcaaagaaacacacaacgccgaatcacctgatttccagctgcaggccatgatccaggccgcaggcaaattggtgcttattgataagctcctgccaaaactgaaagcgggagggcacagagtacttatttttagtcagatggtcaggtgtctggacatactagaagattacctcatccaaagaaggtatccttatgagcgaatcgacggtagagtcaggggtaacctcaggcaggccgctattgatcgattctctaaacccgattccgacagatttgtctttcttttgtgcacgagagcaggtggcctgggaatcaacctgacagctgcagacacgtgcatcatctttgacagtgactggaacccccagaacgatctgcaggcccaggcacgatgccatagaatcggccagagcaagtcggttaaaatctaccggctcatcactcgaaactcttacgagagagaaatgttcgataaagcatctctcaagctggggttagataaagcagttttacagtctatgagcggccgtgaaaatgccaccaacggggtgcagcagcttagtaaaaaggagattgaggatttgttgcgcaagggcgcatatggggctctcatggacgaggaagatgagggatccaaattttgtgaagaggacatagaccaaattctgctgaggcggacccatacgatcacaatcgaatctgaaggcaagggctccactttcgcaaaggcctctttcgtggcgtccggcaaccggacagacataagcttggatgatcccaatttttggcagaagtgggctaagaaggcagagctggacattgatgccctgaatggaagaaacaacctcgtaatagatacccccagagtgagaaagcagacgaggttgtactctgcagtgaaggaagacgaactcatggagttcagcgatcttgaaagtgacagcgaggagaaaccatgtgctaaacccagaaggccccaagataaatcccaaggctacgcgaggagcgagtgcttccgagttgagaagaatttgctcgtgtatgggtggggcagatggacggatatactgagtcacggcagatacaaacgtcagctgaccgagcaggacgttgaaacaatctgccgtaccattctggtctattgtctcaatcactacaaaggggacgagaacataaagtcctttatttgggaccttataacaccgacagcagacggtcagacgagagctctggtaaaccacagcggcttatctgctcctgtaccgagaggcaggaaaggtaagaaggtgaaagcccagtcaacacaacctgttgtgcaggatgccgactggttggcctcctgtaaccctgatgcgttgttccaggaagactcctacaaaaagcacctcaaacatcactgcaacaaagtcctgctgagggtccggatgctgtactacttaagacaggaagtgataggggaccaggctgataagatcctggaaggggctgactctagtgaagctgatgtctggatccccgaacccttccacgcggaggtccctgcagactggtgggacaaagaggccgataagagcttgttaattggagtgtttaaacatggctacgagaagtacaactccatgagggccgatccagccctgtgctttctcgagagggtcgggatgcctgacgccaaggcgattgctgcggagcaacgagggactgacatgctggccgacggcggagacggcggagagttcgatcgcgaagacgaggaccccgagtataagccaactagaactccgttcaaggacgagatagacgaatttgcaaactcaccatctgaagataaggaggagtccatggagattcacgccacaggaaaacattccgaatccaacgctgaactgggacagttgtattggcccaatacatcaactcttaccacacgcctgcgtcggcttatcacggcgtaccagaggagctataaaaggcagcagatgcgccaggaagctctgatgaagactgacaggaggagacgtcgaccgcgagaagaagtgcgagcgcttgaagcggagagggaagcgatcatttccgagaagagacaaaagtggactagaagagaggaggctgacttctatagggtggtgagcaccttcggtgttatttttgatccagttaagcaacagttcgactggaatcagttcagagcttttgctcgactggacaagaagtcagacgagtcacttgagaaatatttcagctgtttcgtggccatgtgccgccgtgtatgccgaatgcctgtgaaaccagatgacgagccacccgatctctcttctattatcgagccgataacggaagaaagggcatcccgcaccctctacagaatcgagctattacggaagatccgcgaacaggtgctacatcatccacagttaggagagagacttaagctctgccagccatctctcgacctccctgaatggtgggagtgcggtaggcacgatcgagacctgttggtcggagctgccaagcacggcgttagtaggaccgattaccatattctgaacgaccctgaattatctttcctggatgctcacaagaactttgcccagaaccgcggagccggtaatacttccagtctgaaccccctcgctgtgggtttcgtacagactccgcctgtgattagctctgctcatatccaggatgagcgtgtattagagcaagcagaggggaaagtcgaggagccagaaaaccccgctgcgaaagaaaagtgcgaaggaaaagaagaggaggaggaaacagacgggtcagggaaggagtcaaagcaggagtgtgaggctgaggcctctagtgtgaagaatgagctcaaaggggtcgaggtgggagccgacaccgggtctaaatcgatttcagagaagggcagcgaggaagacgaggaagagaagctggaggacgatgataaatcagaggaaagttcccagcccgaggccggagccgtgagccgcggtaagaacttcgacgaggaaagtaatgcctcaatgagtacagccagggatgaaactagagacggattctatatggaagacggggatcccagcgttgctcagcttttgcacgagcgtacctttgctttctcgttttggcccaaggaccgcgtgatgatcaatcgattggacaacatatgcgaggcagttttaaagggcaaatggccggttaatcggcgtcagatgttcgattttcaggggctcattcccggatacacacctaccaccgtggatagccccctgcagaagcgctccttcgccgagctcagcatggtgggtcaggcttcaatttctggatcagaagatatcaccacttctccccaactgagcaaggaggatgcattaaacctcagtgttcccaggcagcggcgtcgcagaaggcggaagatcgaaatcgaagccgagcgagcagcaaaacggcgaaaccttatggagatggttgctcagctccgagaaagccaagttgtgagcgagaatgggcaagagaaggttgtggacctttcaaaagcatccagagaggcaaccagttccacctccaacttcagttccctctcttcgaagtttatcctgccgaacgtcagtactccagtgtccgacgcgtttaaaacccaaatggagttactacaggccggactcagcaggacaccaaccagacacttattaaacgggtcacttgtggatggcgaaccaccaatgaagcgtcgacgcggacggcgtaagaatgtcgagggcttggatcttctcttcatgagccacaaaagaacgtctttaagcgcagaagacgctgaggtgacaaaggcgttcgaggaggacatcgagaccccacccacaaggaacatcccatcaccagggcagctcgatccggatacccgaattccagtgataaacctcgaagatggcacgcggttagtcggcgaagatgcccctaagaacaaggacctggtcgagtggctgaagctccacccaacttatacagttgatatgccctcttatgttcctaaaaacgcagacgtgcttttcagctccttccaaaaacccaaacaaaagaggcataggtgccgaaaccctaacaaactcgacatcaatactcttaccggagaagagagagttcctgtcgttaacaaaagaaatggcaaaaaaatggggggagccatggccccacctatgaaggaccttccgaggtggctggaagagaacccagagttcgctgtggcccctgattggacagacatcgtgaagcagagcggttttgtacctgaaagcatgtttgatcgattgctgaccgggcctgtcgtacggggagaaggcgcttccagaaggggccgaagacctaagtcggagattgctagagcagccgctgcagcagcagcggtggcaagcacctctgggataaacccactcctcgtgaactcactgttcgctggcatggacctcacaagtctccagaatctgcagaatctgcagtcccttcagctggccggtctgatggggtttcctcctggcctggccacagctgctacagccggtggcgatgctaagaatcccgctgccgtgctgccactgatgcttcccggtatggccggtttacccaacgtatttgggctgggtggtctgctgaataatcctctctctgcagctactggaaacacaacaactgccagcagccagggtgagcctgaagactctacaagtaaaggtgaggaaaaggggaatgagaacgaggacgagaacaaggatagcgagaaatccacagatgcggtgtcggctgcggattctgccaatggcagtgttggcgcagcaacagccccagccggactgccttctaatcccttagctttcaatccttttttgctgagtacgatggcccctggtctgttttacccatccatgttcttacctccagggctgggagggttaactttgccagggttccccgcacttgcgggattgcagaatgccgtcggttctagcgaggagaaggctgccgataaggctgaagggggacccttcaaagacggcgagacactggagggctccgacgcagaggagagcctggacaagacagccgagagcagtctgctggaggatgagattgctcagggtgaggaactggatagtctggacgggggagacgagattgagaacaatgagaacgacgaata

SEQ ID NO: 218332 - DNA, 102 bp, synthetic construct
  misc_feature 1..102: note = Description of Artificial Sequence: Synthetic coding sequence
  source 1..102: mol_type = other DNA
atggctgatcccggtatgatgagtctgttcggtgaggatggaaatattttctcggagggccttgaggggttgggggaatgcggctaccctgaaaatccctag

SEQ ID NO: 218333 - DNA, 6906 bp, synthetic construct
  misc_feature 1..6906: note = Description of Artificial Sequence: Synthetic coding sequence
  source 1..6906: mol_type = other DNA
aaaggggagtccaagagaattacgttagtactacagcagccacagagtggcggtccgcaggggcacaggcatgttgtgctgggctcattacccggaaaaatagtgctccagggaaaccaattggccgcactcacccaggctaagaacgcacagggccagcctgcaaaggtcgtgaccatccaattgcaagtgcagcagcctcagcagaagatacagattgtgccacagccacccagttcccagccccagccgcaacagccaccatctacacagccagttactctgtcaagcgtgcagcaagctcagattatgggaccgggacagtcacctgggcagagattgagtgtgcccgtgaaagtggtcttgcagcctcaggcaggctcatctcagggtgctagctcaggtctgagcgtcgtcaaagtcctgtctgcttccgaagtcgccgctctgagttctcctgctagctctgccccacactccggtggaaaaaccggaatggaagaaaatcggcgattagagcatcagaagaagcaggaaaaagctaaccggatcgtagctgaggcgatagctagagctagggccaggggtgagcagaacattcctcgcgtccttaacgaggatgaactgccatcagttcgtccagaagaagagggagagaagaagagaagaaagaagagcgcaggtgagagactgaaggaggaaaaaccgaaaaagtccaagacgtccggagccagcaaaaccaagggaaagtcgaagcttaatactataaccccagtagtgggaaagaagaggaaaaggaatacatcttcagataacagtgatgtagaagtgatgcccgctcaatccccaagagaggacgaggagtcatccattcagaaacgacgttcgaatagacaggtgaaaagaaagaaatatactgaagacttggacatcaagatcacagatgacgaggaggaggaagaagtggacgtgacgggacccatcaagccagaacccattttgcccgagcctgtgcaagagcctgacggggagacactcccctccatgcagttttttgtagagaacccttccgaggaggacgcagctatcgttgacaaagtgttgagcatgcgaattgtgaagaaagagcttccatcaggccagtacacagaggctgaggagtttttcgtcaagtataagaattacagctacctgcactgcgaatgggcgaccatcagtcagctggaaaaggataaacgaatccaccagaagctgaagcgctttaaaacaaagatggcccagatgaggcatttcttccatgaagacgaggaaccgttcaacccagactatgtggaggtggatcggattctagacgaatctcacagcatcgacaaggataacggggaaccggtgatctactaccttgtaaagtggtgctccctgccctatgaggacagcacatgggaacttaaggaggacgtggatgaggggaagatcagagagtttaagcgcattcagagccgacaccctgaactgaaaagagtcaatcgtccccaggctagcgcttggaaaaaactggaactttcccacgagtataaaaaccgcaatcaactacgcgagtatcagctcgagggcgtcaattggttgttgttcaactggtataatcgccagaattgtatcctcgcagacgagatgggccttggtaaaacaatccagagcatcgctttccttcaggaggtttacaacgtcggaatacacggcccatttctggtgatcgctcccctctcaacaataacaaattgggagcgggagtttaacacttggacagagatgaacacaatcgtgtaccatggatccctggcgtcgagacagatgatccagcagtatgagatgtactgcaaggattctagggggcgactcatccccggtgcttataagtttgatgccctgattactacctttgaaatgatcctatctgactgtccggaactccgtgagatagaatggcgctgcgtgattatagatgaagctcacagacttaagaaccgtaactgcaagcttcttgattcattaaagcacatggacctggagcacaaagtgctcctcacaggcaccccattgcagaatacagttgaggagttgtttagtctgctgcactttctcgaaccctcccagttcccgtcagagagtgagttcctcaaggactttggtgacttaaagacagaggaacaggtgcagaaattgcaggcaatcctaaagccaatgatgctcagaaggcttaaggaagacgtggagaagaacctggccccaaagcaggagactattatcgaggttgaactaacaaatatacagaagaagtactacagagcaattctagaaaaaaacttctcgtttcttagcaagggtgccggacacaccaacatgccgaacttactcaataccatgatggagctgcgtaagtgctgcaaccacccatatctcatcaacggggctgaggaaaagattttgacagaatttcgggaggcttgtcatatcatcccccacgacttccatcttcaggcaatggtgagatcagccggaaaactggtgttgatcgataaattattaccaaaactgaaggccggaggacataaagtgctgatcttcagccagatggtccggtgcctggacatacttgaggattatctcattcagagaaggtacttatacgagcggatcgacggacgagtacgtggcaatttacgtcaggccgcaatcgaccggttttcaaagccggacagtgatcggttcgtttttcttttgtgcacaagggccggtggattggggataaaccttacggcagcagatacctgtatcatatttgacagtgattggaacccacagaatgatttgcaggctcaggcccgatgccatcgcataggccagagtaaagctgtgaaagtgtatagactgatcacaaggaattcctatgaacgagagatgttcgacaaggcaagcctaaaactggggctcgataaggccgttcttcagtcaatgagtggccgagatgggaatattactgggatacaacagttctccaaaaaggagatcgaggacctgctgcggaagggcgcttacgctgctatcatggaagaagatgatgagggcagcaagttctgcgaggaggatattgaccagatcctcctgagaagaaccacaacaattacgatagagtccgaagggaaaggcagtaccttcgcaaaggccagttttgtggcctcagaaaatagaacggacataagtctcgatgaccccaatttctggcagaaatgggctaaaaaagccgacctggacatggacttgctcaactctaagaacaatctcgtcattgataccccgcgtgtgcgtaagcagacacgacacttttccaccctgaaggatgacgatctggtggaattcagcgatctagagtcagaggacgatgagagaccgaggtcccggagacacgatcgccaccacgcctacgggaggacggactgctttagggtggaaaagcaccttttagtgtatggctggggtcgatggagggacattctctctcatggacgcttcaagagaagaatgaccgagcgcgacgtggaaaccatctgtagagccattctagtttattgtctgttgcattatcgcggagatgaaaatataaaggggtttatttgggaccttatcagccctgcagagaacggcaaaactaaggaactgcagaaccacagtgggctatcaattccggtgcctagaggcaggaagggcaagaaggtaaagtcacagagtacctttgacattcacaaggccgattggataaggaaatacaacccagatactctgttccaggacgagtcctacaagaaacatcttaagcatcagtgtaataaagttctcttacgggttcgtatgctgtattacctcagacaggaagttatcggagatcaagccgagaaggtactcggaggagccattgccagcgaaatcgacatctggttcccagtggtggaccagcttgaggtgccaacaacttggtgggattcggaagcggacaaaagcttgctgataggagtgtttaaacatgggtatgagaagtacaacaccatgcgtgctgatccagccctctgtttcctggagaaagctggacgccctgatgacaaggcgatagctgctgagcatcgcgttctggataacttttcagacattgtagaaggtgtcgatttcgacaaagattgcgaagatcccgagtacaaaccgctgcagggcccacctaaagaccaggatgacgaaggagaccccctcatgatgatggacgaagaaatcagcgtcattgacggggatgaggcacaggtgactcagcagcctggacacttgttctggccacccggtagtgcccttactgcgaggctgcgaagacttgttactgcctatcagcggagttacaaacgggagcagatgaaaattgaggctgccgaaaggggtgacaggcgtagacggagatgtgaggccgcatttaagctgaaagagattgccaggcgagaaaaacagcagaggtggacacgtcgggagcagacagacttttacagagtcgtttctactttcggagtcgagtacgatcctgatacaatgcagttccactgggataggtttcggaccttcgcccgtttggacaagaagaccgacgaatctttgacgaagtattttcatgggtttgtggcaatgtgccgacaagtgtgccgacttcctcctgccgcaggagacgagcccccagatccaaatctctttatcgagccaatcacagaagagcgggcaagccgaaccctgtatcgcatagagctgctccggagacttcgggaacaggtgctgtgtcatcctctgttagaggaccgtctcgccctctgtcagccccctggacccgagcttcccaagtggtgggagccggtacggcatgatggtgagctgctcaggggtgccgctagacatggtgtgtctcagaccgattgtaacattatgcaagatcccgactttagctttctggcagctcggatgaactacatgcaaaatcatcaggctggcgctcctgcaccctcattgtccagatgttccacaccgctgctccaccaacagtacactagcagaactgccagtcccctcccgctccggccagatgccccagtcgagaagtcaccagaagagactgccacccaagtgccgagcctcgaatccttgacgctgaagctagagcacgaggtggtcgccaggtctcgtcccactcctcaggactacgaaatgagagtatcaccaagtgatacaactcccttagtctctagatcagtgccccctgtcaagctcgaggacgaagatgacagtgattccgagctggacctgagtaaactgtcaccttcctcatcgagcagcagctcatcgagctccagctcatccagcaccgacgaaagtgaggacgagaaagaggaaaagctcaccgaccaatcacgaagtaaattgtatgatgaagagtccctgctttccctgactatgtctcaagatgggttccccaacgaagacggcgagcagatgactcccgagctgctcctcttgcaggaaagacagcgcgcatctgaatggcccaaggaccgagttttgatcaacagaatcgatttggtgtgtcaggccgtgctgagtgggaagtggccttctagcagacgctctcaagagatggtcacaggcggtatcctaggcccaggcaatcatctgctagatagcccatcccttacccccggagaatacggtgattctcctgttccaactcccaggtcttcgtccgccgcttctatggccgaagaggaagcaagcgcagtttccactgccgctgcgcaattcacaaagctaaggcgaggcatggacgaaaaggaattcaccgtccagatcaaggatgaagaggggctcaaattaacattccagaagcacaagctgatggccaacggagtgatgggggatggccacccattatttcacaaaaagaagggcaatcgaaaaaaattggttgagctggaagtggagtgcatggaagaacctaatcatctggatgttgacctggaaactaggatcccagtaataaataaagtcgacggcactctgctggtgggggaggacgccccaaggcgcgctgagctggagatgtggctgcaaggacatccagaattcgcagtggatcctagattcctcgcctacatggaggacagacggaaacaaaagtggcaacggtgcaaaaaaaacaataaggcggagctgaattgccttggcatggaaccagtacagaccgcgaactcacgcaacggtaagaagggtcatcacaccgaaaccgtgtttaatcgggtactgcccggaccaattgcacccgagtcctccaagaagagggccagaagaatgcgccctgacctctctaagatgatggccctgatgcagggcggaagtaccggtagtctctcactccacaacacatttcagcactcaagctccgggttacagtccgtgagttctctcggtcactcgtcagccacgtccgccagtctgccattcatgcctttcgtgatgggaggcgctccctcctctccgcatgtggactcctctactatgctgcatcaccaccaccatcatcctcatccccatcatcatcaccaccaccaccctggtctgcgcgctcccggttaccctagcagcccagtcacaacagctagcggaaccacgctgcggttacccccactgcagccagaggaggatgatgatgaagacgaggaagatgatgacgacctgagccaagggtatgatagctctgagagggacttcagcttgatagacgaccccatgatgcctgctaatagcgacagctccgaagatgcggatgactac

SEQ ID NO: 218334 - DNA, 7745 bp, synthetic construct
  misc_feature 1..7745: note = Description of Artificial Sequence: Synthetic coding sequence
  source 1..7745: mol_type = other DNA
atggccgatccaattatggacctctttgatgatcccaatctctttggcttggacagtcttaccgacgacagtttcaaccaagtgacacaggaccctatcgaggaggcattggggctgccgagcagcctggattctctggaccagatgaatcaggacggcggaggaggggacgtggggaattcgagcgcctccgaactcgtccccccaccggaggaaacggcaccaactgaactgagcaaggagtcaaccgctcccgctcccgagtcaattaccctacacgactacacaacacagcccgcatctcaggaacagccagcccaacccgtcttacagacatcgactcccacctccggccttctacaggtcagtaagagccaggagatactctcacagggaaacccctttatgggggtaagcgccactgccgtgagttcctcttcagccggtggccaaccaccacaaagcgcccctaagatcgtgattctgaaggctccaccatcttcgtcagtgaccggcgcacatgtggcccagattcaggcccagggcataactagcacggcccagcccctggtggccggtacggcaaatggcggaaaggtgacgttcactaaggtcctcaccgggacaccgctccggccaggggtgagcatcgtatctggaaacacggtccttgccgctaaggttcctggaaaccaggctgctgtgcaaaggatcgtccaacctagccgtcctgtcaaacagctggttctgcaacccgtcaaaggctccgccccagcaggaaatccaggggctacagggccacccctgaaacccgcagtgaccctcacttccacccccacccagggcgaaagtaaacgcattaccctggttctccagcagcctcaaagcgggggaccccaggggcaccggcacgtcgttctcggcagtcttcctggcaagatcgtcctccagggcaaccagctggcagctttgacccaggcgaagaatgctcaaggacaacctgccaaagtcgtgacaatccagctacaggttcagcagccccagcagaagatccagattgtgcctcagcccccttctagccagccacagccccaacagcctccatccacccagccagtaaccctgtcctccgtccagcaggctcagatcatgggccctggtcagagccccggacaacgtttgagtgttcccgtgaaggtagtcctgcaacctcaggctggtagttctcagggggcttccagcggcctcagcgttgtcaaggtgttaagcgctagcgaggtggctgctctgagcagtccagccagcagcgctccacactctggaggaaaaactgggatggaggagaaccgcaggctcgaacaccagaaaaagcaggagaaggcaaaccgcatcgtggccgaggccattgcgagagctcgggctagaggcgaacagaatattccacgggtcctgaatgaggatgaacttccaagtgtccgccctgaggaagagggcgaaaagaaacgacgaaagaagtcagccggagagcggctcaaagaggagaaaccaaagaagtctaaaacgtcaggcgctagcaagacgaaaggaaagtcaaagcttaatacaatcacccctgtcgttgggaagaagcggaagcgcaacacctccagcgacaattcggacgtcgaggtgatgccagcacagtctccaagagaagacgaagaatcctctatccagaagcgaagaagcaatagacaggtgaagaggaagaagtacactgaggatttggacataaagatcacagacgacgaggaagaggaggaagtggatgttactgggccaatcaaaccagagccaattcttcctgagcccgtgcaggaacccgacggggagaccttaccctcaatgcagtttttcgtggagaatccatctgaggaggacgcagcgatagtagacaaggtgctgagtatgaggatcgtcaaaaaggagctgccaagtggtcagtacaccgaggcggaggaattttttgtcaagtacaaaaattattcatacttgcactgtgaatgggccactatctcccagttagaaaaggataagcgcatacaccagaaattgaagcgttttaaaactaagatggcccagatgcgacacttcttccatgaggatgaggaaccattcaatcccgattatgtcgaggtggacaggatcttagatgaatcacactctatcgacaaagacaacggagagcccgttatctactatctggtgaaatggtgctcccttccgtatgaagatagcacctgggaactgaaagaagatgtcgacgagggcaagatccgagagtttaaaagaattcagagccggcacccagaattgaaaagagtgaatcgccctcaggctagtgcgtggaaaaagctggaactgagccacgaatataaaaatcgcaaccagctgcgagaataccagcttgaaggggtcaactggctgctgttcaattggtacaatagacaaaactgtatcctcgccgacgaaatgggcctggggaaaactattcagagtattgctttcctgcaagaggtgtataacgtaggaattcacggccctttcttagttattgccccactttctactatcaccaactgggagagggagtttaatacatggaccgaaatgaatacaattgtttaccacggcagcctggccagcaggcagatgatccagcagtatgagatgtattgtaaggattccaggggtagactgattcctggtgcatataagttcgatgctctaatcacaaccttcgagatgatcctttccgattgtcctgaattaagggagatagaatggcgatgtgttataatcgatgaggctcatcggctgaaaaaccgaaattgtaagcttttggacagtctaaagcacatggacctggaacataaagtcctgttgactggcacgccgttacagaacaccgtggaggagctattctctctcttgcatttcctggagccatctcagttcccgagcgaaagcgagtttttaaaggactttggcgaccttaaaacagaggagcaggtgcaaaagctgcaagccatcctaaagcctatgatgctgcgcaggctcaaggaagacgtcgaaaagaatcttgccccaaagcaggagacgatcatcgaagtcgaactgacaaacatacagaaaaagtattacagagctattctcgaaaagaactttagttttttgagtaaaggggctggtcatacaaacatgccaaacctcctcaatacgatgatggagctgagaaagtgctgcaatcatccatacctgattaatggagcagaagagaaaatcctaaccgagttccgtgaggcttgccacatcatccctcacgacttccatctgcaggcaatggtcaggagtgccggtaagctcgttctgattgacaagttgctgccgaaactcaaagcagggggacacaaagttctgatcttcagtcagatggtacggtgcttggatatcctggaagactaccttatccagcgcagatacctatatgaaaggatcgacgggcgagtacggggtaacctgcgccaggccgctattgaccgattttccaaacccgattccgaccgtttcgttttcctgctgtgtactcgggcaggcggtttgggaattaatttaacagctgcagatacgtgtattatcttcgatagcgattggaacccccagaatgatttgcaggcgcaagcacgttgccatcgcattgggcagtctaaagcagtgaaagtctaccgccttattacccgtaactcctacgagagagagatgttcgataaagccagtctgaagctcggcctggataaggctgtgctccagtctatgtcagggagagacggtaacatcaccggaattcaacaattttccaaaaaggaaatagaggatttgctgcggaagggagcctatgcggctatcatggaagaagatgacgagggttctaagttctgtgaggaagatattgaccagattttgctacgtaggacaactaccatcactatcgagagcgagggaaaagggagtacgttcgctaaagccagcttcgtggcttcagagaatagaacagacatttccttagacgaccccaatttctggcagaaatgggccaagaaggccgacttggatatggatctgctgaactctaagaacaacctcgtcattgacaccccacgggtccgaaagcagactcgacacttttccactcttaaagacgacgacctggtggagttttccgatttggagtctgaggatgatgaacggccacgcagcagacgtcacgaccggcatcacgcttatggacgcacagactgcttcagggttgagaagcatctgctagtgtacgggtggggcagatggcgtgatatcctgtcgcatggcaggtttaaacgccgtatgaccgaacgagatgtcgagaccatctgcagggctatccttgtgtattgccttttgcactaccggggtgatgagaatatcaaagggttcatatgggacctgatctctcctgcagaaaacggcaaaaccaaagaactgcagaatcatagcggtctgtcaattcccgtgcccagaggcaggaaaggcaagaaggtgaagagtcaatctacgttcgatattcataaggccgattggatcagaaagtataatccagataccctgttccaagacgagagctacaagaagcatctgaagcaccagtgcaataaggtgctcctgcgtgtgagaatgttatattacctgcggcaagaggtgattggagatcaagccgaaaaagttctgggtggcgcaatcgcctcagagattgacatttggttccctgtcgtagatcaactcgaagtgcctaccacctggtgggacagcgaagctgataagtccctgctcattggcgtgtttaaacacgggtacgagaaatataacaccatgcgggcagaccctgccttgtgttttctggagaaggcgggtagaccagacgataaagcgatcgccgctgagcacagggtgctggacaacttttcggacatcgtcgagggcgtggacttcgataaagattgcgaggatccagaatataagccactgcaggggcctcctaaagatcaggatgacgaaggcgaccccctgatgatgatggacgaggagatcagtgtgatagatggggacgaagcccaggtcacccagcagcccggtcatctgttttggccccctgggtccgcgttaactgcacgtctaaggagacttgtgacagcataccaaaggtcttataaaagggaacagatgaaaattgaggctgccgagaggggagacaggcgtcgtaggcgatgtgaagctgccttcaaattaaaggagattgccaggagagagaagcaacagaggtggactaggcgtgagcaaactgacttttatcgggtggtgtccactttcggagttgaatatgacccagacaccatgcaatttcattgggacaggtttaggacgtttgctcgcctggataaaaaaacagatgagtccctgacaaaatacttccacggctttgtggcaatgtgccggcaggtctgccggctacctcccgctgctggggacgaacctcctgaccctaacctatttatcgaaccaatcacggaagagcgggcatccaggacactctaccggatagaacttctccgcagattgcgagagcaggtcctgtgtcaccccctgctcgaagacagattagccctctgccaaccccctggcccagagttgccaaagtggtgggaacccgtgagacatgacggggaattattgaggggcgctgccaggcacggagtgagccagaccgactgcaacatcatgcaggaccctgacttcagcttcctcgccgctaggatgaactatatgcaaaaccatcaggccggagctccagcaccatctctgtcaaggtgcagcactccgctgctgcatcagcagtacacctcccgcactgcctccccccttcccctacgcccagatgctcctgtagagaaatcaccagaagagacagcaacccaggtaccatccctcgagtccctgactctgaaacttgaacatgaggtagtcgctcgcagtcgtcctacgccccaggattatgaaatgcgcgtctccccttcagacactaccccgctcgtgtcaagatccgtgcctcctgtcaaacttgaggatgaagatgacagcgactctgagttggacttatcaaagctgtcgccatctagtagctcatcctcttccagcagcagctcttccagtagtacagatgaaagcgaagatgaaaaagaggaaaagctgactgatcaaagcagaagcaagctttatgacgaggagtcccttctgagcctcaccatgagccaggatggcttccctaacgaagacggcgaacaaatgactcccgaactgctgctgttgcaagagaggcagcgcgcttcagagtggcctaaagaccgggttttgattaacaggattgatctcgtgtgtcaagctgtgctgtctggcaagtggccttccagcagacgatcccaggagatggtgaccggagggattctcgggccaggcaaccacctgttggattctccgtcattgaccccgggagagtatggcgatagccccgtgcctacccctaggagttcatcggcagcatccatggcggaagaagaggccagcgctgtatccaccgccgctgctcagttcactaaactgcggagaggaatggacgagaaggagtttaccgtgcagatcaaggacgaggaaggcctcaagctgacatttcagaaacacaagcttatggccaacggggttatgggcgatggacacccattatttcacaaaaagaaaggaaaccgcaaaaagctggttgaactggaggttgagtgcatggaagaacctaaccacctggatgttgatttggaaacaaggatccccgtgattaataaggttgatggtaccctgctggtgggagaagatgctcctaggcgcgcagagctggaaatgtggctgcagggtcaccccgagtttgcagtcgacccccgttttctcgcatacatggaggacaggaggaagcagaaatggcagagatgcaaaaagaacaacaaagccgaattaaactgcttaggcatggaacctgtccagacagcgaactctcgaaacgggaagaaaggccatcacaccgagaccgtatttaacagggtgttaccaggacccatagcgcctgaaagtagcaaaaagcgcgctagaaggatgagacccgatttaagtaaaatgatggcattgatgcagggaggatccaccggcagtctcagtctccataacacctttcagcatagcagctcggggcttcagtctgtaagcagcctggggcattctagtgccacatcggcatcccttcctttcatgccgtttgttatgggaggagcgccatcctctcctcacgtggatagttcaaccatgctgcatcaccaccaccaccatcctcacccccaccaccatcatcaccatcatcccggtctgcgagccccaggttacccatcttcccccgtgacaaccgcttcaggaacaacacttagacttccgcctctgcagccagaagaagacgatgatgaagacgaagaagacgatgatgacctgagccagggatatgatagtagcgagcgggatttttcgttaatagatgaccctatgatgcccgcaaactcagactcatcagaagatgctgatgatta

SEQ ID NO: 218335 - DNA, 6908 bp, synthetic construct
  misc_feature 1..6908: note = Description of Artificial Sequence: Synthetic coding sequence
  source 1..6908: mol_type = other DNA
atgaaaggggaaagcaaacgcattactctcgtactgcaacaaccacagtcggggggtcctcagggtcatcggcatgtggttctcggctccttaccaggcaaaatcgtcctgcaaggcaaccagctcgccgcacttacacaggctaagaacgcccagggccagcccgcaaaggtcgtgactattcaattgcaggtacagcagccccagcagaagattcagattgttccacagcccccaagttctcaaccgcagccacagcagcctccatccacccagcctgtgacactcagtagtgtgcagcaagcccagattatgggccctggacagtcgccaggacaacgactctccgtcccagtgaaagtcgtgctgcaaccacaggcgggatcctcgcagggcgcatcatcaggactatccgttgtgaaagttctcagcgcgagcgaagtcgccgctctgtcatccccagcctcgtcagccccacactctggaggcaaaacagggatggaggagaaccgtcgcctcgagcatcagaagaaacaggaaaaagccaacagaatcgttgctgaggcgatcgctcgggcaagggccaggggagaacagaatattccgagggttctcaacgaggatgagctgcccagcgtgagacccgaggaagaaggggaaaaaaaacgccgtaagaaaagcgcaggggaacgcttaaaggaggagaaacctaaaaagagcaaaacgagtggagccagcaaaaccaagggaaaatccaagctgaatactattactcccgtagtgggcaaaaagagaaaaaggaataccagtagcgataacagcgacgtggaagttatgcccgcacagtcacccagagaggacgaagagtccagcattcaaaagcgccgtagcaacaggcaggtgaagcgcaagaaatacacagaggacctggacataaaaatcaccgacgacgaagaggaggaggaagttgatgtcacgggccctatcaaaccagaacccattttgccagagcctgtccaggagccggacggtgagactctgcccagtatgcagttttttgtggagaatcctagcgaggaagatgctgctatcgtggataaggtgttgagcatgagaattgtgaagaaggaacttccatccggacagtataccgaggctgaggagttcttcgtgaagtacaaaaattattcttaccttcactgtgagtgggcgacaatcagccaactggaaaaggataaacgaatccatcagaagctgaaacggtttaagactaagatggcacagatgcgtcacttttttcacgaggacgaagaaccgttcaacccggattatgtcgaggtggacagaatactcgacgagtctcactcaattgacaaggacaacggcgagcctgtgatttattatctcgttaaatggtgtagcctgccttacgaggattctacgtgggagctcaaggaggacgttgatgaaggcaagatcagggaattcaaacgtatacagtcacgccaccccgaactgaagcgcgtcaatcggcctcaagcctcagcatggaaaaaactggagctgagccacgagtataagaaccggaaccagctaagagagtaccaactggaaggcgtaaactggttactcttcaactggtacaaccggcagaactgcatattggccgacgaaatggggttggggaagacaatccaaagcatagccttcctgcaggaggtctataatgtaggtattcacgggccttttctcgtgattgcaccactgagcacgatcactaactgggagcgagagttcaacacatggacagaaatgaacactatcgtgtatcatggatcactggccagtcggcagatgatccagcagtacgaaatgtattgcaaagacagcagaggcagactaatccccggtgcctacaaatttgacgccctcatcactacgtttgaaatgatcctttctgattgccccgaactccgcgagatcgaatggcgctgtgttattatcgatgaggctcataggctcaagaatcggaactgtaaactcctcgatagcctcaaacatatggatctggagcacaaggtgttgctcaccggaaccccactccaaaatacggtagaagagctgttttcccttctacattttctcgagccatctcagtttccctccgagtccgagttcctaaaggatttcggtgatcttaagactgaagaacaggttcagaaactccaggctatcctcaagcctatgatgctgagacggctgaaagaagacgtagagaagaacttggcccctaagcaagagacaatcattgaggtcgaattgaccaacattcagaagaaatactaccgggcaatcttggagaaaaacttctcattcctgagcaagggggctggtcacacaaatatgccaaacctcctcaatacaatgatggaactgagaaaatgctgcaaccatccttacctaatcaacggcgctgaagagaaaattctgacagagttcagagaagcatgccacataatcccacacgactttcatctacaagctatggtcagatctgctggtaagcttgtgctgatagacaagctgctcccaaagctgaaggcaggaggccacaaagttctgatattcagtcaaatggttcggtgcctcgatatactggaggattacctgatccaacgtcggtacttatatgaacggatcgacggcagagtaagagggaacctgagacaggctgcgatcgatagattctcaaagcccgattccgaccggttcgtcttcttgctgtgtacccgggctgggggactgggtataaacctcacagccgctgacacatgcatcatctttgacagcgactggaacccgcagaacgacctgcaggctcaggcgaggtgtcatcgaattggtcagtcgaaagctgtcaaggtataccggttgatcaccagaaatagctacgaaagagaaatgtttgacaaagcctctctgaagctcggtctcgataaggctgttctgcaatctatgagtggccgagatgggaatattacgggcatacagcagttttccaagaaagagatcgaagatttactcaggaaaggagcctatgcagctattatggaagaggatgatgaaggatcaaaattctgcgaagaagacatcgatcagattttgctcaggcggactacaaccattacaattgagtccgaaggtaaggggtctacctttgcaaaggcatcctttgtggccagcgagaaccgaacagacattagcctggatgaccctaatttttggcagaaatgggccaagaaagcagacttggacatggatttattaaattccaagaacaatctggtgattgatacgccacgggtccgcaaacagacacggcacttctccactctaaaggatgacgatctagtcgaattttcagatctggaaagcgaagacgacgaacgacccagatcacgtagacacgataggcatcatgcgtatgggagaaccgactgcttccgcgtcgaaaagcacctactagtttacgggtggggtaggtggagagatattctgagtcacggacggttcaaaagacggatgaccgaacgggacgtcgaaactatctgccgggctatattagtctattgccttctgcattatcgaggcgatgagaacatcaaggggtttatttgggatctgatttcccccgcagaaaatggcaaaactaaggagttacagaatcacagcggcctgagcatacctgtgcctcggggacgcaaagggaagaaagtcaaatcacagagcaccttcgatatccataaagctgattggatccgcaagtataatcccgacacactgtttcaggatgagtcctataaaaagcatcttaagcatcagtgtaataaggtgctgttacgggtgcggatgctgtattatcttcgacaagaggtgatcggggaccaggccgaaaaagttctgggtggagcaatcgctagcgagattgatatctggttcccggtggtggatcagctggaggtgcccactacttggtgggacagcgaggctgacaagtcactgctgataggcgtgttcaagcacggctatgagaaatataacaccatgcgggctgacccggctctgtgtttccttgagaaagccggaagacctgacgataaggctatagccgcagagcaccgggtgctggataacttcagcgacattgtagaaggagttgactttgacaaagactgtgaggatccagagtataaacccctccagggcccacctaaggaccaggacgatgaaggcgatcccctcatgatgatggatgaggagatcagtgtaatagacggggacgaggcccaggtcacacagcagcctggccatttattttggcctccaggtagtgcactcaccgctaggttacggagactggtgactgcttatcagcgatcttacaagagggagcaaatgaagattgaagctgcggagaggggagaccggagacgaaggcgctgcgaggctgcattcaagcttaaagaaatcgcacgtagggagaagcagcagagatggactagacgtgagcagacagacttttatcgcgtcgtgtccacgtttggcgtcgaatacgaccccgacaccatgcagtttcactgggatcgttttcgtaccttcgccaggttggataagaaaacagatgagtcattgaccaagtattttcacggctttgtcgccatgtgcaggcaggtctgtagattgccaccagctgcgggagatgagcctcctgacccaaatctgtttattgagccaatcaccgaggaacgcgcaagtcgaactttgtatcgaatagagctgctgaggcgcttgcgtgaacaggtgttatgccaccctttgttggaggatcgactggccctttgccagcccccaggtccagaactgcccaaatggtgggaacccgtgaggcatgacggcgagttgttgcggggtgctgcccgtcatggggtgtctcaaactgactgcaacatcatgcaggatcctgacttcagtttcctggcagcgcgaatgaactatatgcagaaccatcaggctggcgctccagccccttccctttctcgctgttccacacctttgctgcaccagcagtacacatcacgcaccgcaagccctttgcccctgagacccgatgctcctgtcgaaaagagtcctgaagaaacggctacccaggttccctccctagaatctctcacattaaagcttgaacacgaagtggtggccagatctcgcccaaccccacaggattacgaaatgagggttagcccatccgacacaacgcctcttgttagcaggtcggtccctcctgtcaagcttgaagatgaagatgactctgattccgaactcgatctttcaaagctctcaccttctagctccagttcaagctcatccagttcaagttcgtccagcacggatgagtctgaggatgagaaggaggagaaactcactgaccaatccagaagcaagctgtacgacgaggaaagcttgctgtctttgactatgtcccaagacgggttccctaatgaggacggtgagcaaatgacccctgagctgctgttgctgcaggagcgacagcgtgcctctgaatggccaaaggaccgagttctgataaacaggattgatctggtatgtcaggcagtcttatcaggcaaatggccaagctctaggcgatctcaggaaatggtgaccggcggaatccttggtcctggcaaccatctgctggatagcccttctctaaccccaggggaatatggcgactctccagtccccacacccagatcctcatccgctgcatctatggctgaggaagaagcctcggcagtatcaaccgcagcggcacaattcaccaagttgcggaggggtatggatgagaaggagttcactgtgcagattaaagacgaggaaggcctgaaactgacttttcagaagcataaactcatggccaacggtgtgatgggggatgggcacccactgtttcacaagaaaaaaggcaaccggaagaaactggttgagttagaggttgaatgtatggaagaaccaaaccatctcgatgtggatctcgaaacccggatccctgtgattaataaagtggatggcaccctactggtgggcgaagacgctcctcgcagagccgagctggagatgtggctgcagggacaccccgaatttgcggtagatcctcggttcctggcttacatggaggatcgcaggaaacagaaatggcagaggtgcaagaaaaataacaaagctgaactgaactgtctaggaatggagccggtgcagacagcgaatagcagaaatggaaagaagggacatcacaccgaaaccgtgtttaaccgcgtgttgcctgggccaattgcaccagaatccagtaagaaacgcgctcgaagaatgagacccgatctgagcaaaatgatggcgctgatgcaagggggttccacaggcagccttagtttacataacacgttccagcattcatccagcgggcttcagagcgtctcctcacttggacacagttccgctacctccgcctcgctcccatttatgcctttcgtgatggggggtgctccatcgtctccacacgtagatagctccaccatgctgcaccatcaccaccatcacccacatcctcaccatcatcaccaccaccatcccggattaagagcacctggatacccatctagccctgtcactactgcctctgggaccactcttcgactgcccccactgcagccagaggaggatgatgacgaggacgaagaggacgatgatgaccttagtcagggctatgacagctccgagagggacttttccctcatcgacgatcctatgatgccagctaattctgattccagcgaggacgcagacgacta

SEQ ID NO: 218336 - DNA, 7745 bp, synthetic construct
  misc_feature 1..7745: note = Description of Artificial Sequence: Synthetic coding sequence
  source 1..7745: mol_type = other DNA
atggctgaccctattatggaccttttcgacgaccctaacctcttcggcctggattcacttacggacgattcctttaatcaagtaacacaggatccaatcgaggaggcattaggcctcccttccagccttgattccctcgaccagatgaatcaggacggtggcggtggggatgtgggaaatagcagcgcctctgagcttgtaccccctcctgaagaaactgcacccacagaactgtctaaggagagcacagctcccgctcctgagtctatcacgctccacgactatacaacacagccggcttctcaagagcagcctgcgcagcctgtcctgcagactagtacccccacctcagggcttttgcaggtgtctaagagccaggaaatcctgagccagggtaatccatttatgggcgtatccgctacagctgttagctccagttccgctggcggtcaaccgccacagtctgctcctaaaattgtgattctgaaagcccctccaagctcctccgtaactggggcacatgtggcccagatccaggcgcaaggcataacatccacagcacagcctctggtggcagggacagccaacgggggaaaagtgaccttcacaaaagttctgactggcactccactccggccaggcgtgagcatcgtgagcggcaacaccgtcctggctgccaaggtcccaggcaaccaagctgctgtgcagagaatcgttcagccatctaggccagtcaaacagttagtactgcagccagtgaaggggagcgcacctgctgggaaccctggggcaacaggaccacctctgaagccagctgtgactttaacaagcaccccgactcaaggcgaaagcaagaggataacactggttctgcaacagccccagtcaggcggaccacagggacaccggcatgttgtactcggtagcctgcccggtaaaatagtcctgcagggcaaccagcttgctgctctgacgcaggctaagaacgcccagggccaaccagccaaagtggtgaccatccagctccaggtccagcaaccacagcaaaagattcagatagtgccgcaaccgcctagctcacagcctcaaccgcagcagcccccaagtacacagcccgtcacactgtcttcggtgcagcaggctcaaataatggggcctggccaatcccctggccagcgattaagtgtgccagtgaaagtggtgctgcagccacaggcaggctctagccagggggcatctagcggtctgagcgttgtgaaagtcctttcggcctctgaagtcgccgctctgtctagccctgctagttctgctccccacagcggaggaaaaaccggaatggaagagaacagaaggctcgaacaccagaagaagcaggagaaggccaatagaatagttgccgaggcaatcgcgagggcaagggccagaggggagcaaaatatccccagagttctaaacgaggacgaactccctagtgtgaggccagaagaagagggcgagaagaaacgtcggaagaagagcgcaggagagcgcctcaaggaggaaaagcctaagaaatctaaaaccagcggcgctagtaagacaaaggggaaaagcaagctcaatactattacgcccgtcgttggaaagaagaggaaacggaacacgagctcagataatagtgacgtggaggtcatgcccgcacagtcaccaagggaagatgaggagtccagcatacagaaacgcagatcaaatcgccaagtgaaacggaagaaatatacagaggacctcgatataaagataaccgatgacgaagaggaggaggaggtggacgtgactggcccaataaaacccgaacctatcctaccagagccagtacaggaacccgatggagagaccctccctagtatgcagttcttcgtggagaatccctctgaagaggatgctgctattgtggataaagttctgtcaatgcgcattgtaaagaaagaattaccctccggacagtacactgaggctgaggagttctttgtgaaatataagaactatagttacttacattgtgagtgggccactatttcgcagctggagaaagacaaacgcattcaccaaaagctgaaaagattcaagaccaagatggcccagatgagacacttcttccatgaagatgaggagcctttcaaccctgattatgtggaagtcgaccgcatcctcgacgagtctcactctatcgacaaggacaacggcgagcctgtaatatactatctagtgaagtggtgttcgctcccgtatgaagattccacttgggagcttaaagaagatgttgatgaaggaaaaatccgggagttcaaaagaatccagtcgagacatcccgaactgaagcgggtgaatcgcccacaggcctcggcctggaaaaagttggagctgagtcacgagtataagaatagaaatcaactacgggaatatcagttggagggcgtgaattggctgctctttaactggtacaaccgccagaactgcattcttgctgacgagatgggtctgggcaaaactatacagtccattgcttttcttcaggaagtttataatgtcgggatccacggaccgttcttggtgatcgctcctttgtctaccataacgaattgggaacgcgagtttaatacctggacagagatgaacaccattgtataccacggaagtcttgccagtcgccagatgatccagcagtacgagatgtactgtaaggacagccggggacgactgatccccggagcatataagttcgacgctcttattacaacctttgagatgatcctgtcagactgtcctgagctgcgcgagatcgagtggaggtgcgtgataatcgacgaggctcacagactgaaaaatcggaactgcaagcttctagattccttgaaacacatggatctcgagcataaggtgttgcttacggggacaccccttcaaaacacagtagaagaacttttcagcctgctccattttctggagccttcccaattccctagtgaaagcgagtttttaaaggatttcggggatttaaagaccgaggaacaggtgcaaaaactacaggccatacttaaacctatgatgctgagaagactcaaagaagacgtggagaagaacttagcacctaaacaagagacaatcattgaagtcgaactgacgaacattcagaaaaagtattaccgagccatactggagaagaattttagctttctcagtaagggggcagggcataccaacatgcccaacttgttaaacacaatgatggagctaaggaaatgctgcaaccatccatacctgataaacggcgctgaagagaagatcctcacagagttccgcgaagcatgccacatcattccacacgacttccacctccaagcaatggtcaggtctgcaggcaagttagtgctgatcgacaagctgttacctaaactcaaggctggaggccataaggttctcattttctctcaaatggtcaggtgtctggacattttggaagattatttgatccagcgccgatatttgtatgagcggatcgacggaagagtgcgcggtaacctcagacaggccgctatcgacaggttcagcaagcctgatagcgaccgcttcgtgtttctcttgtgcacaagagctgggggtttaggcatcaatcttacagccgcagatacatgtataatatttgattcagattggaacccccaaaacgacctccaggcacaagccagatgtcataggattggacagtctaaggccgtcaaagtgtacagactgatcacccgcaacagctacgagcgggaaatgttcgacaaggccagcttgaaactgggactagacaaggcggttctgcagtcaatgtccgggagagacggaaacataaccggaatacaacaattcagtaaaaaagagattgaagacttgctccgcaagggtgcgtacgctgcaataatggaggaggatgacgaaggctccaagttctgcgaggaagacatagatcaaatcctgctgaggcgcaccactacaataaccatcgagtccgaaggaaaagggagcacatttgccaaagccagcttcgtggccagtgaaaacaggaccgatatatcgctggacgaccccaacttctggcagaagtgggccaaaaaggctgatcttgatatggacttactgaactctaagaacaaccttgtcatagacaccccaagggttaggaaacagacccgtcactttagcactcttaaggacgacgatctggtcgagttttcggatctagagagtgaggatgatgagagaccccgttcccggcgacacgaccgccatcatgcttacgggaggactgactgcttccgggtggaaaagcatttactggtgtacgggtggggcagatggagggacatcctaagccacggacgcttcaagcgcaggatgacagagcgcgatgtggagactatctgtcgcgcaatcctggtctactgtctgctgcactatcgaggggacgaaaacattaaaggattcatttgggatttaatcagtcctgctgagaatggaaaaaccaaagaactgcaaaatcacagcggactgtctatccctgttccaagggggagaaaaggcaagaaggtcaagtcacagagcacatttgatattcacaaagccgattggattagaaagtacaatccagatacgttattccaggacgaatcctataaaaagcatctgaaacaccagtgtaataaagtgctcttgagagtaagaatgctttattatctcaggcaagaagtgatcggggaccaggcagaaaaagtgcttggtggggcaatcgcgtccgagatcgacatctggttccccgtggttgatcagctcgaagttcctaccacatggtgggactctgaggccgataagagtcttctgattggcgtgtttaagcatggctacgaaaagtacaacaccatgcgcgcagacccggctctgtgcttccttgaaaaggccggtcgcccagacgacaaggctatagctgccgaacacagggtgctggacaatttctccgatatcgttgaaggtgtggactttgacaaagactgcgaagaccccgaatacaagccacttcaagggccacctaaagatcaggacgatgaaggggatcccctcatgatgatggacgaagagatctcggtgattgatggcgatgaggcacaggtgacacagcagcctggccacctattttggcccccaggatcagccttgacagcccgactgaggcgcctggtgacagcgtaccagcgcagttataaacgggagcagatgaaaattgaggcagcggaaaggggggaccgcaggcgcaggcgttgcgaggctgcctttaagctgaaggaaattgccaggagagagaaacagcaacgatggacgcgccgagaacaaacagatttttaccgcgtggtcagcacgttcggcgtcgagtatgatcccgataccatgcagttccactgggaccgcttcaggacttttgccagacttgacaagaagaccgacgaatctttgacaaagtacttccatgggttcgtcgcgatgtgcaggcaagtgtgccgcttaccacctgctgccggtgatgagccacccgacccgaacctgttcatagaacccattactgaggagcgtgcctcaaggaccctgtaccggattgaactccttcgacgtctgcgagagcaagtcctgtgtcatccactcctagaggaccgactggccttgtgtcaaccacccggacccgaactacctaagtggtgggagccggtgagacacgacggagaactgctaagaggcgctgcacggcacggtgtgagtcaaactgattgcaatattatgcaggacccagatttctcctttctggccgctagaatgaattacatgcagaaccaccaggcgggtgcacccgcaccatcactctcccgttgctcaaccccactattgcaccagcaatacacttcccgcacagccagtccattgccgctgcgaccagatgctccggtggagaagtccccagaagaaactgccacacaagtgccaagcttggagagcctgacccttaaactggagcacgaagtagtagcccgtagccgcccaactcctcaagattacgaaatgcgggtctctccctctgatacaactcccttagtctctaggtctgtgccaccagtaaagctcgaggacgaagacgactccgatagcgagttggatctgtccaaactgtcaccgtcttctagcagtagttcttctagtagtagctctagctccagtaccgacgaatcagaagacgaaaaagaagaaaagctgacggaccagagccgttcaaagctgtatgacgaggagagcctcctgtcactcacaatgtctcaggatgggttccctaatgaggacggagaacaaatgacgcctgagttactcctgctgcaagaacgccaaagggcctctgaatggcccaaggatagggtgctgattaatagaattgaccttgtatgtcaagcagtgctctcaggcaagtggccttcttcaagacggagccaggaaatggtcaccggaggcatactcggccctggaaaccacctgcttgacagccctagcttgacccccggtgaatatggagacagccctgtacctacccctaggtcttcaagcgcagcatccatggccgaagaggaggctagcgccgtgtctaccgcagcagctcagttcaccaaactgagaagggggatggatgagaaagagttcacagtgcagattaaagatgaggaaggcttaaagctcacctttcagaagcacaaactcatggctaatggagtgatgggtgacggacatcccctgtttcataaaaagaaaggcaatcgcaagaaacttgtcgagttagaggtggagtgtatggaagaacccaaccatctggatgttgatctggaaaccaggatcccggttattaataaagtcgacgggacactcttagtgggggaggacgctcccaggcgcgctgaattagagatgtggctccagggtcaccccgaattcgctgttgatcctcggtttctggcatacatggaagaccgacgtaagcagaaatggcagcggtgcaagaagaataataaggccgaactgaattgccttgggatggaaccagtgcaaaccgctaatagccggaacggtaagaaaggacaccacaccgaaaccgtgttcaatcgcgttctcccgggaccaatagcgccagagtctagcaaaaagcgagccaggagaatgcgacctgatctctccaaaatgatggccctgatgcagggtggatccaccggctccctctccttacataatacgtttcagcactcttccagcgggctgcagtccgtgtcctcactgggccatagctccgctactagtgcttctctgccttttatgccatttgtgatggggggtgccccatccagcccccacgttgactccagtacaatgctgcatcatcaccaccatcacccacatccccatcatcaccaccaccatcatcctggcctgcgcgcacccggatacccttccagcccagtgactacagcctcaggcaccacactgaggctgccccctctacagcctgaagaagacgacgacgaggacgaagaggatgacgacgatctctcccagggttacgactcatctgaaagagattttagcctcattgatgatcctatgatgcccgctaattccgacagctcagaggacgccgatgatta

SEQ ID NO: 218337 - DNA, 1797 bp, synthetic construct
  misc_feature 1..1797: note = Description of Artificial Sequence: Synthetic coding sequence
  source 1..1797: mol_type = other DNA
atgaccttccaagctagccaccgctcggcctggggcaaatcaaggaagaaaaattggcagtatgagggacccacacaaaagttattcctgaagcgcaataacgtatctgctccggatggtccatcagaccctagtatcagtgtgtcaagcgagcagtcgggcgctcagcagcctcctgcccttcaagtcgaacgaatagttgacaaacgcaaaaacaagaagggtaagacggaatacctggtgcggtggaaaggatacgactctgaggacgatacttgggaacccgaacagcatcttgtaaattgcgaagaatacattcacgactttaaccgtcgtcacactgagaaacagaaagagagtactctcacaagaaccaatagaacaagcccgaataatgcgagaaaacagatatcccgcagcacaaatagcaacttttctaagacttcaccaaaagccctggtaatcggaaaggatcatgagagtaagaacagtcagctgtttgctgcttctcagaagttcagaaagaacaccgcgccatccctctccagcaggaaaaacatggatctggccaaaagtggcataaagatacttgtgccgaagtcccccgtgaagagtagaaccgccgtcgacgggttccaatcagagtcacccgagaaactggatcccgtggaacaaggacaggaggataccgttgccccagaggtcgcggctgagaaaccagttggggctttgcttggaccaggggctgaaagagcccgtatgggcagccggcctagaattcatcctctggtgccgcaggttcccggaccggtaaccgctgcaatggccacaggactcgctgtcaatgggaagggaacatccccctttatggatgcattgactgccaatggtacaacgaacattcaaacaagcgtgaccggagtgacagcttccaagagaaagttcatcgacgaccggagagaccagccgtttgataaaaggttacggtttagcgtgcggcagactgagtccgcttacaggtatcgcgacatcgtggtccggaaacaagacggtttcacccacatcttattaagtaccaaatcaagcgagaataactccctcaatcctgaagtgatgcgcgaggtgcagagcgccctatccacagccgctgctgacgattctaaattagtcctcctatcagccgtggggtctgtgttttgttgcgggctagattttatctacttcatcaggagactgacggatgacaggaaaagggagagtaccaagatggctgaggcaattcgcaacttcgtaaacacatttatacagtttaagaaaccaattatcgtcgccgttaacggcccagcaatcggcctgggcgcatccatcctccctctctgcgacgtagtctgggcaaacgagaaagcatggtttcaaacgccatacactacattcgggcagtctccagacggttgtagcaccgttatgttccccaagatcatgggtggggctagtgctaacgaaatgctgctgagcggccgaaagctcacagcccaggaggcttgtggcaagggtctcgtcagccaggtgttctggccgggaacttttacacaggaggtgatggtccgcatcaaggagcttgccagttgtaatcctgtcgtgctggaagagagtaaggcactggtgaggtgcaacatgaagatggaactcgaacaggctaacgaacgcgaatgcgaggtgctgaagaaaatttggggaagcgcccagggaatggactccatgttgaagtatttgcaaagaaagattgacgagttttag

SEQ ID NO: 218338 - DNA, 1239 bp, synthetic construct
  misc_feature 1..1239: note = Description of Artificial Sequence: Synthetic coding sequence
  source 1..1239: mol_type = other DNA
atggatttggctaaaagcggaatcaaaatcctggtgcccaaatcacccgtgaaatcgagaaccgccgtggacgggtttcaaagtgaatcccctgagaagctagaccctgttgagcagggacaggaagataccgtggctccagaggtggctgccgaaaaacccgtgggcgctctgctgggcccaggcgctgaacgcgctaggatgggctctagaccacgaattcaccctctcgtcccacaggtcccgggacccgttactgcggctatggccaccgggttagcagtgaatggcaagggaacgagccctttcatggacgcactgacagccaacggcaccaccaatatccagacaagcgtgaccggcgtgaccgcctccaagagaaagtttatcgatgacagacgcgaccagcctttcgacaagaggctgcggttctctgtaagacagacagagtctgcttaccgatacagggatatcgttgtgcggaagcaagatggtttcacccacatcctcttgagcacaaagagctcagagaataactcacttaaccccgaggtgatgagagaggtgcaaagcgccctgtcaaccgctgcggcagacgattccaagctagtattgctgtctgccgtcggctcggtgttttgttgtggcctggacttcatttattttatccggaggctgactgacgacaggaaacgtgagtctactaaaatggcggaggccataaggaacttcgtgaatacattcatacagtttaaaaaacccataatagtggccgtgaacggtccggcaatcggcctgggagcgtccatcctgcccctctgcgacgtcgtatgggccaatgagaaggcatggttccagacaccatacactacattcggacagagtccagacggctgctccacggtcatgtttccaaagataatggggggagccagtgccaatgagatgctgctgtctggacgcaaactaacagctcaggaagcatgcggcaaagggctcgtcagccaagtgttctggcccggtacgtttacacaggaggtgatggtaaggattaaggaactggcctcctgcaatccagtggtactggaagagtccaaggctttggtgaggtgcaatatgaaaatggagcttgaacaggcaaatgagcgcgagtgcgaagtgttgaaaaagatttggggttccgctcaggggatggattctatgctgaaatatctccagagaaagatcgacgagttctag

SEQ ID NO: 218339 - DNA, 1635 bp, synthetic construct
  misc_feature 1..1635: note = Description of Artificial Sequence: Synthetic coding sequence
  source 1..1635: mol_type = other DNA
atggcctccgaggagttatacgaggtcgagagaatcgtggacaaacggaagaacaagaaagggaagacagaatacctggttcgttggaaggggtacgacagcgaggatgatacctgggagcctgagcaacacctcgtgaattgcgaggagtatattcatgacttcaaccgccgtcacaccgaaaagcagaaggaaagcacgctcacacgaactaacagaaccagtcctaacaatgcgaggaaacagataagtagaagtaccaattctaacttctctaagacatcacccaaagcactcgtaatcggaaaagatcacgagagtaagaatagccaattgttcgctgcaagtcaaaaattcaggaagaatactgcgccttccctgagctcccggaagaacatggatctggccaagtctggaataaaaattctggttcctaagtccccagtgaagtctaggaccgccgtggacgggtttcagagcgaaagtccagagaagttggatcctgttgagcagggtcaagaagatactgtcgcccctgaagttgccgctgagaagcccgtcggcgcactgctggggcctggcgctgaaagggcgagaatggggtcccgacctcggatacatccactcgtgccacaggtaccaggcccagtcacggccgcaatggccactggcttggctgttaatggaaaaggtacctccccttttatggacgcgttaactgcgaatggaacgaccaatattcaaacatctgtaacaggggtaactgccagtaagcggaagttcatagatgataggagggatcagcccttcgacaaacggctgcgtttttcagtgagacagacggagagtgcctaccggtaccgggacattgtggtccgcaagcaagatgggttcacacacattcttctcagcaccaaatcgtccgaaaacaactccctcaatcctgaagtgatgcgggaagtgcagagcgccctcagtaccgccgctgcggacgacagcaaactggtactgctgtcggcagtgggcagcgtattttgctgcggcttagacttcatttacttcatcagaagactcaccgatgaccggaaacgggagagcaccaaaatggccgaagcgataaggaactttgtgaataccttcatccaatttaagaaaccaattattgtggcagtgaatggacccgcaatcggtctcggtgccagcatattacccttgtgcgacgttgtgtgggccaatgaaaaggcttggttccaaactccctacactacgttcggccagagccctgacggctgctccacggtaatgttcccaaaaattatggggggagcatctgctaacgagatgctgctaagtggacgaaagctcaccgctcaggaagcatgtgggaaaggcctcgtaagccaggttttttggccgggaaccttcacgcaggaggtgatggtacgcattaaggaacttgcatcctgcaacccagtggtcctggaggagagcaaagccctggtgaggtgtaacatgaagatggagctggaacaggctaatgaaagagagtgcgaagtgcttaagaagatctggggcagcgcacagggaatggatagcatgttgaaatacctgcagaggaaaattgacgaattctag

SEQ ID NO: 218340 - DNA, 1239 bp, synthetic construct
  misc_feature 1..1239: note = Description of Artificial Sequence: Synthetic coding sequence
  source 1..1239: mol_type = other DNA
atggacctggctaagtctgggatcaaaatcctggttcccaaaagtcctgtcaagagccgcacagctgttgatggttttcagagcgagtcccctgaaaagctggacccagtggaacaagggcaggaggacactgtagctccggaagtcgccgctgagaagcccgtgggcgctctccttggtcctggcgcagaaagggcgagaatgggtagcagaccacgtatccaccccctggtgccccaagtgccaggaccggtcaccgcagccatggcaacaggacttgccgtgaacgggaagggaacctcgccattcatggacgcattaacagctaacggaacaaccaacattcagactagcgtgaccggcgtgacagcttccaaaaggaagttcattgacgatcgaagagaccagcccttcgacaaaaggcttagatttagtgtgcgtcagactgaatcagcttacagataccgcgatattgtcgtcagaaaacaagatgggtttacgcacatcctgctgagcacaaaaagctctgagaataacagccttaatcctgaggtgatgcgagaagtgcagagcgctctctccaccgcagcagcggacgattccaaactcgtactcctgagtgcagttggatccgtgttttgctgtggcctggactttatttacttcatcagaaggctgacagatgaccggaaaagggagagcactaagatggccgaagctattcgaaactttgtgaatacttttattcagtttaagaagccaattatcgtggcggtgaacggacctgccattggactcggggcatccatcctgcccctgtgtgatgtggtgtgggctaatgagaaggcttggtttcagacaccatacactacattcggtcagtcccctgacggatgcagtactgttatgttccctaagatcatgggcggagcgtctgcgaacgaaatgctgctgagtggaagaaaattaactgcgcaggaggcttgcggcaagggactggtcagccaagtgttttggcccggaaccttcacccaggaagttatggttagaatcaaggagctggcctcatgtaaccctgtggtactggaggagagtaaggccttagttaggtgtaacatgaaaatggaactggaacaggctaacgaaagagaatgcgaagttttgaagaagatttggggatccgcgcagggaatggattctatgctgaagtacctgcaacgcaaaattgacgagttctag

SEQ ID NO: 218341 - DNA, 1665 bp, synthetic construct
  misc_feature 1..1665: note = Description of Artificial Sequence: Synthetic coding sequence
  source 1..1665: mol_type = other DNA
atggctagccaagaattcgaagtggaggctatcgttgacaaaaggcaggataaaaatgggaacacacaatatttagtacggtggaaggggtacgataaacaggatgatacatgggagcctgaacaacacctcatgaattgcgagaagtgtgttcatgactttaataggaggcagacagaaaaacagaagaaattgacttggaccactacatctaggatattctccaacaatgccaggaggcgtaccagtagaagtactaaagctaactattccaagaattctccaaagacacccgtgacagataagcaccaccgcagcaagaaccggaagctattcgccgcttcaaagaacgtgagacggaaagccgcttctattctttcagatactaagaatatggagatcattaatagcactatcgaaacgctagcaccagattctccatttgatcataaaaccgtctcagggttccagaagcttgaaaagcttgatcccattgctgcagatcaacaggatactgtggtgtttaaggttactgaggggaagcttctgagagatcctctgtcaaggcccggtgccgaacagactggcattcagaataagacacagatccatcctctgatgtcccagatgtcagggtccgttactgccagcatggccactggatctgcgacacggaagggaattgtcgtcctgattgatcctctggcagcgaacggcaccacagatatgcacacgagtgtcccacgtgttaaaggcggacagcggaacataacagatgattcaagagaccaaccatttatcaaaaaaatgcattttactataaggttgactgaaagcgcctctacgtatagggatatagtagtaaagaaagaagacggcttcacccagatcgtcctgagcacacgttcaacggagaaaaatgcactcaacaccgaggtgatcaaggaaatcgtgaatgccctgaacagtgccgctgcagacgacagtaagcttgtgcttttttctgctgctggctcagtattttgttgtggactggactttgggtatttcgtcaagcacctgagaaataatagaaacactgctagccttgagatggtcgatacaatcaaaaactttgtgaatacattcatccagttcaagaaacctattgttgtgtctgttaatggacccgcaatcggtttgggggctagtatccttcccttgtgcgacctggtatgggctaatgagaaagcctggttccagactccctacaccaccttcggccagtcccctgacggctgcagttctatcacctttccaaagatgatggggaaggccagcgccaatgagatgttgattgctgggagaaagctcacagcaagagaggcttgtgccaagggcctcgtgtcacaggtcttccttacaggaacatttacacaggaggtaatgatccagatcaaggaactggcttcctacaatcctattgtgctggaggaatgtaaggccctcgtgagatgtaacattaagcttgaactggagcaagccaacgagcgggagtgcgaggtcctccgtaagatctggagcagtgcccagggcatcgaatctatgctgaagatacctctcctggggtacaaagcagccttcccgccacgcaagactcagaacgaccagcgatggtgtccatag

SEQ ID NO: 218342 - DNA, 1623 bp, synthetic construct
  misc_feature 1..1623: note = Description of Artificial Sequence: Synthetic coding sequence
  source 1..1623: mol_type = other DNA
atggcatcacaggagtttgaggttgaagctattgtggataaacgacaagacaagaacgggaatacacagtacctagtaagatggaaaggctatgacaaacaggacgacacctgggaaccagagcagcacctcatgaactgtgagaaatgtgttcatgacttcaacagacgacagacagagaaacaaaaaaagctgacatggacaacgacttcgcggatattctctaataacgcccgtagaagaacctcacgtagcacaaaggcgaattacagcaagaactcccccaagacacccgtcacggacaaacatcataggagcaaaaacaggaagttatttgcagcctctaagaatgtccggagaaaggctgctagcatactgagcgatacaaagaatatggaaattatcaattccactatcgagacattggctcctgatagtcccttcgatcacaaaacggtatctggcttccagaagttggagaagctggatccaatcgccgctgatcagcaggacacggtagttttcaaagtcacagagggtaaacttcttcgagaccctctcagcaggccgggtgccgaacagaccgggattcagaacaagactcagatccaccctctgatgagtcagatgtctgggtctgtcacagccagtatggccaccggcagcgccactcgaaaaggtattgtcgtcctcatcgacccacttgccgctaacgggactacggacatgcacacatctgtacccagggtgaaagggggtcaacgaaacatcaccgatgactccagggatcagcccttcatcaagaaaatgcactttactattaggctgacagaatccgcctccacgtaccgggacatagtcgtcaaaaaagaagacgggttcacacaaatcgtgttgagcacaaggagtaccgagaagaacgctctgaatacggaagtgattaaggagattgtgaacgccctgaatagcgccgcagcagatgactccaagctcgtactcttcagtgccgctggcagtgtgttttgttgtggcctggactttgggtactttgtgaaacacctccgaaacaatcgcaacactgcttccctggagatggttgacaccatcaagaactttgtgaatacatttatacaattcaaaaagccaatcgtagtatccgttaacggtccggctatcggactaggcgctagcatactgcccctgtgtgacctggtgtgggcgaatgagaaagcttggtttcagaccccatatacgaccttcggacaaagccctgacggctgctcatccattacttttcccaaaatgatgggtaaggcttccgcaaatgagatgttgatcgctgggagaaaactgacagcaagggaggcttgtgctaaagggctggttagccaggtgtttctaaccgggacttttactcaagaggtaatgatccagattaaggagctcgcatcatacaacccaattgtgctcgaggaatgtaaggctttggtaaggtgtaatattaaactggagctagagcaggccaacgagagagagtgcgaggtgcttcgtaaaatctggagtagtgcccagggtatcgagtctatgctgaaatatgttgagaacaagatagacgaattctag

SEQ ID NO: 218343 - DNA, 1170 bp, synthetic construct
  misc_feature 1..1170: note = Description of Artificial Sequence: Synthetic coding sequence
  source 1..1170: mol_type = other DNA
atgggcaaaatggcagccgcagtgggctctgtggctaccctggccacagagcccggagaggacgcatttagaaagctgttccgcttttaccggcagtctaggccaggcacagcagacctggaaggggtgattgatttttcagccgctcatgccgcaagggggaaggggccaggggctcaaaaggtgataaaaagccagctcaacgtgtctagcgtgtctgagcagaatgcttacagggcgggactacagccagtttcaaagtggcaggcatatgggttaaaaggctatcctgggtttatatttatacctaatccctttttgcctggctaccagtggcattgggttaagcaatgtctgaagctgtacagtcagaagcccaatgtatgtaacctggacaagcatatgtcaaaagaggagacccaggatttatgggaacagagcaaggaattcctgcggtacaaagaggcaactaagagacgccctcgaagtctgctggagaagctgcgctgggtcactgtaggataccattataactgggacagcaagaagtacagcgctgaccactacactcctttcccttctgatttgggattcctctctgaacaagtggccgcagcatgcggattcgaggatttccgcgctgaagccggaatcctcaactactaccgactagatagtacgttagggattcacgtcgatcgctctgagctagaccactctaagcccttactcagctttagttttgggcagagcgccattttcttactgggcggtctgcaaagggacgaagctccaacagccatgtttatgcacagcggcgacattatgatcatgagcggattcagccgtctcttaaatcacgccgtgcccagggttctccccaatcccgaaggcgagggcctgccacactgtctcgaggcgccattgccggcagtactgcccagagacagtatggtagagccatgctcaatggaagattggcaggtctgcgccagctatttgaagaccgccagagtaaacatgacagtgcgacaggtactcgcaaccgatcagaacttccctctggaacccattgaggatgagaagagggatatctctaccgaaggattctgtcacctcgatgatcagaactccgaggtgaagcgggcacgaatcaaccctgactcttag

SEQ ID NO: 218344 - DNA, 921 bp, synthetic construct
  misc_feature 1..921: note = Description of Artificial Sequence: Synthetic coding sequence
  source 1..921: mol_type = other DNA
atgagatctgccgcagtgcttgccctgcttctctgtgccggacaggtgaccgctcttccagtgaatagcccaatgaacaagggggataccgaagtcatgaaatgcatagtggaagtgatctcggataccctaagtaagccatcccccatgcccgtgagccaggagtgcttcgagactctgagaggcgatgaacggattctgagtatcctgaggcaccagaacctacttaaagagcttcaggacctagccctgcagggagccaaggaacgtgcccatcagcagaaaaaacatagcggcttcgaggacgagctctcagaggtactcgaaaaccagtccagtcaggctgaactgaaaggccgttcagaagctttggccgtagacggtgcaggcaagcccggagctgaggaagcccaggaccccgagggaaaaggcgaacaggagcactcccagcaaaaggaggaggaagaggagatggctgtggtcccacagggcttgtttcggggaggcaagagtggagagctggagcaagaagaagagaggctctctaaggagtgggaggatagcaaacgctggagcaaaatggatcaactcgcaaaggaacttacagcagagaagcggctggaaggccaagaagaagaagaggataaccgcgactctagtatgaaattatcgtttcgagcacgcgcttatgggtttcgcggacccggacctcagctgagaaggggatggcggcctagctccagggaagacagcctggaggccggtctccctctgcaggtgcggggttatccagaggaaaaaaaggaggaagaggggtctgcaaaccggaggccagaggaccaggagctggaatcactcagcgcaattgaggccgagctcgagaaggtcgcacaccaactacaggcgttgagacgaggctag

SEQ ID NO: 218345 - DNA, 2034 bp, synthetic construct
  misc_feature 1..2034: note = Description of Artificial Sequence: Synthetic coding sequence
  source 1..2034: mol_type = other DNA
atgcagcctacgctgttgctgtcgctcttgggggctgttggcttagccgctgtgaacagcatgccagttgacaacaggaatcacaacgaggggatggtgacccgctgtatcatcgaggtcctgagcaatgccctttctaagagtagcgctcctcctatcacccctgagtgtagacaggtgcttaaaacaagccgaaaggacgttaaagataaggaaacgaccgaaaacgagaacacaaaattcgaagttaggctgttgagagatccagccgacgctagcgaggctcatgagtccagtagccgtggcgaagccggtgcccctggcgaagaagatattcaggggccaacaaaggccgatactgagaaatgggcagaggggggagggcactctcgcgaacgtgccgatgaacctcagtggtccttatacccaagcgacagccaagtaagcgaggaggtgaaaacaagacactccgaaaagtctcaacgggaagacgaggaagaagaagagggggaaaattaccagaaaggcgaacgcggtgaggatagtagcgaggagaaacatctcgaggagcctggcgagacccagaacgcattcctgaacgaacgaaagcaagcaagcgcgataaagaaggaagaactggtcgcacgctccgaaactcacgccgctggacattctcaggaaaaaactcactctcgtgaaaagtcttcacaggagagcggggaggagactggctcgcaggagaatcacccacaggaatcgaagggacagcctcgcagccaggaggaaagtgaggagggagaagaagatgccacctcggaagtggacaaacggaggacccgacccagacaccatcatggcaggtccagacccgatagaagcagccagggaggctccttgccttctgaggaaaagggacacccacaggaagagtccgaagaatccaatgtaagcatggcaagtcttggggaaaaacgggatcatcactccactcactatcgcgcatctgaggaggaacctgagtacggtgaggagattaagggttatccaggcgtccaggcacccgaggaccttgaatgggaaaggtaccgcggtcggggaagcgaagagtatagagcccctagaccccagtcggaagagagttgggacgaggaggacaagaggaactacccgagtttggagctggacaagatggcccacgggtacggcgaggagtcagaggaggagagaggcctggagcccggtaaaggcaggcaccataggggcagaggcggagaaccgagggcttatttcatgtcagatactcgggaggagaagagattcctgggcgaggggcatcacagagtacaggaaaaccagatggacaaggcgaggcgtcacccccaaggagcctggaaggaactggataggaactatttgaactacggagaggaaggggctcccggaaaatggcagcagcagggagatctccaggacaccaaagagaatcgtgaagaagccagatttcaggataaacaatattccagccaccataccgctgagaaaagaaaacgactgggggaactttttaacccctactacgacccactgcagtggaaaagttcccattttgagaggcgcgacaacatgaacgacaatttcctggagggagaagaggagaatgaactcactttaaacgaaaaaaacttcttcccagagtacaattatgactggtgggagaaaaagccgttttccgaggatgttaactgggggtacgagaagagaaatttagctcgagttcccaagttggatcttaagcgccagtatgaccgggtggcccagttggaccagcttctgcactacagaaaaaagtctgcagaattccccgatttctatgattccgaagagcctgtcagtacccatcaggaagcagaaaacgaaaaggaccgggctgaccagacagtactcacagaggatgaaaagaaggagttagagaacctggccgcaatggacctggagttgcaaaaaatcgccgagaagtttagccagcggggatag

SEQ ID NO: 218346 - DNA, 870 bp, synthetic construct
  misc_feature 1..870: note = Description of Artificial Sequence: Synthetic coding sequence
  source 1..870: mol_type = other DNA
atgcccgtcgacaacagaaatcacaatgaaggcatggtgactcgttgtatcatagaggtgctgagcaatgcgctgagtaaatcttccgcgcctcccatcacaccggagtgccgacaggtgctaaaaacttctcgtaaagacgtcaaagacaaggagacgactgagaatgaaaatacaaaattcgaggtgcgtctcctgcgagaccccgcagacgctagtgaggctcacgagagctcaagtaggggggaggcaggcgctcccggtgaggaggacatccagggcccaacaaaggccgatacagaaaaatgggctgagggagggggacattccagggaacgcgctgacgaaccccagtggtcactgtatccaagcgattcccaggtgagcgaggaggttaagactcgtcacagtgagaagtcccagcgtgaggacgaagaggaggaagaaggagagaattatcaaaaaggtgaaagaggagaggactcctccgaggagaagcatcttgaggaaccgggagaaacccagaacgcgttcctgaacgagaggaaacaggcaagcgcgatcaaaaaagaggagctggtggctcgcagcgaaacacacgccgcaggccactcgcaggaaaaaacccatagtagggagaaatcttctcaggaatctggtgaggagaccggatcacaggaaaaccacccccaggagtctaagggacaaccacgttcccaagaagagtctgaggagggtgaagaggatgccacaagcgaggtcgataaaagaaggaccaggcctcgtcaccaccacggcagatctagaccggatcgttcttcccaggggggtagtttaccttctgaagaaaaaggccacccacaggaatag

SEQ ID NO: 218347 - DNA, 1806 bp, synthetic construct
  misc_feature 1..1806: note = Description of Artificial Sequence: Synthetic coding sequence
  source 1..1806: mol_type = other DNA
atgccagaaagagaactgtggcctgctggcaccgggtccgaaccggtgactagggtcggctcatgcgactcaatgatgtcttccaccagtaccagatccggatcaagcgattcttcctacgatttcctttccaccgaggagaaagaatgtttgctgtttttggaagaaacaattggcagcttagatactgaggccgacagtggactttcaaccgacgaatccgaacctgctaccacaccccgagggttccgcgctctccccatcactcaacctactccacgaggaggcccagaggaaaccatcacccagcagggaaggacacctcgaaccgtgacagagtccagcagctcacaccctccagagcctcagggtctggggcttaggagtggaagctattctctccccagaaacatacacattgcccgaagtcagaactttaggaagtcgaccacacaggcttccagccacaatcctggcgaaccaggtaggctcgctcccgagcctgagaaggaacaggtgagccaatcttctcagccccgacaagcccctgctagcccacaggaggcagcacttgaccttgatgttgtgcttattccacctccggaagcctttagggacacgcagcctgagcagtgcagagaagcgtctctaccggaagggcctgggcagcagggccataccccccaactgcacactcccagttctagccaagagagggagcaaacgcccagtgaggccatgtcacagaaggccaaggaaacagtcagcactcggtacacacagccacagcctccgccagcaggtctgccccagaacgccagagcagaggacgcccctctgtcaagtggggaagacccaaacagccgacttgcacctttgacgacccctaaaccgagaaagctgccaccgaacatcgtgctgaagtcatcccggagcagcttccactctgatccacagcactggctctcccgacatacagaagctgcaccaggtgactccggactcattagttgttccctacaggagcagcggaaggctagaaaggaagcactcgagaaactgggcctgcctcaagaccaggacgaacccggactgcacctgtccaagcctaccagttcgattaggcccaaggagacccgggcacagcacttgtccccggcacccggtctggcccagcccgcagccccagctcaggcttccgccgctattccagccgctgggaaagccctggcacaggccccagcacctgcacccggtcccgctcagggccctctcccgatgaagagtcctgcgccaggaaatgtggccgctagcaagtccatgccgatatccattcctaaagccccacgtgctaatagcgctctgactccacctaagcctgagagcgggctgacgctccaggaaagcaatacccccggacttagacagatgaatttcaagtccaatacactcgaacgctccggcgtggggctgtcctcatacctgtcaaccgaaaaggacgccagtccgaagacttcaactagtttagggaagggtagtttcctggataaaatctccccttccgtgctgaggaactcccggcctagacctgccagccttggcacaggcaaggatttcgccggtattcaagtgggaaagttggcggacctcgaacaggagcagagcagcaaaaggctgtcttatcagggtcagagccgtgataagctgccacgccctccatgcgtgtctgtgaagatttcacctaagggtgtgcccaacgaacatagacgggaggctctgaagaagcttggcctgttaaaagaatag

SEQ ID NO: 218348 - DNA, 1068 bp, synthetic construct
  misc_feature 1..1068: note = Description of Artificial Sequence: Synthetic coding sequence
  source 1..1068: mol_type = other DNA
atgagccagaaggcaaaggaaactgtctcgactagatacacccagccgcaaccacccccagctgggctcccccagaatgccagggctgaagatgccccactgtcctcaggcgaggatcctaatagtcgattggcgccacttactacccctaaaccacggaagctgcctcctaatattgttttaaaatcctctcgtagctcctttcactcagatcctcagcactggctgtctaggcacacagaagcggctccgggtgattccggtcttatctcctgttccctccaggagcagaggaaggcccgtaaagaagcgctcgagaaactggggctgccacaggaccaagacgagcccggactgcatctgagcaaacccactagctccattcggcctaaagagactcgagcccagcacctgtctcccgctcctggcctcgcgcaacctgctgcgccagcacaggcctccgccgcaatccctgctgctggaaaggccctggcccaggcccctgctcctgccccagggcctgcccagggtcccctgcctatgaaatctcctgctccagggaatgtggctgcttccaagagtatgcctatttcgattcccaaggcacctagagctaattctgcactgacccccccaaaacctgagtccgggttgaccctccaagaatcgaatactcccggtctgagacaaatgaactttaagtcaaacaccttggaacgcagcggagtgggcctgtcatcttacctctctacagaaaaggacgccagtcctaaaacctcaacatccctgggcaagggaagcttcctggacaagatttcaccttctgtgctccggaactcccggccacgacccgcaagtttgggtaccggcaaggattttgccggtattcaggttggcaagctcgccgatttagaacaggaacagagctctaagcggctgtcataccaagggcagtctcgggacaaactgccaagaccaccttgtgtgagtgttaaaatcagccccaagggggtgccgaatgaacatagacgtgaagccctcaaaaagctcggtctgctgaaggagtag

SEQ ID NO: 218349 - DNA, 1050 bp, synthetic construct
  misc_feature 1..1050: note = Description of Artificial Sequence: Synthetic coding sequence
  source 1..1050: mol_type = other DNA
atggcagggcctgccatacacaccgctccaatgttgtttctcgttctgctgctgccactggaattgagcctcgcaggggctctggcccctgggactccagccaggaacttgccggaaaaccatatcgatctgccaggcccagcgttgtggacacctcaggcatcccaccatcgaaggagaggccctgggaagaaagagtggggtccaggcctcccgtcccaggcacaagacggggcagtggtaacagccaccagacaggcatctagactgcctgaggccgagggcctgctacctgagcagtcccctgctggccttctgcaagataaggaccttctgctgggcctggctcttccatacccagagaaggaaaaccggccaccaggatgggagcgtacgaggaagcggtctagggagcataagcgccgacgcgaccggctccgcctacaccaaggtagggcattggttcgcggtccctcgtccttgatgaagaaggccgagctcagcgaggcccaggttctggatgcagctatggaggagagctctacaagtttggctcccaccatgttctttctgacaacgttcgaagcggctcctgccacagaggaatccttgattctccccgtgacttcgcttcgtccacagcaggctcagcctcgcagcgacggagaggtcatgcccacattggatatggcgcttttcgattggacggattacgaggatttaaagccagatggatggccatctgccaaaaaaaaagagaagcatagggggaagttgtccagcgacggcaatgagaccagccctgcagagggcgaaccatgtgatcaccatcaggactgtttacccggtacctgttgcgacctgagggagcacctttgtacacctcacaatcgcggactcaacaacaagtgctttgacgactgtatgtgtgtagagggtttgcggtgctacgctaaattccaccggaataggagggtaaccagacgaaagggtcgctgcgttgaacctgaaactgcaaacggcgaccaaggaagtttcataaacgtgtag

SEQ ID NO: 218350 - DNA, 477 bp, synthetic construct
  misc_feature 1..477: note = Description of Artificial Sequence: Synthetic coding sequence
  source 1..477: mol_type = other DNA
atgtgcttctcacgggctgacgccgcagataattaccccttcggaacttgtcagcagaggaaactgttcccacacttccaccccccaaacctcattggaaacaaattcgtacctctgcggggaagtccccaccgcggtcctgggtgttactttagtgacgaaatgaccccacatgctgggcgataccagaaagtttctcctcagcaggagaagcacaagcagaatttcgcacccttcaacgttctggtgccgagatttaagaactaccccaaagatacttactatcctagcccgggtgcctataatcccgaaaagaagccaccccctaaaatcgcttggccaatgaagtttggatctcccgattgggcacaggtgccttgcctccagaagagaaccttgaaggctgagctcagtaccgataaggacttccggaaacatcggaaccgcgtggcctacctatcgctctactataactag

SEQ ID NO: 218351 - DNA, 576 bp, synthetic construct
  misc_feature 1..576: note = Description of Artificial Sequence: Synthetic coding sequence
  source 1..576: mol_type = other DNA
atgtgcttttcaagggccgacgccgctgacaattatcctttcgggacatgtcagcagcgaaagctgttcccacactttcatccaccgaacttaatcggcaacaagttcgtacctctgcgagggagtccacaccgagggcctggttgctactttagcgacgggtatgggctcgcttatgatctgtctaaaattcccactagcatcaagggctacacccttggtgccaggaccgctgtacgatttaagcccatccagaaagagatgactcctcatgctggcaggtatcagaaggtctccccccagcaggaaaagcacaaacagaatttcgcacctttcaatgtgctcgtccctcgttttaagaactaccctaaggacacatactacccctctcctggtgcctacaaccctgagaagaagcctccccctaaaattgcgtggcccatgaaatttggatcccccgattgggcccaagttccctgtctgcaaaagcggacgctgaaggctgaactgagtaccgacaaggacttcaggaaacatagaaacagggttgcctatctgtcattatactacaactag

SEQ ID NO: 218352 - DNA, 2055 bp, synthetic construct
  misc_feature 1..2055: note = Description of Artificial Sequence: Synthetic coding sequence
  source 1..2055: mol_type = other DNA
atgtgggtgcttctgcgctccggttatcccctcagaatattgctccccttgcgaggtgaatggatgggaagaaggggactcccacggaatctcgccccagggcctccaagaaggaggtaccgtaaagaaaccctacaggccttagacatgccagtgctgcccgtgacggccactgagatccggcagtacttgcgcggacacggcattcccttccaggacgggcactcatgcctgagagcacttagcccattcgcagaaagctctcagctgaagggacagaccggcgtgacaacgtctttttcgctctttattgacaagaccaccggccacttcttatgcatgactagcttggcggaaggaagctgggaagatttccaggcgagcgtagagggaagaggcgacggtgccagggaggggtttctcctgtccaaagctccagagtttgaggattctgaagaagtcaggcggatatggaaccgcgctattcctctgtgggaactgccagaccaggaggaagtacaattagccgacacaatgttcggactcacaaaagtaacagatgatacactgaagcggttcagcgtaagatacttgcggcctgctcggtctctagtttttccatggttttcccctggaggcagcggactgcgcggtctcaagcttctcgaggcaaagtgccagggcgacggagtgtcctacgaagaaacgaccattcctcgaccctcggcttatcacaacctgttcgggctcccactgattagccgtagagacgcagaggtcgttctgacgagtagggagctggactccctggccctgaatcagagtacagggctgcctactctgacactgccacggggtacaacctgcctaccccctgccctgttaccctatctggaacagtttcggagaatcgtgttttggcttggagacgacctgcggtcctgggaggcagctaaactcttcgcccgtaaacttaatcctaaaagatgcttcctcgtgcgtcctggcgaccaacagccacgacccttggaagctcttaacggtggttttaacttatctcggatccttagaacagctctgcctgcatggcacaagtccatcgtctcattccggcagctgcgtgaagaggttcttggtgaattatcaaacgttgagcaggccgcaggcctgcgatggtctaggttccctgacttaaacaggatactcaagggacacagaaagggggaactgaccgtgttcacaggacccaccggtagtgggaagactaccttcatcagcgaatatgctctggatctgtgtagccagggggttaacacactgtggggctccttcgaaatatcgaatgtgagactcgcgagggtgatgcttactcagtttgctgaggggagactggaagatcagctagacaaatacgaccattgggctgacaggttcgaagatctacccctgtactttatgacgtttcacggccagcagtccattcgaacggtaatcgacacgatgcagcacgccgtgtacgtttacgatatttgccacgtaattatcgacaatctccaattcatgatgggccacgagcagctcagcaccgatcgcattgcggcacaagactatattattggggtgttccgaaagttcgcaacagacaacaattgtcacgtaaccctagtgattcatcctagaaaagaggatgatgataaagagttacagactgcgtctattttcggaagcgccaaagcctcccaggaagccgacaacgtcctgatcctccaggaccgaaaattagttactggacccggaaaacgctacctacaggtcagcaaaaaccgctttgatggagatgttggggtgttcccccttgagtttaataaaaattcactcactttctctattcctcctaagaacaaggctcggctgaagaaaattaaagacgatacagggcctgtggctaaaaaaccgtcttctggcaagaagggggctactacacagaatagcgagatctgtagcggacaggccccaacaccagaccagcccgacacaagcaagcgtagcaaatag

SEQ ID NO: 218353 - DNA, 1749 bp, synthetic construct
  misc_feature 1..1749: note = Description of Artificial Sequence: Synthetic coding sequence
  source 1..1749: mol_type = other DNA
atgtgggtcttattgaggagcggttatccattgaggattttactcccgcttcgcggagaatggatgggacgacggggactccctagaaatctggcccctggcccacccaggcggaggtacaggaaagaaacgttacaagccctcgatatgccagttctgcctgtgactgctactgaaattcgacagtatcttcgcggacatggcatacccttccaggacgggcattcctgccttcgggcattaagcccattcgcagagtccagtcaactcaaaggacagaccggggtgactacctcattttcattgtttattgacaagaccactggacattttctctgcatgacctctctggctgagggaagctgggaagattttcaggcttcagtggagggacgcggtgatggagccagggagggttttctgctatctaaagcccctgaattcgaagatagcgaagaggttcggcgaatctggaacagagcaatacccctgtgggaactgcccgaccaagaggaggtacagctggctgacaccatgttcggcctgaccaaggtgactgacgataccttaaaacgcttttccgtgcgatacctccgacccgcacgcagtctcgtgttcccatggttctcccccggtggaagtgggctacggggtctgaaacttctggaagcaaagtgccaaggtgatggggtctcttatgaagagacaactataccgaggccgtctgcatatcacaatctttttggcctcccgttgatcagcaggagagatgccgaagtggtgctgacgagcagagagctggactcactcgctctgaaccaaagcactggactgcctaccctaaccttgccacggggaaccacctgccttcctcccgctctgcttccctatttggaacagtttcgcaggattgttttctggctgggggacgacctccgcagctgggaagccgcaaaattgttcgcacggaagctgaatcccaagcggtgcttcttggtacggccaggcgatcagcagccccgacctctggaagccctgaatggaggctttaacctgtctcggattttgaggactgcactgcctgcctggcacaaatctattgtctcatttcggcagctgcgcgaagaggtgctcggagagctgagcaatgttgagcaagcagctggactccggtggagtcggtttccagatcttaacaggattctcaagggacacaggaagggcgagctgaccgtattcacaggcccaactgggagcggcaaaactacatttatcagtgagtatgcactggatctgtgctcccaaggagtgaatactctgtggggtagctttgagatctctaacgtcagactcgctagagtgatgttgactcaattcgctgagggtcggttagaggatcagctggacaaatatgatcattgggcagatcggtttgaggatcttcccctctatttcatgactttccacggccagcaatctatccgaacagtgatcgacaccatgcaacatgccgtttatgtgtacgatatatgccacgtgatcatagacaacctacagttcatgatgggccacgagcagctgagcaccgaccgcattgctgctcaggactacattatcggcgtgttccgcaaatttgccacggataataactgccacgtcacactggtgatccatcctaggaaagaggatgatgacaaagaactgcagaccgctagtatcttcggctcagccaaggttagtgggctgtag

SEQ ID NO: 218354 - DNA, 1029 bp, synthetic construct
  misc_feature 1..1029: note = Description of Artificial Sequence: Synthetic coding sequence
  source 1..1029: mol_type = other DNA
atgccgttcctattaggacttcggcaggataaagaggcttgcgtcggtacgaataaccagtcctacatttgcgatacaggccactgctgtgggcagtctcagtgctgcaattattactacgagctgtggtggttttggctcgtgtggaccattattattatcctgagctgctgttgcgtctgccaccacagacgagcaaagcacaggctgcaggcccagcagaggcagcacgagatcaacctaatcgcatatagggaggcccacaattattccgccctccctttctactttagattcctcccgaactatctgctgccaccttatgaggaggtcgtcaatcgccctcctacccctcccccaccttacagcgctttccagctgcagcagcagcagctgctccctccccagtgcgggccagcaggcggttctccacccggaatcgaccctactaggggaagccagggcgcacagtcaagtcccttgtctgagccatcacggagctcaacgagacccccttcgatagccgacccagacccatcagatttgcctgtcgaccgggcagcaacaaaagcccctgggatggagcccagcggctccgtggccggactgggggagctggaccctggcgcatttttggataaagacgctgagtgtagagaggaactgttgaaggacgacagcagtgaacatggggcaccagattcaaaggagaagacccctgggcgtcaccggagattcaccggggattctggaattgaggtatgcgtttgcaacagaggccatcacgatgatgaccttaaagaatttaataccctgatagatgatgcccttgatggacccctggacttctgcgattcttgtcacgttcgaccacctggcgacgaagaggaaggattatgccagtcttcggaggagcaggcccgtgagccgggacatccccacttaccacgcccaccggcttgcctgcttcttaacaccataaacgaacaggactcccccaattcccagtcctcatcatcccccagttag

SEQ ID NO: 218355 - DNA, 1092 bp, synthetic construct
  misc_feature 1..1092: note = Description of Artificial Sequence: Synthetic coding sequence
  source 1..1092: mol_type = other DNA
atggagagaaggcggttactggggggaatggcactgcttctgctgcaagcactgccaagcccgctttcagccagagcagaacctccacaggacaaggaagcttgtgttggaactaacaaccagagctacatttgtgataccgggcattgttgcggccaatcccaatgttgtaattactactatgagctttggtggttctggttggtctggaccattataatcatcttgtcatgctgctgcgtatgccaccaccggagggccaaacacaggctccaggcgcagcagcgacagcatgaaatcaatttgatcgcttatcgggaggcacacaactacagtgccctgcccttctactttcggtttctcccaaattacttgctccccccatatgaagaggtagtgaaccggccacctacaccaccacccccttactccgccttccagcttcaacagcagcaactgctgcctcctcagtgtggacctgcaggcggatctcctcctggtatcgacccaacaagaggtagccaaggcgctcagagtagcccacttagtgagccatcacggtcctccacccgcccaccaagcattgcagacccagacccttcagacctgcctgtggacagagcggcaacaaaagccccaggcatggaacccagcggttctgtcgcgggactcggagagctggaccccggagcatttcttgataaagacgctgaatgtcgagaggaattgctcaaggatgattcctccgagcatggggcaccagactccaaagaaaagactccgggacgtcacaggcgctttaccggagacagtggtattgaggtatgcgtgtgcaaccgcggacaccatgacgacgacttaaaagagttcaataccttgattgatgacgctttggacggtcctctggatttctgtgatagctgccacgttagacccccaggcgacgaagaagaaggactgtgtcaatcatccgaagaacaagctagagagccgggacacccccacttgcctcgcccacctgcctgtctgctcctaaacaccataaacgagcaggactccccgaactctcagtccagctcttcgccctcatag

SEQ ID NO: 218356 - DNA, 1056 bp, synthetic construct
  misc_feature 1..1056: note = Description of Artificial Sequence: Synthetic coding sequence
  source 1..1056: mol_type = other DNA
atggccaccgatgtgcagttagccgattatcccctcatgagcccaaaagcagagctcaaattggaaaaaaagagcggcaggaaacccaggtcgccccgagatagcggccctcagaaagagctggttataccagggatcgttgactttgaacgcattaggcgagctctgaggaccccaaaaccgcagacaccaggcacttattgtttcggacggctgagtcaccactctttcttctcccgacaccatccacacccccagcacgtaacccacatccaggacctgaccgggaaacccgtctgtgtggtaagggattttccagctccactgccagagtccactgttttcagcgggtgccaaatggggattcctactattagtgtgccaatcggggacccccaatccaatcgcaacccccagctatccagtgaggcatggaagaaggagctgaaggaattggcctcaagagttgccttcttaaccaaggaagatgaactgaagaagaaggagaaggaacaaaaggaggagcctctgcgggagcagggcgctaagtacagcgctgaaacaggccgactgatcccagccagcactcgggcagtcggcagaaggcggagccatcagggacagcagtcccagtcctctagccgccatgaaggggtgcaagccttcctgctgcaagatcaggaattgttggtgctggaattgctctgtaggattctcgaaacagatcttctgtctgctatccaattttggctgttatatgcaccccctaaggagaaagatctggccctgggactgctgcagactgctgtcgcccagctcctaccacagccactagtaagcataccaactgagaaactgctttcccagttacctgaggtgcatgagcctccacaggaaaagcaggagccaccgtgcagtcagtctccgaagaagacaaagatttcccctttcacaaagtctgagaaacccgagtacatcggtgaggcccaagtactccagatgcactcctcacagaacacagaaaagaagacatcaaaacccagggccgagtcttag

SEQ ID NO: 218357 - DNA, 321 bp, synthetic construct
  misc_feature 1..321: note = Description of Artificial Sequence: Synthetic coding sequence
  source 1..321: mol_type = other DNA
cagtgcgctgagctgtggggtagtgtgcggaaaaattctgacaagttcttactatcaaggaaccttcacccctctaaagaagaataccgtcaacagataaagactccgggtgaggagtggagacagatactcgtgcactggcggtccagttctcccccagatgcttttaagccggaacacagggaagaggacatagaagccgaaggtagagagttgcggggacctaacacttgtacatgccttgcccaggagcagccacaggggttcagaggtgtgtctgtaagcacaacgtttactgcagttcctgatagtctcccatag

SEQ ID NO: 218358 - DNA, 753 bp, synthetic construct
  misc_feature 1..753: note = Description of Artificial Sequence: Synthetic coding sequence
  source 1..753: mol_type = other DNA
atggctactgacgtgcaactggccgattatcctcttatgtcccccaaagccgaactgaaactggagaaaaagtccggacgcaagccacgcagccctagagactccggtccacaaaaggagctggttatccctggcattgtcgactttgaacgcatccgacgggcactacggactcccaaaccccagacgcccggtacctactgcttcggcaggctctctcaccacagcttcttctcccgtcaccatccacaccctcagcacgtgacacatatccaggacctcaccggtaagccagtatgtgttgtgcgagattttccggcaccccttcctgagagcaccgtcttttcaggctgccagatgggcatcccaacgatctcggttccgataggagacccacagtcaaatcggaatcctcagttgagctctgaagcttggaaaaaggaactcaaagagctcgctagtcgggtggcctttctgacgaaggaggatgagttgaagaaaaaggagaaggaacagaaggaggagccgctgagagagcagggcgctaagtattcggctgagaccggccgtcttattcctgccagcactcgcgctgtgggacgacgacgcagccaccagggtcagcagtcgcagagtagctcccgccatgagggtgtgcaggcgttcttactgcaggaccaagaactgttaaagaagacatctctttgggatagttgccgccaacagtggttgtcgagtttccccagcccttag

SEQ ID NO: 218359 - DNA, 951 bp, synthetic construct
  misc_feature 1..951: note = Description of Artificial Sequence: Synthetic coding sequence
  source 1..951: mol_type = other DNA
agtcctaaggcagagctgaagctggaaaaaaagagtgggaggaagccccgtagccccagagattctggccctcagaaagagctggtaattcccggtattgtggactttgaaagaattaggcgcgctttgagaacccctaaaccacagacacctggcacttactgttttggcagattgtcacatcacagtttcttttcaagacaccatcctcatccacaacatgtgacccacatccaggatctgacagggaagcccgtatgcgttgtaagggattttccagcgcctcttccagagtccactgtgttctcaggctgtcaaatggggatccccacaatctccgtgcctattggggatccccagtcgaataggaacccacagctgtcaagcgcctggaagaaggagctgaaagagctggcttcgcgggtagcctttctgacaaaagaggacgagctcaaaaagaaggaagacaccacctccttgaactggaactgcaagagcagaaggccccaagcccctggcctgtccggaacagatttgggcgcagcagagctgggaattaagaaagagcagaaggaagaaccactgcgcgaacagggggcaaagtactcggccgagacagggcgtctcattccagcatcaaccagggccgtgggacgtaggcggtcacatcaggggcagcaatcacagtcctcctcccggcacgagggtgtgcaagcgtttctgttgcaggaccaggagctgctagggggtttgacctcccctggagcaccagtctccgatccagggaacagacttgccaaaagaaacccagttttggccgcattgaggagcgcccagggaaaaagacccagaagcggcacaccagcagatagctcaggctcggccccttcccctgcccctagcctgcacccgtataggaaggctcccaagccggcttcaaggagcgcctag

SEQ ID NO: 218360 - DNA, 498 bp, synthetic construct
  misc_feature 1..498: note = Description of Artificial Sequence: Synthetic coding sequence
  source 1..498: mol_type = other DNA
atgtatatatcaccaaaggcggagctcaagctcgaaaagaagagtgggagaaaacctcgctctccgagggacagcggccctcagaaggagctggttatccccggaatcgtggacttcgaaagaatccggagggccctgaggactccaaaaccccagacacctggtacctactgttttggtagattgtcacatcactccttcttttctcggcatcaccctcacccccaacacgtcacccacatacaggatttgaccggcaagcccgtgtgtgtggttcgggatttccctgcgccactccccgagagcacagtgtttagcggttgccagatgggaatacctaccattagcgttcctattggcgatccacagtccaatcgaaatccacagctctccagtgcatggaagaaagaactgaaagaactcgccagtcgagtcgcgtttctaactaaagaagatgagctgaaaaaaaaggaggtcggggcagagcaccgaagctag

SEQ ID NO: 218361 - DNA, 672 bp, synthetic construct
  misc_feature 1..672: note = Description of Artificial Sequence: Synthetic coding sequence
  source 1..672: mol_type = other DNA
atgttgtgggtccagcgtaaacggaggagaaaggagacaagtgagtgcccgtcagacaaagacaagtcacctgagtcacataaggcaaagaatgagtcctggatcaagtcccacttctcgagactgtccgaagagaagctggctcttgataataacgctagcgccagcggaaatgcaactcaaaccgaatctggttccgaggaagtgtcaagcactgtgcacattgaaactttcactacccgccacggggaagtcgggtccgcactccatcgggaatccttcacaagccgtcagaagacatccgggccatccgtcatccaggaaatccaccaggaatcaggaaaggctccaagcaccgacgaagctacatgggccgctgtcgccgcatgtacaaaggagatcgatacacagggccgtcacctggctcacagcatgcttcagagggcgatcgcataccaacacagcgggcatcttgaatcaaaagatatcaaccaggaagaacttcgcgctctggaggaggtggagatgaagttgcagaagaactttctcacccagcgggagaataccattgctggcgctaaccatacacacacattctatggccactctcatcactctcaccatggccacccgagtcatcagtcccatagcctgccgaacaggcgacactag

SEQ ID NO: 218362 - DNA, 399 bp, synthetic construct
  misc_feature 1..399: note = Description of Artificial Sequence: Synthetic coding sequence
  source 1..399: mol_type = other DNA
atgggaaggacttggtgcggcatgtggagaaggagaagacccggtcgcagatctgctgtgccccgttggccacacctgtcctctcagagtggcgtcgaacccccagatcgctggaccggtacaccagggtggccctccagagatcaagaggccccaggcagcatgatgccgccagcagccgcacagccatccgcccacggcgcactggttcctcctgcaacagcacacgagcccgtggatcacccagcgttgcactggctggcgtgctgctgctgcttgagtctccccggacagcttcctctagctattcggttaggctgggatctcgatctcgaggccggtcccagcagcggtaaattatgcccccgagcccgaagatggcaacctctcccttcatag

SEQ ID NO: 218363 - DNA, 537 bp, synthetic construct
  misc_feature 1..537: note = Description of Artificial Sequence: Synthetic coding sequence
  source 1..537: mol_type = other DNA
atggcctcttttctggtctggccactccgcactgcattaaggggcggtaagagttgggcagggcctggcgtcggctgtggcggagatggcgcacggggtgggggagagctatcattaagcaatttagacctccctggggcaggagaagctgggctggaacaccatcctttactaggacacctgttcatctctgcggtgccaaggtggcctcacctatcaagtcagtctggagtcgaaccccctgatcgatggaccggcaccccgggttggccctcccgtgaccaggaggcgccagggtctatgatgccaccagcggctgcgcaaccttctgcgcatggtgcattagtacctccagccactgcccatgaacctgtggatcaccctgccctacactggttagcttgctgttgctgtctatcacttcccggtcagttgcccttggctatccggctgggatgggacctggacctggaagcaggaccatctagcggaaaactgtgtcctcgggcacgaaggtggcagcccctgccaagttag

SEQ ID NO: 218364 - DNA, 1350 bp, synthetic construct
  misc_feature 1..1350: note = Description of Artificial Sequence: Synthetic coding sequence
  source 1..1350: mol_type = other DNA
atgtggacagccctggtcctgatttggattttctctttgtcactgtccgaatcccatgccgctagtaatgacccccgaaacttcgtacccaataagatgtggaagggcttagtaaaacggaacgcttccgtggagaccgtcgataataaaacgtcagaagatgtgaccatggctgctgcctctccagttacattaacaaagggcacgtcagccgctcatctcaatagcatggaagtgacgacggaggatacctctcggacagatgttagtgagccagccacaagcgggggtgctgcagatggcgtgaccagtatcgcgccaacagcggtggcctcctcaaccacagccgctagcattaccacagccgcttctagtatgactgttgcttccagcgctccaaccacggccgctagctccactaccgtagcttcaatcgcccctaccaccgcagcaagttccatgacagcagcttcatccacgcccatgactctcgcgctgccagcacccactagcacttctactggcaggaccccatctactacagccacagggcacccttctctctctaccgcgctagcgcaggttcccaaaagctcagctttgccacgcaccgcaactttagccactctcgcaacacgggctcagaccgtggccacaaccgctaacaccagttccccaatgagcactcggccaagtcctagcaagcacatgcccagtgatacagccgcatccccagtacctcctatgcgacctcaagcccagggcccaatcagccaggtcagcgtggaccagccagtggtcaacaccacgaataaaagcacgcctatgccttcaaatacgaccccagagcccgctcccaccccaaccgtagtgaccaccaccaaggcccaggctagggaaccaaccgcgtctcctgtaccggtaccacacacatcacccatacccgaaatggaagcgatgtcacccacgactcagcctagtcctatgccttacacacagcgtgctgctggtcctggaacctcccaggcacccgagcaggtggaaactgaagccaccccaggcaccgattccacaggccctacgccgaggtcctcgggcggtacaaagatgcctgctactgatagctgccaaccttctactcaggggcagtatatggtggttactacagagccattaacccaagccgtggttgacaagacactcctccttgtcgtgctgctgctgggtgtgactctgttcatcacagtgttggtcttattcgcgttgcaggcttacgaaagctacaagaaaaaggattatacacaggtagactacctcatcaacggtatgtacgctgacagcgagatgtag

SEQ ID NO: 218365 - DNA, 78 bp, synthetic construct
  misc_feature 1..78: note = Description of Artificial Sequence: Synthetic coding sequence
  source 1..78: mol_type = other DNA
atgtggacagccttggtcctcatctggatctttagtctgtctctgtcagaatcccacgctgcctctaacgatccctag

SEQ ID NO: 218366 - DNA, 3969 bp, synthetic construct
  misc_feature 1..3969: note = Description of Artificial Sequence: Synthetic coding sequence
  source 1..3969: mol_type = other DNA
atgcctgtagtatggcctacattgctggacctgagcagagacgagtgtaaaaggatcctccggaagctggagcttgaagcttacgcaggggtcatttcggctctgcgcgcacaaggcgatttgacaaaagagaaaaaagatctgttaggcgagctctcgaaggtgttaagtatctctacagagagacatagggccgaagtgaggagagcagtgaacgacgaaaggttgaccaccattgctcacaatatgagcggtccaaacagtagcagtgaatggtccattgaaggcagacgattggtgcctttgatgcctcgcctggtccctcagactgctttcaccgtcaccgcaaacgctgtggctaatgcagccatacagcacaacgcaagccttcccgtcccagccgagactggatcgaaggaagttgtctgttactcctatacaagtacaacatctactcccacgtctacccctgtgccgtctggctctatcgctacggttaaaagccctcgcccagcttcacccgctagcaatgttgtggtcctaccctccggttcaacggtttatgtcaagtcagtctcctgcagcgacgaggatgagaagccacgcaaaagaaggagaacaaattcctcttcctctagtccagttgtactcaaggaggtgcccaaagctgtggtccctgtcagtaaaaccattactgtgcccgtgagtggtagccctaagatgtctaacataatgcagtccatcgccaattccctgccacctcatatgagccccgtgaaaattacttttaccaaaccatcaactcagacaacaaacacaacaacacagaaagtgataattgtgactacgtccccttcatctactttcgtgcctaacatcctgtccaagagtcacaattatgcggctgtgacaaaactggtccccacctcagtgattgcctctaccacacagaaaccccctgtcgttattaccgcctctcaaagcagcctagtgtctaattcttcatccgggagcagttcaagcactccatctccgattcctaacacagtggccgtgaccgctgtcgtgtcttctacaccaagcgtggtcatgtcaactgtcgcacagggggtctctacctccgccatcaagatggcatccacccgcctcccatctcctaaatctctggtgtctgcaccaacccaaattcttgctcaattcccgaaacagcaccagcagtcaccaaaacagcagttgtaccaggttcaacaacagacccaacaacaggtggctcaaccctctcccgtgtctcatcagcaacagcctcagcagtcccctttacccccagggatcaagcctacaatacagatcaaacaggaatcaggtgtaaagattattacccaacaagtgcagccgtctaaaattttaccaaagcctgtaaccgccactctgccaacatcatcaaattctccaattatggttgtgagctcaaacggtgccattatgacgaccaaactcgtaaccactccaactgggacacaggccacgtataccagaccaactgtgagcccctctatcggaaggatggcagcgacccccggagcagccacgtacgtgaaaaccacatcagggagcattataactgtggtgcctaaaagccttgcgacgctcggtggcaagataatttcaagcaacatcgtttccggcactactacgaagataacgacgattccaatgacttctaagcccaacgttatcgtggtgcagaagacaacagggaaaggaaccactatccagggcctccctggaaagaatgtagtcaccactctgctgaatgcaggcggagagaagacaattcagaccgtcccgacaggggcaaaacctgcgatcctgacagctacaaggcctatcacaaagatgatcgtgacacagcctaaggggatcggtagtactgtgcaaccggctgccaagattattcctacgaagatcgtgtatgggcagcagggaaaaacacaggtgctgattaagcctaaacccgtgaccttccaagctacggtcgtgtctgagcagactcgccaactggtaacggagacattgcagcaggcctcccgagtggccgaagcgggtaactcttcaatccaagagggcaaagaggagccgcaaaattacactgactcatcatcctcttcgactgagagctcccagtccagtcaggatagtcagcctgtggttcacgtgatagcgagccggagacaggattggagtgagcacgagatcgcgatggaaactagccccacgatcatttatcaggacgtaagtagtgagtcgcaaagtgccacatcaactattaaggcgttactggagctccagcaaacaacggttaaagagaagctggagtcgaaacctcggcagcctactatcgatctgtcccagatggccgtacctatacagatgacacaggagaagcgacactctcctgaatcccctagtattgcggttgtggaaagcgagctggtcgccgagtatattacaaccgaacggacagatgagggcaccgaagtcgccttcccactgctggttagtcacaggtctcagccacaacagccttcccagccccagcggaccttgttgcagcatgtggcacagtcgcagactgctacacagacatccgtggtggtgaaaagcattcccgcttcgagtcctggggctattacccacatcatgcagcaggcactgtcttctcacacggcatttaccaagcattcagaggagctgggcacggaagaaggtgaagtcgaggagatggatactctggatccccagacaggcctgttctacaggtcagctctcacccaaagtcagagtgctaaacagcagaaattgagccaaccccctctcgagcagacgcaactacaagtgaagacactgcagtgtttccagaccaagcaaaagcaaacgattcacctgcaggccgatcagctgcaacacaagctcccgcaaatgcctcaactgtcaattaggcaccagaaactaacccccctccaacaggagcaggctcagcccaaaccagacgtgcagcacacgcagcacccaatggttgctaaggatagacagctcccaacattgatggcccagccacctcagaccgtcgtgcaggtccttgcagtaaagaccacacagcaattgcccaagctgcagcaggcaccaaatcagcccaagatctatgttcagccacagactccacagagccaaatgtccctccccgcaagctcagagaagcagacagcgagccaggtcgaacagcctattattacacagggtagctcagttactaagatcacattcgaggggagacagcctccaactgtaaccaagattacgggaggatcatctgtacccaagttgacatctcctgtgacctctatttctcctattcaggcttccgaaaagacagctgtaagcgatatcttgaagatgtctctgatggaggcccagatagacacaaatgtggagcatatgatagtggacccgcctaaaaaggccttagctactagcatgctaaccggggaagcgggaagcttgccgtctacacacatggtagtggcgggaatggcaaacagcactccgcagcagcaaaaatgcagggagagctgctcatcaccctctacagttggtagctccctgacaacacgcaaaattgatcccccagcagttcccgctaccggacagttcatgaggatccagaacgtcggacagaagaaggccgaagagtcgcctgccgaaatcattatccaagcgattcctcaatatgctattccctgccattccagttccaatgtagtcgtcgaaccatctgggcttctggagctgaacaattttacctctcagcagttggacgatgaggagactgctatggagcaggacattgattcctcgaccgaggacggcacagaaccctcgccaagccaatcctccgccgagcggagttag

SEQ ID NO: 218367 - DNA, 3468 bp, synthetic construct
  misc_feature 1..3468: note = Description of Artificial Sequence: Synthetic coding sequence
  source 1..3468: mol_type = other DNA
atgccggtggtgtggcctacgttactggacttgtctagggatgagtgcaaacgtattctgcgcaagctggaacttgaggcctacgcaggagttatctccgcgttacgcgctcagggagacctgacaaaggagaagaaggacctactgggtgaactctctaaagtgctgtctataagcactgagcgacatcgtgcggaagtacgcagggcggtgaacgacgagcggcttactaccatcgcacacaatatgagcggaccgaatagcagctcagagtggagcattgagggaaggcgcctggtacctctgatgcccagactcgtgccgcaaaccgcatttactgttaccgccaatgccgtcgcaaacgccgcaattcaacacaatgcttctctgccagtcccagcagaaaccggaagtaaggaggtggtctgttattcgtacactagcaccacctcaactcctacttccacccccgttccctctgggtcaatagcaacagtgaaaagtcccagaccagctagtcccgcttccaatgttgtcgttctgccatccgggtccacagtgtacgtgaagagtgtgagttgtagtgacgaggacgaaaagccccgaaagcggagacgcacaaactcgtcttcatctagcccagtggtgttaaaagaagtgcctaaggccgtcgtgcccgtgtccaaaaccattacggtgccggtctcaggtagccctaagatgagtaatatcatgcagagtattgcgaattccctgccaccccatatgagcccggtgaagattactttcactaagccctccacccagaccacaaacaccacaacccaaaaggtgataattgtgaccacaagccctagctcaacgtttgtaccaaacattctctcaaagtcccacaactacgctgccgtgacaaaactggtgcctacgagtgtgattgccagtaccacacaaaaacccccagtggtgataacggcatcacagtcctccctggtgtcgaatagctctagtggtagctcttcatccaccccgagtccaatccctaacaccgtcgctgtgaccgctgtagtgtcctcaacacccagtgtggtcatgtccacggtggcgcagggtgtatctacttctgccataaagatggctagcacacgactgccttcgcccaagagcctcgtgtctgctcctacacagattctggctcagttcccaaagcagcatcaacaaagccctaagcagcagctttaccaagttcagcagcagacacagcagcaggtggcccaacctagccctgtaagccaccagcagcagccacagcagagccctctcccacctggcataaagccgactattcagatcaaacaggaaagtggggtgaagatcattactcagcaggtacagccttccaagatactacccaagccagtgaccgctacactcccaacctcatcaaactccccaattatggtggtgagctctaatggcgcaattatgacgactaaactggtcactacgcctacaggcactcaggctacctacactcggccaactgtttccccttctattggcaggatggctgctactccaggagcagccacatatgtcaagactacatcgggatcgatcatcactgtcgtgcctaagtccctggccaccctgggcggaaagataatctcttccaacattgtttccggcaccaccaccaagattacaacaatacctatgacgagtaaacctaacgtgatcgtggttcagaaaactactggcaaggggaccacaatccagggcctgcccggtaagaatgtggtgacgaccctgctaaacgcgggtggtgagaagaccatacagactgtgccgacaggcgcaaagccagctatactgacagccacccggcctataactaagatgatcgtgactcaacctaaaggcatcggcagcaccgtgcagcccgcagctaaaattatcccgacaaagattgtgtacggccagcaggggaaaacgcaggtgctaatcaagcctaagcctgttacctttcaggccaccgtcgtgtccgaacaaactcgtcagctggtcactgaaacgttacaacaggcatctagggttgcggaggccggtaattcttctattcaggagggaaaggaagaaccccagaactacaccgattctagctcatcttcaactgagtcatctcagagttctcaggatagtcaacccgtagtgcatgtcatcgcctcacgtcgccaggactggagtgagcacgagatcgccatggagacatccccaactatcatatatcaagacgtgagcagcgagagtcaaagtgctacttcaacgattaaagctctcctcgaactccagcagactactgtcaaagaaaagcttgagagcaaacccaggcagcctacaatagatctgtcccagatggccgtgccaattcagatgacccaagaaaaacgccactcgcccgagagtccaagtattgccgtagtggaatccgaactcgttgccgagtacatcaccaccgagagaactgacgagggaacagaggtggcatttcctctgttagtgtcacaccgatcccagcctcagcagccgtcccaacctcagcgcaccctgctgcagcatgtggcccaatcacagaccgccacccagacctcggtagtcgtcaaatccatcccggcttcctcccctggagcgattacccacataatgcaacaagccttgtcatcccacaccgcttttaccaaacattcagaagagcttggaacagaggagggggaagttgaagaaatggacaccctagacccacagacaggcctcttttatagatcggccctaactcagtcacagtccgcaaaacagcagaagttgtctcaaccaccattggagcagactcagctgcaggtgaagactctccagtgcttccaaaccaagcaaaaacagaccatacatcttcaagcggatcagctgcagcacaagctcccgcagatgcctcaactgagcattcgccatcagaagctgacacccctccagcaggaacaggcacaacctaaaccagacgtccaacatactcaacacccaatggtcgctaaagatcggcaactacccacgcttatggcccaacctcctcaaactgtggtccaagtgctggcagtgaaaaccacccagcagctccccaaactgcaacaggctcccaaccagccaaaaatctacgtgcagccccagacacctcaatcacaaatgtctctgcctgcaagttctgaaaaacagacagcgtcccaggccattccgcagtacgccatcccatgccattcttcctctaatgtcgtcgtcgagccttctgggcttctggaactgaacaacttcacttcccagcaactcgacgacgaggaaactgccatggaacaggatattgacagcagtactgaggacgggactgagccgtctccctctcagtccagcgccgaacgcagttag

SEQ ID NO: 218368 - DNA, 3015 bp, synthetic construct
  misc_feature 1..3015: note = Description of Artificial Sequence: Synthetic coding sequence
  source 1..3015: mol_type = other DNA
atgccagtggtatggcctactcttctagacctgagcagggacgaatgtaaaagaatcctccggaagctggagctcgaagcttacgctggcgtgatcagcgccctgcgcgcacagggtgacttgacgaaggaaaaaaaggacctcctcggcgaactcagtaaggttcttagcataagcactgagaggcaccgtgctgaagtccggagggccgttaatgacgagagattaaccaccattgcccacaacatgtctggccctaattctagttctgaatggagtatagaaggccgacgactagtgccccttatgcctagactcgttcctcagaccgctttcaccgttaccgccaacgccgtagctaatgctgccattcagcacaatgcctccctccccgtgccagcggaaaccggctccaaagagggagtgtcatgttcagatgaggacgaaaagccccgaaagaggcgcagaacaaatagctcttctagctctcccgttgtgttgaaagaggtgcccaaggccgtggttcccgtcagcaaaactataacagtgcccgtgtccggtagtcccaagatgtcaaacattatgcagtctatagcaaattcactccccccacatatgagtcccgtgaagataaccttcactaaacccagcactcagacaactaacacaaccacccaaaaggtgatcatcgtgacgaccagccccagctccacattcgtgcctaatattctgtcaaaaagtcataactacgccgctgtaactaaactggttcctacatccgtgattgcgagcaccacacaaaagccccctgtggttatcactgcttctcaatctagcttggtctcaaacagttcatccggtagctcgagtagcactccttcccccattccaaatacagtggctgtcactgcagtcgtgagctcaaccccatctgtggttatgagcaccgtggctcagggggttagcaccagtgccatcaagatggcatctacccgcctgcctagcccgaaaagcctagttagcgcccctactcagatcctcgcccagtttcccaagcagcaccaacaatcacctaaacagcagctctatcaggtgcagcagcaaactcagcagcaggtggcgcagccttctcctgtgtcccaccagcagcagccacaacagtctccattgcctccagggatcaaacccaccatccagataaagcaggaatccggggttaagatcatcacgcagcaggtacagccttccaagatactaccaaagcctgtgaccgctattctgactgccacaagacccatcacaaagatgatcgtaactcagcctaaggggattggctctaccgtccagccggctgcaaaaatcattccaactaagatcgtctatggtcaacaaggcaaaacccaagtgttgattaagcccaagcctgtcacttttcaggccacagttgtgtccgagcagacccggcagctagtgactgagactttgcagcaagcctcccgcgtcgcagaagccggaaatagctccatccaggaaggtaaggaagaacctcaaaactacaccgactcaagcagctcctctaccgaatcttctcaatcctcccaggtgagccatcggagtcagccacagcaaccgagtcagcctcagcggacgttgctgcagcacgtcgcccagtcccagactgccactcagaccagcgtcgtggtaaaatccatcccagccagtagcccaggtgcaattacccatattatgcagcaggcactgtctagtcataccgcatttactaaacattcagaagagttaggaacagaagagggggaggtggaagaaatggacacactagacccccagactggcttattctacagatcggcattgacgcaatcacagtcggctaaacagcagaagctaagccagccacccctagagcagacacagttgcaggttaagacattgcagtgcttccagacaaaacaaaaacagactatccacttacaggccgaccagctgcagcataagctccctcagatgccccaattaagcattcgccaccagaagttaactcccctgcagcaggaacaggcccagccaaagcccgatgtgcagcacacccagcatccaatggtcgctaaagatcggcagctaccgacactcatggcacagccccctcagacagtggtccaagtgctggcggtgaaaacaactcagcagctgccaaagctgcaacaggctcccaatcagcctaaaatttatgtccagccgcagactccccagtcgcaaatgtctctgcccgcttcttctgagaagcagacagcttcacaagtggagcagccgatcatcacacaggggtcaagtgtcaccaaaattactttcgaggggagacaacctcccaccgtgaccaaaattaccggaggatctagcgtgcctaagctaaccagcccagttaccagtatttctcctattcaggcctccgagaagacggccgttagcgatattctcaaaatgtcacttatggaggctcaaatcgacacaaacgtcgaacacatgatcgtggatcctcctaaaaaagctttggctacctccatgctcactggtgaagccggtagcctcccaagcacccacatggttgttgctggcatggctaactctaccccgcaacagcagaaatgtcgggaatcatgttcttctccaagtacagttggcagctctctgaccacccgtaaaatagatcctcctgcggttcccgcaaccggccagttcatgcgaattcagaatgtgggccagaagaaggctgaggagagcccagcagagattataatccaggccatcccccagtacgccataccttgccactcttcctcaaatgtcgttgtagaaccttccggcctgctggaactgaataactttacttctcagcagttagacgatgaggaaaccgctatggagcaggatatagattcatctaccgaggatggcacagaaccttcccccagccagagctcggcagagcgatcttag

SEQ ID NO: 218369 - DNA, 3969 bp, synthetic construct
  misc_feature 1..3969: note = Description of Artificial Sequence: Synthetic coding sequence
  source 1..3969: mol_type = other DNA
atgcccgtggtatggcctactctgctggatctttcaagagacgagtgcaagagaatcctgcgaaagctggagctcgaagcatacgcgggagttatctctgccttgagggcccagggcgacttaaccaaggagaagaaggacttattgggcgaactgtccaaagtactctcaatctccactgagagacaccgggcagaggtccgcagagcagttaatgatgagagactaaccacgattgcccacaatatgtcagggcctaactcctcatccgaatggtccatcgaaggaaggaggctcgtgcctcttatgccccgacttgtccctcagactgccttcaccgttacagccaacgctgtggctaacgccgctattcagcacaatgcttcactgcccgtcccggctgagaccggctccaaggaggtagtctgttattcttatacctccacaacttccacccccacatctacccctgtgccctctgggtcaattgcaactgtcaagagccctcggccagcttccccagcctccaacgtcgtagtgttgccttctggatcgactgtctatgtaaagagtgtatcctgctcagatgaagacgagaagcctcgcaaaagaaggcgcactaactcttccagttctagtcccgtcgtgctcaaggaagtgcccaaagccgtcgtgcccgtctcaaagacgatcacagtgccagtctcggggtctcccaagatgtcgaacattatgcagtcaatcgcaaacagcctgcccccacatatgtcacctgtgaaaattacgttcacaaagccttctacccagactacaaatacgacaacacagaaagtgatcattgtcacgacctctccaagcagcacgttcgtgcccaatatcctgtctaagagccacaactatgccgctgtcactaagctggtgccaacttcggtgattgcatccacaacacagaagccgcctgtggtcataacagcctcacagtcaagtttagtgtccaacagttcgagtgggtcctctagctcgactccttccccaattcctaatacagttgccgttactgccgtggtgtcctcgacaccctccgttgttatgtccacggttgctcagggtgtctctactagcgccatcaagatggctagcacacggctcccatcaccaaaatctctggtgagtgcacctacccagatactggcacaattccctaaacagcaccaacagtcccccaagcagcagctctaccaagtacagcagcagacccagcaacaggttgcccagcccagcccagtgagccaccagcagcagccacaacaatctccgttaccgcctgggattaagccaacgatccagatcaaacaagagtcaggggttaagatcattactcaacaggtacagccttctaaaatcctccctaaacctgtcactgccactctgcccaccagctctaacagccctatcatggtggtgagctctaatggggcaattatgacaactaaactcgtgacaacacccaccggcacacaggcaacttatacacgcccaactgtcagcccctccatcggacggatggcagccactcccggtgccgcaacctacgtcaagacaacaagcggatcaattattaccgtagtgcctaagagtctagccacccttggaggcaaaattattagcagcaacattgtatcgggaaccaccaccaagattacaaccatccctatgactagcaagccaaatgttatcgtggtgcagaaaaccacagggaaagggaccactattcagggtctccccggaaaaaatgtggtcacaactttgttgaacgctggaggagaaaagacaatacagactgtacctaccggagcaaagcccgctatcctcaccgctacccgcccaattaccaaaatgattgtgacccagccaaagggaattggcagcaccgtacagcccgctgctaaaattattcccacgaagatagtctacgggcagcagggaaaaactcaagtcctgattaaacctaaaccggtgacttttcaggccactgtggtttccgaacagacaagacaactggtgacggagacgctgcagcaagcctctcgggtggctgaggcaggaaatagttcaatccaggaggggaaagaagagcctcagaattataccgacagcagctcctcatccaccgagagcagccagtcatcgcaggatagccagcccgtggttcacgttatcgctagtcgtagacaggattggagcgaacacgagattgccatggagacatctccaacaattatttatcaggatgtcagcagcgaaagccaatctgccacctctactatcaaggctctactggagcttcagcagacgaccgtgaaggaaaagctggaatcgaagccaaggcagccaactattgacctcagccaaatggcagtacccattcaaatgacccaggagaaacggcactcccccgagtctccgtctatagcagttgtcgaatctgagctcgtagccgaatacatcaccaccgaaaggactgacgaaggcactgaggtcgctttcccccttctggtgtcgcaccgcagtcaacctcagcagccctcacaacctcagaggacactgcttcagcacgttgcacagtctcagacggctactcaaacttccgttgttgtgaagtccataccggcatcttctccaggcgctatcacacacatcatgcaacaggccctgtctagtcatactgcgttcaccaaacacagcgaggaactaggtaccgaagaaggtgaggtggaagaaatggacaccctcgacccacagaccggcttattctatcgcagcgccctgacacagtcgcaaagtgctaaacagcaaaagctgtcacagcctccccttgaacagactcagctgcaggtaaagaccttacagtgtttccagaccaagcaaaagcagacaatccacctgcaggcagatcagctgcagcacaaattgccccaaatgccccaactctctattcggcaccagaagctaacccctctccaacaggagcaagctcaaccaaagcctgacgtccagcatactcagcatcctatggtggccaaagatagacagttgcctaccctgatggcacagcccccacaaactgtcgtacaagtgctggctgttaagactacccaacagctgcccaaactgcagcaggcacctaatcagccaaagatttatgtgcagccgcaaactcctcagtcccagatgtcactacctgctagtagcgagaagcagacagcctcacaggtggaacagcctatcataacgcagggtagctcagtgacgaagatcacgttcgagggtcggcagcctcctacagtgaccaaaattacaggcggatcatcagtgccgaaactgacttcccctgtgacctcaatctctccgatccaggctagcgagaagacggccgtgagtgatatactaaagatgagcctgatggaggcccaaatagacactaacgttgagcacatgattgtggacccacctaaaaaggcactggccactagtatgttaacaggagaggccggttcgttgccaagcacacacatggtggtggccggaatggccaatagtaccccacagcagcaaaagtgccgcgagagttgctccagcccttctaccgtggggtcaagcctgaccactaggaagatcgatcctcccgctgtccctgcgaccggacagtttatgaggatccaaaacgttggacaaaaaaaagctgaggagagcccggctgaaatcattatacaagccattccacagtacgctattccgtgccacagctcgagcaatgtggtggtggagccttccggattattggagctaaacaacttcactagtcagcagctggatgatgaagagacagctatggaacaagatattgacagcagcacagaagacggtacagaacctagcccctctcagagttccgcagaacggagttag

SEQ ID NO: 218370 - DNA, 624 bp, synthetic construct
  misc_feature 1..624: note = Description of Artificial Sequence: Synthetic coding sequence
  source 1..624: mol_type = other DNA
atggctgttttccatgatatgcttctgcaacccttgggaatgtttctgtgtttatccctacagctgtccagcgctacatttatccgctacagcagcacttgttttactttcgacgaatactatacaataacactcgacatcaaggccagtagccacatctacgagagcaatgctgtgtattccgtgttcgtgccggtcaatgatagcgtgtatgctgttgtgatgaagactctggatgagaattcagattccgcaggcctttggcagagggctgataagaactgttattccaactccacatactacgtcaaagatcagtacatgaccgtgctggaggcacagtggcaggccccagagccggagaatatcactgaggtagagattcaagccttcaccgtgcagattcgggctctgcccattctgagtaccttaaagctgagggagaagttgagcaccctggctctggcagctaaaataccccagtctagcgccttcaagccgttcttcatgatcactcccaaaagcatcaggttggagggtctggctaatcaagtcttttcatcccccattacagaagcgatttatattcttttggcctttctcacgtctactctgctcttctag

SEQ ID NO: 218371 - DNA, 3708 bp, synthetic construct
  misc_feature 1..3708: note = Description of Artificial Sequence: Synthetic coding sequence
  source 1..3708: mol_type = other DNA
atggaccacactgcatcccagaatgctcaggatctcattggcatcccccacctcggggtctctggttccagcacaaagtggcattcagaattatctcctacagagggccctcatagcgcaggtagttccacaccaggttttttgagccccatggccgaactatctcacccttctcccccacctcctgcgctaggcagtctacttcagctgcccgacgggtcgccctcatggtccatgctcgaggtggcgtctgggccagcgtctacccagcagattaaggctggcgtgccaggacgagtgcacaacggtgtatctctgccaacctttaagaacacagagactgctacccacgaggcagagcctcccttatttcagactgccgagtccggggcaattgagatgacatccaggaagctggccagcgccaccgccaatgacagtgctaatcctttgcatttgagtgccgctccagagaattcccgagggcctgcactttccgcggagcacacatcaagcttggtgccgagcctgcacataactacgttaggccaggagcaagcaatcctcagcggggctgttccggcatcacccagcaccgggaccgccgactttcccagcattctgacttttttacagcctacggaaaaccacgccagtcccagtcccgtacctgaaatgcctactctgccagccgagggctcagatgggtcccctcccgcaactcgagatctactgctgagctctaaggtacctaacctgctgagtaccagctggacctttccaagatggaagaaggattctgtgaccgctatcctaggtaaaaatgaggaggccaatgttacaattcctctccaagcttttcctagaaaggaggtactctcactgcatacagtgaatggatttgtaagcgactttagcactggcagcgtttcctcaccaattattaccgcccctcgaacaaatcctctcccctctgggccacctttgccgtctatcctgtccattcaggccacccagacagtgttccctagtctcggcttttcctctaccaagcccgaggcctatgcagctgctgtcgatcatagtggtcttcccgcttcagcatcaaagcaggttagggcatcaccaagttctatggacgtttatgatagcctgaccataggcgacatgaaaaagccagccaccaccgacgtcttttggtcctctttgtcagcggagactgggtctttgagcaccgagtcaatcatatcaggccttcaacagcaaactaattatgaccttaatggccacacgataagcacgacttcatgggaaacccatctggctcctaccgcccctccaaatggcctgacctcagcagccgatgcaatcaaaagtcaggactttaaggacaccgctgggcattcagtcactgccgaaggtttctcaatccaggacctcgtccttggcacaagcatcgaacagcctgtgcagcagtctgacatgaccatggtgggaagccacatcgatctttggcccaccagcaacaacaatcatagcagggactttcaaaccgctgaagttgcgtactactctccaactactcgtcattccgtatcgcaccctcaactccagcttcccaaccagcccgcacatcccctgcttctaacctcacctggacctacaagcacaggcagtctacaggagatgctgtcagatggaactgacacaggaagtgaaatctcctcagacattaattcttcgccagagcgaaacgccagcacaccgtttcagaatattctcggttaccattccgccgctgaatccagtatcagcaccagcgtattccccaggacatccagtagggtcctgcgagcctctcagcatccaaagaaatggaccggggcagcgaccaacgcggctgataccgtgtcgagcaaggtccagccaaccgccgcagccgcagtaaccttgttcttgaggaagtcttctccccctgcgctttccgcagccctggtggccaaagggacatcctccagtcctctggctgtggcaagtggtccagctaagagcagcagcatgaccaccctggccaaaaacgtcacaaacaaagcagcgtcaggtcccaagcggactcccggagctgtgcacactgcgtttccctttactccaacatacatgtacgccaggacagggcatacaaccagtacacataccgctatgcagggcaacatggacaccgcctcaggcctgctctccaccacgtatcttccgaggaagccccaagccatgcacacaggactaccaaatcctactaacctggaaatgcctagagccagtactccccgtcctttgacagtgacagccgctctcacctctattacggctagtgtgaaagccacacgcctgccccctctgagggcggagaatacagacgcagtgttgcctgctgccagcgcagctgtcgtgactactggaaagatggcgagcaatttggagtgtcaaatgtcatcgaaattactggtcaagacagtcctcttccttactcagcgaagagtgcaaatatccgagtctctgaagttttccattgctaagggtcttacacaggccttaagaaaagccttccatcaaaatgatgtgtccgcccacgtggacatcctggagtacagccacaatgtcacagtgggttattacgcaaccaaaggaaagctggtgtatctccccgcagtggtcatcgagatgttgggtgtatacggagtttctaacgtgaccgccgaccttaagcagcacaccccacatctacagagtgttgcagtgttggcgagcccctggaatccgcaacctgcaggctatttccagctaaagacagtgttgcaatttgtttcgcaggctgacaacattcagtcgtgcaaattcgctcaaaccatggaacaacggctgcagaaagccttccaggacgccgagcgcaaagttctaaacaccaaatcaaacctgacaattcagattgtcagcacgagcaacgcaagccaggcagttacactggtgtacgtggtgggaaatcagtctacatttttgaacggaaccgttgcctcctctctgctcagccagctgagcgccgagctcgtgggattttatctcacatatccacctctgacaatagctgagcccctggagtatcctaatctggatatcagtgagacaaccagagattattgggtaatcaccgtgttgcagggagtggacaacagcttagtcggacttcataaccagagcttcgcacgcgttatggagcaacgcttggcgcagctgtttatgatgagccagcagcagggacgtaggttcaaacgggcaaccacacttgggagctacaccgtgcagatggttaagatgcagcgggtgcccggaccaaaggatcccgctgaacttacctattacaccctgtacaacgggaagcctttgcttggcactgccgcagccaaaatccttagcacgattgacagccagcgcatggctctgactctgcaccacgttgttctcttacaggccgatcccgtggtaaaaaacccgcctaataatctctggatcattgctgccgtactggcgccaatcgcggtggtgactgtgatcatcataataattaccgctgtcctttgcaggaaaaacaagaacgattttaaaccagacacaatgattaacctgccgcagagagccaagcaggtcgcgcagtag

SEQ ID NO: 218372 - DNA, 5549 bp, synthetic construct
  misc_feature 1..5549: note = Description of Artificial Sequence: Synthetic coding sequence
  source 1..5549: mol_type = other DNA
atggaccacacagccagccagaatgcccaggacctgattggcatcccacaccttggcgtctcagggagctccacgaagtggcactcagaacttagtccaaccgagggaccccactcagcgggaagttcgacccccggtttcctatcaccgatggccgagctgagccaccctagcccacccccacctgccctggggtctctgctccaactgccggacggaagcccctcctggtctatgcttgaagtggccagcggtcccgcatctacccaacaaatcaaggctggtgtacctggcagggttcacaacggggtgagcctgccaaccttcaagaatacagaaaccgctacacatgaggcggaaccccctttgtttcagacagctgagtcaggggcaattgagatgacttcccggaagttggcgtcggccacagccaacgactctgccaacccgctccacctgtccgccgctcccgagaacagtagaggccctgcgctgagcgctgagcacacgtccagcttggtcccaagtctccatattactaccctgggccaggagcaggccattttatctggagccgtccctgcttccccatctacaggcactgcagacttcccctctattcttactttcctgcagcctacggagaaccacgccagtccgtctcccgtgccggagatgccaactctcccggcagagggaagtgacgggagccctccagctacacgcgacctgctgctttcttccaaggtgcccaacttactgtctacgagctggacttttccgaggtggaagaaggactctgtgaccgccatcctcggaaagaacgaggaggccaatgtaacgatcccgctgcaggcttttccacggaaagaggtgctctccctgcacaccgtgaatggttttgtcagcgacttctctaccggctccgtgtcgtcccctatcatcaccgccccaaggaccaatccgctcccatccggccctccacttccatctatcctgagcattcaggcaacgcagacagtgttcccctccctcggctttagctcaaccaaaccagaagcctacgctgctgcggtggaccactcaggacttccggcttcggcgtcaaagcaagtgagggcatctccctccagtatggacgtgtatgattccctgaccataggtgatatgaaaaaacctgccaccaccgacgtgttctggagtagcctgtcagcagaaacagggtcactcagtacggagtcaataattagtgggctccagcagcaaactaactacgatctgaatgggcatacaatctctactacaagctgggagacccatttggcgccaaccgctcctccgaacgggttaacctcagctgctgatgcgatcaaatcgcaggactttaaagacaccgccggacactcagtgaccgcagaggggttttcgattcaagacctcgtgcttggaacttccattgaacagccggtacagcagtcagacatgactatggtgggcagccacatcgacctgtggccaacaagcaataataatcattcgcgcgacttccagacagctgaagtggcttactattcccccacgacgcggcatagcgtatctcatccccaactgcaactgccgaaccaacctgcacacccgcttctgcttacaagccctggcccaaccagcaccgggtcgctgcaggaaatgctttcagatggaacagatacagggtctgagattagcagcgatataaattctagccccgaacggaatgcttctactccttttcaaaacatactggggtatcactcagcagccgagtctagcatttcgaccagcgtttttccccgaaccagctcgcgcgtgctgcgcgcttcccagcaccccaagaagtggacggccgataccgtctcctctaaagtgcaaccaactgcagccgcagcggtgacccttttcctgcgcaaaagcagccctccggcattaagtgcagccctggtggccaaaggcacctcttctagtcctctcgccgtggcctcaggcccagccaagtctagcagcatgacaacactggcgaaaaacgtgaccaacaaagccgcaagcgggcctaagcgtaccccaggggctgtgcatacggcattcccatttacgcctacctatatgtatgccagaaccgggcacacgacaagcacgcacacggctatgcaggggaacatggatacagccagcgggctcctgtcgacaacatacctgccacgcaaaccacaggcgatgcatactgggcttcccaacccaacaaatctggagatgccacgcgcatctaccccccgacccctgaccgtcaccgcggctctgacatccatcactgcttccgttaaggccactcggctaccaccactccgcgctgagaacactgatgccgtgctgccggcagcatctgctgctgtcgtgaccactgggaagatggccagcaatcttgaatgtcagatgtctagtaaacttttggttaagacggtgctgtttctcacacagaggagagtgcagataagcgagtcacttaaatttagtatcgccaagggcttaacccaggctttgcggaaggccttccaccagaacgatgtgtctgcgcatgtggacattctcgagtactctcataacgtgacagtcggttactatgccactaaggggaagctggtctacctgccagctgtcgtcatcgaaatgctcggcgtttacggagtgagtaatgtgaccgctgacctgaagcaacataccccccatctgcagtctgttgcggttctcgcctcaccttggaatccgcagcctgcgggttacttccagctgaagacggtgttgcaatttgtgagtcaggcagataacatccagagctgtaaattcgctcaaaccatggagcagagactgcaaaaggcgttccaggatgctgagcgcaaggtacttaacacaaaatctaacttaacgattcaaattgtgtctacaagcaatgcatcccaagctgttacacttgtatatgtggtgggtaaccagtcgacgttcttgaatggtaccgtggcatcaagtctgctctcccagctgagcgcagagctggtggggttttatctgacctatcctccccttacaatagcagagccactggaatacccgaacctagatatttccgaaacaacacgagattattgggtgattacagtgctacagggcgtggacaatagcctggtgggattgcacaaccagtccttcgcaagagtgatggagcagagactggcacaactgttcatgatgtcacagcagcaaggtaggagattcaagcgagccactaccttaggtagctataccgtgcagatggttaagatgcaaagggtgccaggacctaaggaccctgccgagctcacttattataccctgtacaacggtaagccgctgttgggcaccgcggctgcaaaaattctgtctaccatcgactcgcagaggatggctctgacactgcaccacgttgtactactgcaggccgaccccgtggtaaagaatcccccaaacaacctgtggatcatcgcagcagtcctcgctcctatagccgtcgtgaccgtgataatcattatcataactgccgtgctctgtaggaaaaacaaaaatgattttaagcccgacaccatgatcaatctgccacagcgcgctaagccagtgcaggggttcgactatgctaagcagcacctcggccaacagggggctgatgaagaggtaattcccgtgacacaggaaactgtcgtgctccctctgccaatccgcgacgccccacaggagagagacgtggctcaggacggttccactatcaaaaccgcaaaatctactgagacacgcaagtctagatcaccctcggagaatggctccgttatctccaacgagagtgggaaaccaagtagcggcagaaggtcaccacaaaacgtgatggcccaacagaaagttactaaggaggaagcccgtaaaagaaatgtgcctgcttcggacgaagaagagggggcagtcctctttgataattcttcaaaagtcgcagctgaaccatttgatactagcagcggaagcgtgcaactgatcgcgatcaaaccgactgccttaccgatggtgcctccaacatccgatcgctcccaagagagttctgctgtcttaaacggcgaggttaataaagccctgaaacagaagagcgatattgagcattacagaaataagttgaggttgaaagccaagaggaaggggtattatgatttccccgctgtggagacttcgaaaggcctgactgagcggaagaagatgtatgaaaaggcaccaaaggaaatggagcacgtactcgaccccgacagcgagttgtgtgcgccattcactgagtcaaaaaatcgacagcagatgaagaatagcgtgtatcggagtaggcaaagccttaacagcccttcccctggggagacggaaatggacttgctggtaacccgcgagaggcccaggaggggaattaggaattcaggatatgatacagagccagagattatagaggaaactaatatcgatcgggtgcccgaacctcgcggatatagtcgctcgagacaggttaaagggcacagcgaaacttcaaccctatccagccagccgtctatcgacgaggtacgccagcagatgcatatgctcttggaggaagcgttttctttagcttcggcgggacatgccggacagagcaggcaccaagaagcctacggaagcgcacagcacctgccatactcagaagttgtgacctctgcccctggaaccatgacccggcctagagcgggagttcagtgggtgcctacctacaggccagagatgtatcaatattccctacctcgccctgcctaccgattctcacagctgccggagatggttatgggatcgccacctcctccggttccccctcggaccggcccagtggccgtcgcttcactgcgacgaagtacctccgacataggcagtaaaactagaatggccgagtcaaccgggccagagccagctcaacttcatgatagcgctagttttacccagatgagtcgcggtccggtctctgtcacccagttggaccagagcgccctgaattactccggcaacaccgtgcccgcagtgttcgcaattccagccgctaatagacctgggtttaccggatacttcattcccactcctcccagttcctatcgcaatcaggcctggatgagctatgccggagagaacgaactgccatctcagtgggccgacagcgtgccactgcccggatacatcgaggcttaccctaggagccgctatccccaatcctctccaagcaggctgcccagacagtactctcagcccgctaatttgcatccaagcttggagcaagccccagcaccttccactgctgctagccaacagtctcttgccgagaacgaccctagcgacgcacccctgactaacatctccaccgctgcgctagtcaaggccatacgagaggaggtggctaaacttgccaaaaagcagaccgatatgttcgagttccaggtgta

SEQ ID NO: 218373 - DNA, 5567 bp, synthetic construct
  misc_feature 1..5567: note = Description of Artificial Sequence: Synthetic coding sequence
  source 1..5567: mol_type = other DNA
atggaccataccgccagtcaaaatgcacaggatctcattggcatcccacacctgggtgtctcgggcagcagtaccaaatggcattccgagctgtcacccacggaggggcctcatagtgcaggctcttcaacgccgggattcctctccccgatggctgagctgagtcacccctctccgccaccacccgctctggggtccctgctacaactgcctgatggatccccttcttggtccatgttggaggtggcttcaggccctgctagtacccagcagattaaggccggtgtgcccggtagagtgcacaacggagtgagcctccctaccttcaagaatacagagaccgcgactcatgaggccgagccacccttgttccaaaccgccgaaagtggtgcaattgagatgacaagccggaagttggcttccgctacagccaacgactccgcaaacccgctacacttatccgcagcaccagaaaacagccggggtcccgctctatccgctgagcacacatcaagtctggtcccgagcctgcatatcaccaccctcggccaggagcaggccattttgtcaggggctgtgccagccagcccttctactgggaccgcagattttcctagcatcctcacatttctgcagcccacagaaaatcatgcctctccgagcccagtaccagagatgcctaccctgcccgctgagggatccgatggatcccctcccgctaccagagatttgctgctgtcctcaaaggtcccaaatctgctgagcaccagctggaccttccccaggtggaagaaagattccgtaactgccattctgggtaagaacgaagaggcgaatgtgacaatcccacttcaggcttttccaaggaaagaggtcttgtcactgcatacagtgaatggattcgtctcagacttttctaccggtagcgtgagttcacccataattactgcccctagaacaaatcctctgccctcagggcctccactgcccagcatcctctcgatccaagccacgcagacagtgttcccatccctgggcttctccagtacaaagcccgaagcctatgccgcagcggtggatcactcgggactgcccgcttctgcgtctaaacaggtaagggccagtccttcttctatggatgtgtatgatagcctcaccatcggagatatgaagaaacctgctaccacagatgtgttttggagttctcttagcgctgagaccgggtctctgtccactgaaagcatcatttcaggcctccagcagcagactaattatgacctgaacggacataccatttccacaacctcatgggaaacccatttagctccgaccgcccctcccaacggcctcacttctgcggctgatgccattaaatcacaggactttaaggacactgcgggacactcagtgacggccgagggtttttctatccaggatttagttcttggaactagcatagagcagccagtccagcagtccgacatgaccatggtcggctcccacatcgatctgtggcccacctcgaataacaatcatagcagggactttcagacagctgaagttgcttactattcccctacaacgcgacattccgttagccacccccagctccaattacccaaccagcccgcacacccactcctactcacctctccaggacccacgtctaccggatcactgcaagaaatgctgagtgatggaactgacacaggaagtgaaatttccagcgatattaattcgtcaccagaacgcaatgcaagcacaccctttcaaaacatactcgggtatcactcagccgcagagagctccatctctacatccgtgttccccagaacatcttcaagagtgctacgcgctagtcaacacccaaaaaaatggaccggtgccgctacaaacgccgcagacaccgtaagctcgaaggtccagcccactgcagcagcagctgtgactttgtttttgaggaagtccagccccccagccctcagcgccgcacttgtggctaagggcaccagtagcagccctttggccgtggcgtcgggcccagctaagagctcatctatgaccaccctcgccaagaatgtgaccaataaagcggctagcgggccaaagcgcaccccaggggcagtgcacactgccttcccctttaccccgacctacatgtatgccagaaccggtcatactacctccacacataccgccatgcagggcaacatggatacagcctcaggtttgcttagcaccacctacttgcctagaaagcctcaagcaatgcacacgggcctgcctaacccgactaatctcgagatgcctagggccagcaccccacgccctctcacagtaacagcagccctcaccagcattacagcctccgttaaagcgacccgattacctccgctgagggcggaaaatactgatgccgtgctccccgcagcctctgccgctgtggtgacgaccggaaaaatggcaagcaacctcgaatgccagatgtcaagtaagcttctagtgaaaaccgtcctcttcctgacacaacgcagagtgcagatttctgagagcctgaagttctccatcgccaaggggctgacacaggctctgcggaaggccttccaccaaaacgacgtgtcggcccacgtggatatcttagaatattcccataatgtgacagtgggctactacgccaccaagggtaagctagtgtaccttccggctgtcgttatcgagatgctcggcgtctatggcgtgtctaacgtaacagccgacctgaagcagcacactccacatttacagagcgtggcggtgttggccagcccttggaaccctcagccggctggatacttccagctgaaaaccgtgctgcaattcgtatcccaagcggacaacatccaatcatgtaagttcgcccagacaatggaacaaaggctgcagaaggcttttcaggatgccgaacgtaaagtgctcaacacaaagtccaacttaaccatacagattgtgagtacatctaacgcgagtcaggcagtgactcttgtgtacgtcgttggaaaccagtcgacctttttgaatggaacagtcgcatcctccctgttgtcccagctgtcagcggagctggtgggattttatttgacttatcccccacttactattgcagaaccgctcgaataccctaacctggacatcagcgagacaacccgggactactgggtgattacggttttgcagggggttgacaatagcctggtgggtctccacaaccagtcattcgcaagggtaatggagcagaggctggcccagctctttatgatgagtcaacaacagggccgaaggttcaagcgagcaacaactttgggctcttacacagtgcaaatggtgaagatgcaacgtgtcccagggccaaaggaccccgctgaactgacatattacacgctgtacaacggtaagcctctgcttggaacagcagcagccaaaatcctgagcactattgacagccagcggatggccctgaccttgcaccacgttgtgctgctgcaggccgatcccgtcgtgaagaaccccccaaataatttatggattatagcagctgtgctggccccaatcgccgtcgtgacagtgattattattattattacagcagtactgtgcagaaagaacaaaaacgatttcaagcccgacaccatgatcaacttgccacagcgtgcaaaacccgtgcaaggtttcgactacgccaaacagcatctcggccagcagggagccgatgaggaagtcatccccgttacacaagagactgtggtcttacccttgcctatacgggacgctcctcaggagagggatgtggctcaggacgggagtacaatcaagaccgccaagagtacggagacgagaaagtctagaagtccgtctgaaaatggctcggtgatctctaatgaatccggcaaaccgtcctccggacgaaggagcccacaaaatgtgatggcacagcaaaaagttacaaaagaggaggccaggaagcggaatgttccggcttccgacgaagaggaaggcgctgtcctgttcgacaatagcagcaaggtcgcagcagaaccttttgacaccagtagcggctcagtgcaactaattgccattaagcctactgccctccctatggttcctcccactagcgaccgctcgcaagagtcctccgccgtgctgaacggtgaggtcaacaaagcactcaagcagaaatccgatatagagcattatagaaataaattgaggcttaaagccaagaggaaggggtactatgactttccagccgtggaaacctccaaaggactgactgagcgaaagaaaatgtatgaaaaggcccctaaagagatggagcatgtcctggatccggactccgagctgtgtgcaccgttcactgaaagcaagaatcgccagcagatgaagaattctgtgtatcgaagccgccaaagtttgaatagtccttcaccaggggagactgagatggatctcctggtgaccagagagcgtccccgaagagggataagaaatagcggttatgacactgagccagaaataatcgaggagacaaatatagaccgagttcctgaaccaagggggtactctcgcagtcggcaggtcaaaggacacagtgagacctctaccctttcctctcagcccagcatcgacgaagtaagacagcagatgcatatgttgttggaagaggctttttctctggcaagtgcgggacatgccggacagtcccggcaccaggaagcgtacggcagcgcccagcacctgccctattctgaggtggtgacctcagcaccgggaaccatgacaagacccagggcaggcgtccagtgggtgcccacctaccggcctgagatgtatcagtactccctgccccgtccagcctacaggttttcacagctgccagagatggtcatgggatcacctcccccacccgtgcctcccaggaccggccctgtggctgtggcttcgctaaggagatcaacctccgacattggctcaaaaacaaggatggcagagtccaccgggcctgaacctgcccagctacacgacagcgcatcttttacccagatgagtcgaggtccagtctcagtgacccaactggatcagagcgccctcaactatagcggtaatactgtgcccgctgtttttgccattcccgctgccaacaggcctggattcacaggctatttcatacccactccgccaagctcttaccggaatcaggcctggatgagctatgccggtgaaaacgagctcccttcccagtgggccgacagtgtccccctcccaggatatattgaggcgtatcctaggtctaggtatccacagagttctcccagtaggctccctcgccagtattcacagccagcgaacttgcaccctagtctggagcaggcccctgccccttccacggcagccagtcagcaaagcctggctgagaatgatccaagcgatgcccctctcacaaatatttccactgcagccttagtgaaggccatccgcgaggaggtggctaaactggctaaaaaacagaccgatatgttcgaatttcaggtgta

SEQ ID NO: 218374 - DNA, 5066 bp, synthetic construct
  misc_feature 1..5066: note = Description of Artificial Sequence: Synthetic coding sequence
  source 1..5066: mol_type = other DNA
attcccgagggcctgtcggctgaacatacatccagtctcgtccccagtctgcacattacaactctgggtcaggagcaagcgatactttctggtgctgttcccgcatctcctagcactgggaccgcagattttcccagcatcctgacgttcctccagcccactgagaaccacgccagcccctctccagtccctgagatgcctacactccccgctgaggggtcagacggcagtcctcctgctacacgggacttactcctgtcatcaaaggtgccaaatctcctgtctacctcttggactttcccacggtggaaaaaggactctgtaaccgcaatcctgggcaagaatgaagaggcaaacgttaccatacccctgcaggcattccctcggaaagaggtcctgtcgcttcacacagtcaatggctttgtctcggatttctctaccgggtcggtgtcttctccaattattaccgcccctcgcaccaacccactcccgagcggacctcccctgccatctatcttaagtattcaggccacccagaccgtgttccctagcctaggttttagctcgactaagcctgaggcctatgccgcagcggtggatcactcaggcctgccggctagcgcctctaagcaggttcgggctagcccatcctccatggatgtgtacgactcactgaccataggagacatgaaaaagcctgccaccactgacgttttctggagcagcttaagcgctgagacaggatccctgtcaaccgagagtattatatcaggcctgcagcagcagactaattacgatctgaacggacacactatctctactacctcgtgggaaactcatctggcacctaccgcacctccaaatggactaacttcagctgccgacgccatcaagtcacaggacttcaaagacactgcaggccattcagtcactgccgagggcttttcaatccaggacctcgtcctgggtacctctatcgaacagcctgtacagcagtccgacatgaccatggtggggagccacattgacctttggccgaccagcaataataatcacagccgggatttccaaaccgcggaagtggcttattactcccctacgaccaggcactccgtatctcacccccagttgcagctgccgaaccaacccgctcatcccctgcttctcaccagccccggacctacctccactggctcacttcaggagatgttgtcagacgggacagacaccggatccgagatctcatctgatattaactccagtcctgaaaggaatgcttccaccccatttcaaaatatcctcggctatcacagtgccgctgagagttccatcagtaccagtgtgttcccacgcacctcatccagggtgctgagggcgagtcagcaccccaaaaaatggactgcagacaccgttagcagtaaagtgcagcccaccgctgctgctgctgttacactattcttgcgcaagagtagcccacctgctttgtctgccgctctggtcgctaaaggaacatcaagttctccgctcgcagttgcttcaggccctgccaaaagcagttccatgaccactctggcaaagaacgtcactaataaagcagcaagtggtcccaagaggaccccaggggctgtccatactgcctttccatttaccccaacatatatgtacgccaggaccggacacacaaccagtactcatactgctgccaggaagcacgggcactgcctctggcctgtagtctataacctcccccctcgaaagcctcaggccatgcacacaggactacccaatcctacaaacctggaaatgcctcgagcgtcaactcctcgcccactaactgtgactgctgcactgacctctattactgctagtgttaaagcaacacggctgcctccactcagggcagagaacacagacgccgttctgcctgccgctagcgccgctgtcgtaacaaccgggaaaatggctagcaatttggaatgccagatgagctccaagctccttgtcaagacagtccttttcctcacgcaacgcagagtgcagattagcgaaagcctaaaattttctattgcaaaaggcctgactcaggcgctgcggaaggcgtttcaccagaacgacgtgagtgcacacgtggatatcctggaatactctcataatgttacggtgggatactacgcaacgaagggtaagctggtctacctgccggcagtggttatagagatgctgggcgtgtacggcgtgagcaatgtaacggccgacctgaaacagcataccccacatctgcagagtgtggcggtcctggcttccccctggaatccccagcccgcagggtattttcaactcaaaactgtgctgcagtttgtttcacaggccgataacattcaatcgtgtaaatttgcccagacaatggagcagaggctgcagaaggccttccaagacgctgagcgaaaagtcttgaatacaaagtccaacctcaccattcagatcgtgtctaccagcaacgctagtcaggctgtaacactcgtgtacgtggtgggtaaccagagcacttttctgaacggaacagtcgcctcctcattgcttagccagctgagcgcagaactcgtaggattttaccttacttacccacccctgaccatagccgagcctctcgaatatcccaacctggatatctccgagacaactcgcgattactgggtgattacggtcctgcagggcgtcgataatagcttggtcgggctccataaccaatcattcgcaagagttatggaacagcgcctggctcagctcttcatgatgtctcaacagcagggtagaagatttaagcgggcaaccacgttgggttcatatacagtgcagatggttaaaatgcagcgcgtgcccggtcccaaggaccccgctgaactgacttattataccttgtacaacggcaaaccactcctgggaaccgccgctgctaagatcttgtcaacgatcgactcccagaggatggccctcaccctgcaccatgtggtattgctgcaggcagaccccgttgtaaagaaccctccaaacaatctttggattatagccgcagtcctggctcccattgcagtggtgactgtgattattattatcattacggctgtgttatgccggaaaaataagaacgacttcaaacctgatactatgataaacttgcctcagagagctaagcccgtgcagggctttgattacgccaaacagcatctgggccagcagggcgcagatgaggaggttatcccagtgactcaggaaactgtggttctgcctttgcccatacgcgacgcccctcaggaacgagatgtggcccaggatggatctacgatcaagaccgctaaaagtacagagactcggaagtcccgatcaccttccgagaatggctccgtaatttcaaatgaatccggcaagccttcctctggcaggcgctcccctcagaacgtcatggcccagcagaaagtcaccaaagaggaggctcggaagcgcaatgtacccgcatcggatgaggaggaaggagcagttctgttcgataactcgtcaaaggtagccgctgaacccttcgatactagctctggtagcgtacagctcatcgcgatcaaaccaaccgccctcccgatggtacctcccaccagtgatcgcagccaggaaagctccgccgtcctgaacggtgaggttaataaagctttgaaacaaaagtcagatatagaacattaccgcaataagcttcggcttaaagccaagaggaaaggatattacgatttcccagcggtcgagacaagcaagggattgactgagcggaaaaagatgtatgaaaaggcacctaaagaaatggagcatgttctggaccctgactcggaactgtgtgccccatttactgaaagcaaaaatcgccagcagatgaaaaactctgtataccgatctagacagagccttaacagcccgtctccgggagagaccgagatggacctgctcgtgactcgggaacgcccaagacggggtattcgcaacagtggctacgacaccgagcccgagattatcgaagaaacaaacattgacagagtgcccgagcccagaggttactcccgctccagacaggtcaaaggacacagtgaaacctcgaccctcagtagtcagccatccatcgacgaggtgcgccagcagatgcatatgctgctggaggaagcattttccctggcctctgctggccatgcgggacaaagtaggcatcaggaggcctatggatcggcacaacacctcccctatagtgaggtagtgacttctgccccaggcacaatgaccaggccgcgagcaggcgtgcaatgggtgcctacatataggcccgaaatgtatcaatactcactacctcggccagcatatcggttctcccaactccctgagatggtcatgggatccccacccccacctgttccccctcggacgggcccagtcgctgtggccagcttgcgacggagtactagcgatattggctccaaaactagaatggccgagtcgactggccctgaacctgcccaactgcatgattctgcatcgtttacacagatgagtcgcggacctgtgagtgtcactcagctggaccagtctgctctcaattattccgggaatacagtaccggcagtcttcgccatccccgcagccaacagacctggattcaccgggtactttattccaacgccacctagctcttatcggaaccaggcgtggatgtcatatgccggtgaaaacgagctgccttctcaatgggccgattcagtacctcttcccggatatatcgaggcatacccgaggtctcggtatccacagtcatctcctagcagattgccaagacagtacagtcagcccgctaatctgcacccatcgctcgaacaggcaccagccccttctacagccgctagccagcagtccctcgccgagaatgaccccagtgacgcgcctctaactaacatttccactgccgcattggtcaaagctattcgcgaggaagttgcgaagctcgctaaaaaacagacggatatgtttgaatttcaggtgta

SEQ ID NO: 218375 - DNA, 783 bp, synthetic construct
  misc_feature 1..783: note = Description of Artificial Sequence: Synthetic coding sequence
  source 1..783: mol_type = other DNA
atgatggatccttgcagcgtcggcgtgcaattaaggacgactaacgaatgccataagacctactataccagacataccggttttaaaactcttcaggagctttcttctaatgatatgttgctccttcagctgcgtacaggcatgactctaagcggaaacaataccatctgctttcaccatgttaagatatacattgacagatttgaagacttacagaaatcatgttgtgatccattcaacatccataagaaactggccaagaagaacctccatgtgattgacctggacgatgccacatttctgtcggctaagtttggaaggcagctggttcccggttggaagctttgccccaagtgcactcaaattatcaacggaagtgtcgacgtcgatacagaggacagacagaagcgcaaaccagagtccgacggcaggactgccaaggcactgagatctctccagttcaccaatccaggcaggcagacggaattcgctccggaaacgggtaagcgggaaaagaggaggctaaccaagaacgcaaccgcagggagcgaccggcaggtgatccctgccaagagcaaggtgtatgattcacaagggctgcttatattttctggaatggatctctgcgactgtctggacgaggattgtcttggctgcttttacgcctgtccagcatgcgggtccaccaagtgcggggctgagtgccgctgtgatcgtaaatggctttacgaacagatagagattgagggcggagaaatcatccacaataagcacgcagggtag

SEQ ID NO: 218376 - DNA, 507 bp, synthetic construct
  misc_feature 1..507: note = Description of Artificial Sequence: Synthetic coding sequence
  source 1..507: mol_type = other DNA
atgatggacccttgttctgtaggggtgcagttgcgaacaacgaatgaatgccataagacctactatacgcgacacacagggtttaagactttacaggaactgtcctctaacgatatgctgctcttacaattgcggaccgggatgaccctcagcggaaataacaccatctgcttccaccacgtgaagatatacattgaccggttcgaggatttgcagaaatcgtgttgcgacccctttaacattcataaaaagttagccaagaaaaacctacatgtgattgatttggacgatgctactttcctgtccgcaaaattcgggcgtcaattagtgccagggtggaagctctgccccaagtgtacccagattattaacggctctgtggatgtggacaccgaggacaggcagaagcggaaacccgaaagtgacggtcggaccgccaaagccctgcggtcactgcaattcaccaatcccggaaggcaaaccgagttcgccccagagacggggtag

SEQ ID NO: 218377 - DNA, 180 bp, synthetic construct
  misc_feature 1..180: note = Description of Artificial Sequence: Synthetic coding sequence
  source 1..180: mol_type = other DNA
atgagacagcttaagggcaaaccaaagaaagaaacttccaaggataaaaaggaacgtaaacaggctatgcaggaggcacggcagcagatcacaactgtcgtgttgcccaccttagctgtagttgtgctgctgattgtcgttttcgtttacgtggctacgcgccctactataactgaatag

SEQ ID NO: 218378 - DNA, 180 bp, synthetic construct
  misc_feature 1..180: note = Description of Artificial Sequence: Synthetic coding sequence
  source 1..180: mol_type = other DNA
atgagacagctgaagggaaagcctaaaaaagagacttccaaggacaagaaggaacggaaacaagcaatgcaggaagccagacagcagatcactaccgtcgtcctgcctactctggccgtggtggtgctgctgatcgtggtctttgtgtacgtcgccacgaggccgacaataaccgaatag

SEQ ID NO: 218379 - DNA, 144 bp, synthetic construct
  misc_feature 1..144: note = Description of Artificial Sequence: Synthetic coding sequence
  source 1..144: mol_type = other DNA
atgaggcagctgaagggtaaacctaaaaaggagaccagcaaagacaagaaagaacgcaaacaggccatgcaggaagcccgtcagcagattaccactgttgtccttcctacactggctgtcgtcgtcctcctgatagtggtgtag

SEQ ID NO: 218380 - DNA, 180 bp, synthetic construct
  misc_feature 1..180: note = Description of Artificial Sequence: Synthetic coding sequence
  source 1..180: mol_type = other DNA
atgaggcagcttaagggaaaacccaagaaagaaacttcgaaagacaaaaaggagagaaagcaggcaatgcaggaagctagacagcaaattaccaccgtcgtgctgcccacgttagccgtggtggtcctgctgatcgtggtcttcgtatacgtagctacgcggcctaccataacggaatag

SEQ ID NO: 218381 - DNA, 159 bp, synthetic construct
  misc_feature 1..159: note = Description of Artificial Sequence: Synthetic coding sequence
  source 1..159: mol_type = other DNA
atgcgtcagctcaagggtaaacctaaaaaggaaacaagtaaggataagaaggaacgcaagcaagccatgcaggaggcccgtcaacagatcactacagtggtgcttccaactctggctgtggtagttctgctgatcgtagtctttgtctatgtagcctag

SEQ ID NO: 218382 - DNA, 3336 bp, synthetic construct
  misc_feature 1..3336: note = Description of Artificial Sequence: Synthetic coding sequence
  source 1..3336: mol_type = other DNA
atgcactggctgcccgcaggccatgacattaatggagcgttggagccttcaaacattgacaccagcattctggaagagtacattagcaaagaagacgcctccgacttatgtttccccgacatcagtgccccagctagttcagcttcttactctcacggtcagccggcaatgcccggtagctccggggtgcaccacctgtccccccctggcggaggcccatctccagggcgacatgggcctctcccccctcctggatatggtaccccactgaattgtaataataacaacgggatgggggctgctcctaagcctttcccaggcggaaccggcccacccatcaaagctgaacctaaagcaccgtacgcaccgggaacactgcccgactctccccctgatagcggttctgaggcttacagtcctcaacaggtgaatgaacctcacttgttacgtaccatcactccagagaccctatgccatgtaggagtccccagtcgactcgagcaccctcctcctcctcctgctcatttgccaggccctcctccaccacctcccccacccccacattatccagtcctgcaacgggatctctacatgaaggcagaaccgcctattccccactacgctgcaatgggccagggccttgtccccaccgacctgcatcatacccagcaatcccaaatgctccaccagttgctgcagcagcacggcgctgagctgcctacgcaccctagcaagaaacgcaagcactctgaatccccaccatccacccttaacgcccagatgcttaacggtatgatcaagcaggagccaggcactgtcactgccctccccttgcaccccacaagagcgccttctccaccgtggccacctcagggtcctctctcacctggccctggtagcctgcctttgagcatcgccagggttcaaactccgccatggcatccccctggagccccaagccctggcctgctccaggattctgatagtctgagtgggtcatacctcgaccccaattatcaatccatcaaatggcagccacaccagcagaataaatgggccactctctatgacgctaactataaggagctgcctatgttgacctatagagtcgacgccgacaagggcttcaattttagcgtgggcgatgatgcctttgtgtgtcaaaagaagaaccattttcaggtcaccgtgtacattggtatgcttggggagccgaagtacgtgaaaactcctgaaggattgaaacctttagactgtttctatctcaaacttcatggtgttaagttggaggctttaaatcagagtatcaatattgagcaatcacaaagtgacagaagtaaacgacctttcaatccggtgactgtcaacctgcccccagaacaggtgaccaaggtgaccgtcggacggctccatttctccgagaccaccgctaataatatgcggaaaaaagggaagccaaaccctgatcagcggtacttcatgctggtggtggctctccaggcccatgcccagaaccagaattataccctggccgctcagataagtgagcgtatcatcgtgagggcttcaaatcccggacaattcgagtcagatagcgacgtgctctggcagcgggcacaagttcccgacaccgtcttccaccatggtagagtgggtattaacactgatcgcccagacgaggctctggtcgtccacggtaatgtgaaagttatggggagtctgatgcatccaagcgatcttagagccaaggagcatgtccaggaggtcgatactaccgagcaactgaagcggatcagcagaatgaggttggtgcattatcgctataagcccgagttcgctgcctctgccggaatagaagccaccgctcccgagacaggggtgattgctcaggaggttaaagagatattgccagaagccgtcaaggacaccggagacatggtgtttgcaaacgggaagactatcgagaacttcttggtggtgaataaggaacgcatttttatggaaaatgtgggtgcagtgaaggagctgtgtaaactcactgacaaccttgaaacccgaatcgatgagctggagaggtggagccacaagttggctaaactgcggagactagatagtcttaaatctacagggagcagcggcgcattcagccatgccggatcccagttctctagggccggttcagtgccccataagaagcggccacccaaagtggctagcaagtcttcttccgtggtgccagatcaggcgtgcatttcgcagcggttcctgcaaggaactattattgcccttgtggttgtcatggccttcagtgtggtatctatgagtacactttatgttctttccctccggacggaagaggatttagtggataccgacggaagatcaagccagagctttggcactactcaattaaggcagagtcccctaaccaccggactgccaggaatccagccctcactattactcgtaactacatccttgactagctcagcccctggttcggccgttcggaccctggatatgtgctcatcacatccctgcccggtcatttgctgctcctctcctactacaaacccaacgaccgggccaagtctgggaccttcgttcaacccgggtcacgtactctcgccaagcccatccccgagcactaaccgttcgggaccctcgcagatggccttgctgcccgtgactaatataagagctaagtcatggggcctgtctgttaatggcattggacatagcaagcaccacaagtccctggagccactggcttcccccgcagtgcccttccccggaggacaaggcaaggccaaaaatagcccgtctttgggattccacggacgcgctaggaggggtgctctgcagagctctgtgggacctgctgaacctacctgggcacagggacagtccgagccggtacccagtctgacatccatccaggtgctggaaaattcaatgtctattaccagccagtattgcgcgccaggcgatgcctgtcgccctggaaacttcacttaccacattcccgtgagctcaggaacaccgctccatctttcgctcactctgcagatgaacagtagttctccagtgtccgttgtgctgtgtagcctaaggagcaaagaagaaccgtgcgaggaggggtccctgccacaaagtctacatacccaccaggatacccagggcactagccaccgatggccaattaccatacttagctttagggaattcacataccacttccgagtggcgctgctgggccaagcgaattgcagctcagaagcgcttgcccaaccagccacagactaccacttccacttttaccgtctctgtgattag

SEQ ID NO: 218383 - DNA, 3456 bp, synthetic construct
  misc_feature 1..3456: note = Description of Artificial Sequence: Synthetic coding sequence
  source 1..3456: mol_type = other DNA
atggaggtggttgatgagacagaagcattgcagagatttttcgaaggccacgatatcaatggagccctggagccttcaaacatcgacacaagcattttagaggaatacatcagtaaagaggatgcctcagacctctgttttcccgatatatctgccccagcctcatcagctagttactctcatgggcaaccagctatgccagggtccagcggagttcaccacctgtcccctcctggaggcggtccaagtccgggaagacacggacccctgcctccccctggttatggcacccctcttaattgtaataataacaatggaatgggggctgcccctaaacctttcccagggggaaccggacccccaatcaaagccgagcccaaggccccatatgctcctggcaccctccctgacagccccccagatagcggaagcgaggcgtatagtccccagcaggtgaacgagccacatctgctgcgcaccatcacacctgagactctatgccatgtgggagtgcccagtagactggaacaccccccacctccacctgcccacctccccggacctccgccacctcctcctccaccccctcattatcctgtactgcaacgagatctgtacatgaaagccgagcccccaattccacactatgccgctatgggacaaggcttggtgcccaccgaccttcaccatacccagcagagccagatgctccatcaactgctgcagcagcatggcgcagagttacccactcatccatcaaaaaaaaggaaacatagcgaaagcccaccatcaaccttgaatgcccagatgttgaatggcatgataaaacaggaacccggtacagttaccgctcttccccttcacccaacccgggctccgagcccaccctggccaccccagggtcctcttagcccaggaccagggagcctgccactctccatcgcccgtgtgcaaacccctccttggcaccccccaggagccccatcccctggcctgcttcaggacagtgacagcttatccgggtcatacctcgaccccaactaccagtctatcaaatggcaaccacaccagcagaacaagtgggctaccctgtacgatgccaattataaggagctgccaatgctgacgtatagagtggatgcagacaaaggatttaattttagcgtgggcgacgacgcctttgtgtgtcagaaaaaaaatcatttccaggtgaccgtctacatcggaatgctgggcgaacccaaatacgtcaagacaccagaggggctgaagcccctggattgcttttacctcaagcttcacggggtaaagttggaagcactgaaccagtcaataaacattgagcaatcacagagtgacaggtcaaaacgaccttttaacccagtgaccgtgaaccttccgcctgagcaagtgactaaagtaacagtagggaggcttcattttagtgagacaaccgccaataatatgaggaagaaaggcaagcctaaccccgaccagagatacttcatgttggtagttgcgctccaggctcacgcccagaaccagaattacacactggcagcccagatttccgaacgaatcatcgtgagagccagcaacccaggtcaattcgagtccgattccgatgttctatggcagcgagctcaggtgccggatactgtctttcaccacggacgtgtcggaatcaacaccgatcgacctgacgaggccctcgtggtccacgggaatgttaaggtgatgggaagccttatgcacccatctgacctgcgggcaaaggagcacgtgcaagaggtggacacgacagagcagcttaaaagaatttctcgtatgaggctggtacattataggtacaaacctgagtttgccgcatccgcaggtattgaagccaccgctccagagactggagtgatcgcacaagaagtcaaagagattctgccggaggccgtgaaggatacgggcgacatggtctttgccaatggcaagaccatagaaaacttcctggtcgtgaataaagaacgaatatttatggagaacgtcggtgccgtgaaagaactatgcaagctgaccgacaatctagagactcgcattgacgagttagagcggtggagccacaagctggccaagttgcgaaggctggactccctaaagtctactggctcatcgggcgctttctcccatgctggcagtcagtttagccgcgctgggtctgtaccccataaaaaacgccctccaaaggtggcttccaaatcatctagtgtggtgcccgaccaggcttgcatctctcaaagattccttcagggtactatcatagcactcgtggtggtcatggccttttccgtagtgagcatgtctactctatatgttctcagccttcgtactgaggaagacctcgtagatacagacgggagtttcgctgtgagcactagctgcctgctggccctcctgcggcctcagcccccaggaggatccgaggcgctctgcccatggtcttcacaatcatttgggactacacagctccgtcagtcccccctgacaaccggcctccctgggatccaaccaagtcttttactggtgacaacatccctaacctcatctgcccctggttcagcggtgcgcacccttgacatgtgttcctcccatccttgtccagttatatgctgctctagtcctacaacaaaccccacaactggaccaagtctcggcccttcgttcaacccagggcacgttctcagccctagtccatccccaagcacgaaccgctcaggacctagtcaaatggcactgttacccgtcactaacataagagcgaaatcgtggggcctaagcgttaatggcataggtcattcaaaacatcacaagtctttggagcccctcgccagtccagctgtgccttttcccggtggacagggcaaagccaagaacagcccctcactgggcttccatggaagagcaaggagaggggctctgcagagcagcgtcggccctgcggaacccacgtgggctcagggccaaagcgcctccctactggccgagccagtacctagtctgactagcattcaagtgttagagaattccatgtctatcacgtctcaatattgtgcccctggcgatgcatgtaggcccggtaacttcacatatcacattcctgtgtccagcggcacccccctccatctttcacttaccttgcaaatgaactcatcatcccctgtgagcgtggtgctttgctctctgcggagcaaggaagagccatgtgaggaaggctccctccctcaaagtctccacacccaccaggacactcaggggacaagccatcgctggcctattacgattctcagtttcagggaatttacctatcatttccgggtcgcgcttctgggacaggcaaattgcagcagcgaagctctcgctcagccagcaactgactaccactttcatttctacaggttgtgtgattag

SEQ ID NO: 218384 - DNA, 1449 bp, synthetic construct
  misc_feature 1..1449: note = Description of Artificial Sequence: Synthetic coding sequence
  source 1..1449: mol_type = other DNA
atgcttacctaccgcgtcgacgccgataaaggatttaacttttccgttggcgacgatgcctttgtgtgtcaaaagaagaaccattttcaggtcactgtgtacataggtatgttgggcgagcccaagtatgttaaaaccccagaggggctgaaacctctcgactgtttctacctcaaactgcatggcctcgaagctctcaaccaatcaatcaatattgagcagtctcagagcgatcggtccaagaggccttttaaccctgtgactgtgaacttgccacccgaacaagttacaaaagtgaccgtcgggaggctacacttttccgaaacaacagcgaataatatgcgcaaaaaggggaagcccaacccagaccagcgatatttcatgttggttgtggcactgcaagctcatgcacagaaccagaactataccctcgcagcccagatatccgagcgcatcattgtcagagcttcaaatccagggcaattcgagtccgattccgatgtgttgtggcagcgtgcgcaagttcctgataccgtattccaccacggtcgggtggggatcaatacggatcggccagacgaagccctggtggtgcacggaaacgtgaaggtgatggggtccttgatgcatcccagtgatctccgggctaaggagcatgttcaagaggtggataccacagaacaacttaagaggattagtcggatgagacttgttcactaccgttacaagcccgagtttgccgcttcagctggaatcgaggccactgcccctgaaactggggttatcgcccaagaagtaaaggaaatcctgccagaggcggttaaggacacaggggatatggtcttcgccaacggcaagactatcgagaactttctggtcgtaaacaaagtttgcgggctgaagtatgtggtatactgtgaagacgatgtctgtcatctgccagtcctctctctgggcgctaaggaggcttgggctgtgaaagaactttgcaaactcactgacaacttggagacgaggatcgacgagctcgagaggtggtctcacaagctcgcaaaactgagaaggctcgactccctcaaaagcaccggcagcagcggcgcattctcccacgcaggctcccagttctctcgtgccggatcagtgcctcataaaaagcgacccccaaaggtagcctcaaaggtgggctcttcctccgtagtcccagatcaagcctgtatctcccagcgctttctccagggaactatcattgcattagtggtggtgatggcatttcggcaccacttaggtgcccaaccacaggagcagggtccccagccgtgccccagagaaagagctcttgacggaggaagttccagtaatggacaccctttcctgtggctacaacgcggagtgcatgtacataccgtgagggcggagcccgcacaccgagggggtccagggcgacactag

SEQ ID NO: 218385 - DNA, 789 bp, synthetic construct
  misc_feature 1..789: note = Description of Artificial Sequence: Synthetic coding sequence
  source 1..789: mol_type = other DNA
atggccgcaccatcagggacagttagcgacagcgagtctagcaactcaagcagtgatgctgaagagctggagcgctgtcgcgaggcagccatgcccgcatgggggctcgagcagaggcctcacgttgccggtaagcccagggccggagccgctaatagtcagctcagtactagtcagccatctcttcggcacaaggtgaacgagcacgagcaagatggaaacgaactacaaacaacccctgaatttcgggctcacgtcgccaagaaattaggtgcactcctggattcgtttataacgattagcgaagcggcaaaagagcccgcaaaagcaaaggtgcagaaggtagccctggaagatgatggatttcggctcttttttacctcagtgcccggaggccgagagaaggaagaatccccacaaccgcgacgcaaaagacagccgtcgtcctccagcgaggatagcgacgaggaatggcggcgatgtcgggaggcggcagtcagcgcctcagatattctgcaggaatcagccatacactctccaggcaccgtggagaaagaggccaagaaaaaacgtaaacttaagaaaaaggccaagaaggtggcctctgttgattccgctgtggccgcaactacaccaacttcaatggctaccgtccagaaacaaaagtccggcgaattgaacggtgaccaggtgagtctgggtacaaaaaaaaagaagaaggccaaaaaggcttccgaaacctccccctttccccctgcaaagagtgctaccgcaattcctgcaaattag

SEQ ID NO: 218386 - DNA, 666 bp, synthetic construct
  misc_feature 1..666: note = Description of Artificial Sequence: Synthetic coding sequence
  source 1..666: mol_type = other DNA
atgttctgtcaaaaccctggcgcagccaacagccagctcagcacttcgcaaccctcgctgcgacataaggtaaacgaacatgaacaagacggaaacgagctgcaaacaaccccagagtttcgcgcacatgtcgcaaagaaactgggagccctgttggattcttttatcaccatcagcgaagccgctaaggagccagctaaagccaaagtgcagaaagtggccctggaggatgacggcttcaggttattttttacgagcgtgccagggggtcgggagaaagaggagtcgccacagccgcgaagaaagagacagccttctagctcttcctccgaagactctgatgaggaatggcgacggtgtagggaagctgctgtgagcgctagtgatatcttgcaggaaagtgccatccattcccctggaaccgtggaaaaggaggccaagaagaagcgaaaactcaagaaaaaggcaaaaaaagttgcttcagtggacagtgctgtggcagccacaaccccgacctccatggctacagtgcagaaacagaaatccggtgagctcaacggcgaccaggtgtctcttgggactaaaaagaagaaaaaggcaaagaaagcatcggagacaagccccttccctcctgccaaatcagcaactgctattccagccaactag

SEQ ID NO: 218387 - DNA, 699 bp, synthetic construct
  misc_feature 1..699: note = Description of Artificial Sequence: Synthetic coding sequence
  source 1..699: mol_type = other DNA
atgccagcgtggggtttggaacagaggccacacgtggctggaaaacctcgagctggcgcagcaaactcccagttaagtacaagccaaccatcgctcaggcataaagtgaacgagcacgaacaggacggcaatgaacttcaaaccactcctgaattccgcgctcatgtggctaaaaagctgggcgctttattggacagctttattaccattagcgaggcagccaaggagccggcaaaagccaaagtccagaaagtcgccttagaagatgatggcttcaggttgttcttcacctcagttcccggaggcagagagaaagaagagtctccgcagcctcgccgaaagaggcagccgtctagcagctcagaagactctgatgaggagtggaggcgctgtcgggaggctgcagtgtcagcaagcgacattctccaggagagcgccatccacagccccggaacggttgaaaaggaagcgaaaaagaagagaaaactcaagaaaaaagcgaaaaaggtcgcatctgtggatagcgccgtagctgcaaccaccccaacatcgatggccacagttcagaaacaaaaaagcggtgagcttaatggggaccaggtcagcttggggactaaaaagaaaaaaaaggccaaaaaggcctccgagacctccccatttcctcccgctaagtccgccacagccattccagccaactag

SEQ ID NO: 218388 - DNA, 1497 bp, synthetic construct
  misc_feature 1..1497: note = Description of Artificial Sequence: Synthetic coding sequence
  source 1..1497: mol_type = other DNA
atggacgttacggatcactacgaggacgtccggaagatctacgatgactttctaaaaaatagcaatatgctcgacttaatagacgtttatcagaagtgccgggcactgactagcaactgtgagaactacaataccgtgtcccccagtcaactgctggacttcctttccggcaagcaatatgctgtcggagatgagacggacctgtctatccctaccagcccaaccagtaagtataacagggacaatgaaaaggttcagcttctcgcgcgtaagatcatctttagctacttgaacctgctggtgaactcaaagaatgacttggccgtcgcatacattctcaacatcccagatcgcggtctcggacgagaagccttcactgacctgaagcacgccgctcgagagaagcagatgtcaatcttcctggtggccaccagttttatccggaccatcgagctggggggaaaaggttacgccccacccccaagtgacccactcaggacacatgtcaaaggcttaagcaatttcatcaatttcattgacaagcttgacgagatcctcggagaaattcccaatccctctatagcagggggtcagattctcagtgtgattaagatgcagcttatcaagggacagaactcgcgagaccctttttgtaaagctatcgaggaggtggcacaggatctggaccttcgcattaaaaacataattaactcccaagaaggggtggttgcactgtctacaactgacatttcacccgcacggccaaaatcccatgccatcaaccacggcaccgcttactgcggcagagatacagtgaaggctcttctggttctcctggatgaagaagcagccaacgcacctaccaaaaacaaggccgagttactttatgatgaggagaatactatccatcatcacggaacttctattctgaccctgttccgttcccccacccaggtgaataattcaattaaaccactccgggaacgaatttgcgtgagcatgcaagaaaaaaagattaagatgaaacagacactcattcgcagccaattcgcatgtacgtataaagacgactatatgatttctaaggataattggaataatgtgaacttggcctccaaacccctgtgcgtgctgtacatggagaatgacctgagtgagggagttaaccctagcgtgggaaggagtactattgggacttctttcggaaacgtccatctggatagaagtaagaacgagaaagtgagtaggaagagtactagccaaaccggcaataaatcctctaaacggaagcaggtagacctggatggggaaaatatcctttgcgataataggaacgaaccgcctcaacacaaaaacgctaagatccccaaaaagtccaatgattcccaaaaccggttgtatggcaaactggctaaggtggctaagtccaataagtgcacagcaaaggacaagcttataagcgggcaagctaaactgacccagttctttagactctag

SEQ ID NO: 218389 - DNA, 1740 bp, synthetic construct
  misc_feature 1..1740: note = Description of Artificial Sequence: Synthetic coding sequence
  source 1..1740: mol_type = other DNA
atggccgtcttcaaccaaaagtctgtatctgacatgattaaagaattccgcaagaattggagggccctctgcaactccgaacggactacactctgcggggcagactcaatgcttttggccctccagctttccatggctgagaacaataagcagcacagtggggaattcactgtctctctgtccgatgtcctactgacatggaaatatctacttcatgagaaactaaatttgcctgttgagaatatggacgtgacagatcattatgaggatgttaggaaaatttatgacgacttcttgaagaacagcaacatgctggatctgatagacgtgtaccagaaatgccgcgctttaacgagcaactgcgagaactataacaccgtctccccctctcagctgctggacttcctgagcgggaagcagtacgcggtgggggacgaaacagatcttagcatccccacatcgccgacatcgaaatataacagggacaacgaaaaagtgcagctgctcgcgaggaaaattatattcagttacctgaacctgctcgtcaatagtaagaacgatttagccgtggcctatatccttaatataccagaccggggtctgggtcgtgaagctttcacggatcttaagcacgcggctcgggagaagcagatgtccatttttttggtggcaacttcctttatccgcactattgaactgggcggaaagggctacgcacctccccctagcgaccctcttagaacccacgtgaaaggactttcaaacttcatcaatttcatcgataaactggatgagatcctgggcgaaatccccaacccgagcatcgctggtgggcagatcttgtctgtaatcaaaatgcagctcatcaaaggccagaatagccgggaccccttttgcaaggcaatagaggaggtggctcaggacctggatctgagaattaagaacattatcaatagccaggagggcgtggtggcccttagcacaaccgacataagccctgcgagaccaaagtcccacgccattaatcacggtaccgcgtactgtggaagagacacagtcaaggccttactggtcttactggacgaggaagccgctaacgcacctaccaagaataaggctgaattgctgtacgatgaggagaacaccatccatcaccatggcacctctattctgacactcttcagatcaccaacccaggtaaataattctatcaagcctttgagggagcgcatatgcgtctcaatgcaggagaaaaagatcaaaatgaagcagacgttaattagatcacagttcgcttgtacgtataaggatgactacatgatatccaaggacaattggaataacgtgaacctggcctcaaaaccactttgcgttttgtacatggagaacgacctgtcggagggtgtcaatccgtcagtgggtagaagcacaatcggtacaagctttggcaatgtgcacctggacagaagtaagaacgagaaagtcagtcggaagagcacgagccagacgggcaacaaatcaagcaaacgtaagcaggtcgatctggatggcgaaaacattttgtgtgacaaccgcaacgagccaccccagcacaaaaacgccaaaatacccaagaagtctaacgattctcaaaatcgtctgtacgggaagctggctaaggttgctaaatcaaacaagtgtactgcaaaggacaagctgattagtggacaggccaaactgacccagttttttcgactgtag

SEQ ID NO: 218390 - DNA, 894 bp, synthetic construct
  misc_feature 1..894: note = Description of Artificial Sequence: Synthetic coding sequence
  source 1..894: mol_type = other DNA
atggccgtgttcaatcagaagtctgtgagcgacatgatcaaggagttcagaaaaaactggcgagctttgtgcaatagcgagcgaaccacactgtgcggtgccgacagtatgctgctagctttgcagctctcgatggcagagaacaataagcagcattccggagaatttacagtctctttgagcgatgtacttctgacctggaagtatttattacatgagaagttgaacctcccagtggaaaacatggacgtgacagatcattacgaggatgtgcggaaaatttatgatgattttctgaagaactcaaacatgctcgatctgatcgacgtttatcaaaagtgccgggctcttacttctaactgcgagaactataatacagtcagcccaagtcaactcctggattttctgagcgggaaacagtacgccgtgggcgacgaaacggatctgtctattccaactagtccaacctccaagtataatcgagacaacgaaaaggtgcagttgctagctagaaagattatcttctcgtaccttaacctgctggtgaattcgaaaaatgatctggccgtggcctacatcttgaacatccctgatagaggcctcggaagggaggcgttcaccgatttgaagcacgctgcacgggaaaagcagatgagcatcttcctcgtggcaactagttttatacgtaccatcgaactaggtggaaagggctacgccccacctccaagtgatccattgcgtacccacgtcaagggactgtccaatttcattaatttcatcgataagctggatgaaattctgggagagatcccaaacccccgtggttgtaagagtatctgttggaaaataaacaattggaatgagttctggaagtgctcatccggccagaagtag

SEQ ID NO: 218391 - DNA, 1497 bp, synthetic construct
  misc_feature 1..1497: note = Description of Artificial Sequence: Synthetic coding sequence
  source 1..1497: mol_type = other DNA
atggacgttacggaccactatgaggacgtgcgaaagatatatgatgatttcctcaaaaattccaacatgctggacttgattgacgtctaccaaaagtgccgtgctctgaccagcaattgcgaaaactataacacagtcagcccgtcacagctacttgattttctgagcggcaagcaatacgctgtcggagatgaaactgacctgagcattccgaccagtccaacttctaagtataaccgagataacgaaaaggtccagctccttgcaagaaagatcatttttagctatcttaatctactcgtaaattccaaaaatgacctcgccgtggcttatatcctaaacattcccgatcggggactgggccgagaagcatttacagaccttaagcacgccgcacgggaaaaacaaatgagtatttttctggtcgcgaccagcttcatcagaacaatagaactgggtggcaagggatacgcccctccgccaagtgatcctctgaggacccacgtgaagggcctatcgaatttcatcaatttcatagataagctggacgagatcctgggagagatccccaatccatctattgctggcggacaaattctgagcgtcatcaagatgcagttgatcaaaggacaaaactcgcgggatccattctgcaaggccatcgaggaagtggcccaggacctagacctccggataaaaaacataataaactctcaggagggtgtcgtcgccctgtctaccactgacattagcccggctaggccaaagtcacatgccattaatcatgggacagcatactgtggccgagatactgttaaggcactgctcgtgctcttagatgaagaagctgctaacgcgcctactaagaacaaggctgaactcctttacgacgaggaaaatacaatacatcatcacggtaccagcattttaactttattccgcagtcccacgcaggtcaacaactcaattaagccattgagagaaaggatttgcgttagcatgcaggagaaaaagatcaaaatgaagcagaccttgatcagaagtcagtttgcatgcacctacaaagacgactacatgatttcgaaagacaattggaataacgtaaatctggcttcaaagcctctgtgtgtgctgtacatggagaacgacttgagcgagggcgtgaacccatcagtgggtcgatcaacaattggaaccagcttcgggaatgtgcacctggaccggagtaagaatgaaaaagtatcacgtaagtccacaagtcagaccggcaacaagtcgtcaaaacggaagcaagttgacctggacggagaaaacatcttgtgcgacaatcgtaacgagccaccacagcacaaaaacgccaaaattcctaagaagtccaatgactcccagaataggctctacggaaaactggctaaagtggccaaatccaataaatgcaccgcgaaagataagctcatttcaggtcaagccaaactgacacaattcttccgactctag

SEQ ID NO: 218392 - DNA, 813 bp, synthetic construct
  misc_feature 1..813: note = Description of Artificial Sequence: Synthetic coding sequence
  source 1..813: mol_type = other DNA
atggcccgtttcgcgctgacagttgtgagacatggagagacccgatttaacaaagagaaaataattcaaggacagggagtggacgagccgttgagtgagactggattcaaacaggctgccgctgccggaatatttctgaataatgtgaaattcactcatgccttcagctcagacctgatgaggacgaagcagaccatgcatggcatccttgagcgatcgaaattttgcaaagatatgaccgtcaagtatgattctcgactgagggagcggaaatacggagtcgttgaaggcaaagctctgagtgagttgcgagcaatggccaaggccgcacgcgaagaatgtcctgtgttcactccccctggtggtgaaacactcgaccaggtgaaaatgagaggcatcgactttttcgaattcctgtgtcagttgatcctgaaggaagctgatcagaaggaacagttttcccaggggtcaccatcaaactgccttgagacctcgctggctgaaatcttccccttagggaagaaccactcctcaaaggtcaatagcgacagcggcattccaggcctggctgcctcggtgctcgtggtgtctcatggcgcttatatgcgcagcctcttcgactatttcctgaccgacctgaagtgttcattgcccgctactctgtcccggtctgaacttatgagtgtaacacccaacacaggcatgtccttgttcattattaatttcgaagaaggacgggaagtgaaaccaaccgttcaatgtatttgcatgaacctgcaagaccacttaaacgggttaacggaaacgaggtag

SEQ ID NO: 218393 - DNA, 501 bp, synthetic construct
  misc_feature 1..501: note = Description of Artificial Sequence: Synthetic coding sequence
  source 1..501: mol_type = other DNA
atgtcaacagttgggctattccacttccccacacccctcactcgaatctgcccagcaccatgggggctgagactttgggaaaagttaactttgctcagcccagggatagcagttacacccgtacagatggccggtaagaaggactaccctgccctgctgtccctggatgagaatgaattggaggagcagtttgtcaaaggtcacggaccgggtgggcaggcaactaataagacgagcaattgcgttgtgctaaaacatatccctagcgggatcgttgtcaaatgtcatcagaccaggagtgttgatcagaatcggaagttggccaggaagattcttcaggagaaggtggacgtcttttacaatggagagaatagccccgtgcacaaagagaaacgcgaagccgctaaaaagaaacaggagcgaaaaaagagagcaaaggaaacactggaaaaaaaaaagctgctgaaggagttatgggaaagcagcaagaaggtccattag

SEQ ID NO: 218394 - DNA, 501 bp, synthetic construct
  misc_feature 1..501: note = Description of Artificial Sequence: Synthetic coding sequence
  source 1..501: mol_type = other DNA
atgtctaccgttggcctctttcacttccctactcccctgaccaggatttgtcctgcaccctgggggctgagactgtgggaaaagctcacccttctcagcccaggtattgctgtgactccagtgcaaatggccggtaagaaggactatcctgcgctgttgtctctggacgaaaacgagcttgaagaacagttcgtcaaaggccatggcccaggcggacaggcaacgaacaagactagcaactgcgtcgtcctgaagcatattccgtccggcatcgtcgtgaagtgtcaccagacgcgtagcgtggatcagaaccggaaactcgccaggaagattctgcaggaaaaggtcgatgtgttctacaatggggagaacagccctgtgcacaaggaaaagcgggaggcagccaagaagaaacaggagcgtaaaaagcgtgcgaaggagacgctggagaaaaaaaagcttctgaaggaattgtgggagtcctctaaaaaagtacactag

SEQ ID NO: 218395 - DNA, 501 bp, synthetic construct
  misc_feature 1..501: note = Description of Artificial Sequence: Synthetic coding sequence
  source 1..501: mol_type = other DNA
atgtccactgtaggcctcttccattttcccacaccattaactagaatttgcccagcaccctgggggcttcggctgtgggaaaagcttaccctacttagtcccggaatcgcggtcacacccgtacagatggcaggaaaaaaggattaccccgcattgctttccctggatgagaatgagctggaggaacagttcgtcaagggccatggtcccggtggccaggcgactaataaaaccagcaattgcgttgttctcaagcatattcctagtgggatagtggtgaaatgtcaccagacaagatctgttgatcagaatagaaagttggcccgtaaaatcttacaggaaaaggtggatgtgttctataatggggagaacagcccggtacataaagagaagagagaggccgcaaaaaagaagcaagagcggaaaaagcgggctaaggagactttggagaagaagaaactactcaaagagctctgggagtcttccaagaaagtgcattag

SEQ ID NO: 218396 - DNA, 111 bp, synthetic construct
  misc_feature 1..111: note = Description of Artificial Sequence: Synthetic coding sequence
  source 1..111: mol_type = other DNA
atgtcaaccgtgggactgttccatttccccactccgttaacgaggatctgccctgctccttggggactacgcctgtgggaaaaattaacactgctgtcaccaggaatctag

SEQ ID NO: 218397 - DNA, 417 bp, synthetic construct
  misc_feature 1..417: note = Description of Artificial Sequence: Synthetic coding sequence
  source 1..417: mol_type = other DNA
atgagcaccgtcggtctgtttcactttcccacacctctcaccagaatctgtcccgctccgtggggcctgaggctgtgggaaaaactgactctcttatctccaggaatagccgtgacaccagtgcagatggctggaaagaaggactatcccgctctgctgagcttggacgagaatgagcttgaagaacagttcgtcaagggacatggtcctggagggcaggccacaaacaagacgtctaattgtgttgtgctcaaacatattccaagtggcatcgtggtgaaatgtcaccagacacgcagcgtcgatcaaaacagaaagcttgcccgaaagatactgcaggaaaaagtggatgttttctacaacggcgaaaatagtcctgtgcataaggagaaaagggaagctgccaagaaaaaatag

SEQ ID NO: 218398 - DNA, 291 bp, synthetic construct
  misc_feature 1..291: note = Description of Artificial Sequence: Synthetic coding sequence
  source 1..291: mol_type = other DNA
atgtctaccgtgggactgtttcacttccctactcctctgaccaggatttgcccagctccatggggactgagactgtgggaaaagctgaccctactttcacctggcattgctgtgactcctgttcagatggccggaaagaaggactaccccgcacttctgtcactggacgaaaatgaactggaggaacagtttgtgaaaggacacggccctggtgggcaggcaactaataaaacaagtaattgtgtagtgctcaagcatattccaagcggcatcgtggtcaaagtggactag

SEQ ID NO: 218399 - DNA, 423 bp, synthetic construct
  misc_feature 1..423: note = Description of Artificial Sequence: Synthetic coding sequence
  source 1..423: mol_type = other DNA
atgagcagatttctcaacgttttgaggtcgtggttggttatggtgtctattatcgctatgggaaatactctgcagtccttccgcgaccacacctttctatacgagaaactctataccgggaaaccaaatcttgtgaacggcttacaagcccgtacatttggcatttggactctcctcagtagcgtgattcgatgcctttgtgcaatcgacatccacaataaaacactgtatcacatcacgctatggaccttccttcttgccctgggccacttcctttctgaactctttgtgtatggcaccgctgcgccaacaataggagtattagccccattaatggtggcttcatttagcatcctcggcatgcttgttggcctgcgctacttggaggttgaaccagttagtcggcagaagaagcggaactag

SEQ ID NO: 218400 - DNA, 1443 bp, synthetic construct
  misc_feature 1..1443: note = Description of Artificial Sequence: Synthetic coding sequence
  source 1..1443: mol_type = other DNA
atgaaccggaccaagggagatgaagaagaatactggaactcatccaagtttaaggccttcacctttgacgatgaggacgacgagctgtcacagttaaaagagtccaagcgggctgttaattcactcagagactttgtggatgacgatgacgacgacgacttggaaagggtgagttggagcggggagccagtgggtagcatctcctggtccatacgggagacggcaggaaacagcggtagcactcatgaggggagggagcagctgaagtctagaaactctttttcatcctatgcccagttgccaaagcctacgtcaacctattccctgtcttcctttttccgggcactatccgatacccctgctaaaagttacgctccagaactcgggagacctaaaggcgagtatcgagattactcaaacgactggagtccaagcgacactgttcgcaggctacgcaagggaaaggtgtgctccctggaaagatttagaagcctgcaggacaaactgcagctcctggaggaggcggttagtatgcacgacgggaatgtgattaccgccgtgttaatattcctaaaaaggacactttctaaggaaatcttgttccgtgaactggaagtgaggcaagtggccctcaggcacctgatccatttccttaaagaaatcggggaccagaagcttctgctggacctattccgatttctggatcggacagaagagctagccctctctcattatcgggagcacctgaacatccaggatcccgacaagcgcaaagagtttctcaagacctgcgtaggtctaccgttctccgcagaagatagcgcccacatccaggaccattatactctgttggaacgccagataatcatagaggctaatgatcggcatctggaatccgcaggtcagaccgaaatcttccggaagcaccccaggaaggccagcatcttgaacatgccgctggtgactaccctgttttacagctgtttttaccattatactgaggctgaggggacattctctagtccggttaacctcaagaaaaccttcaagattccagataagcaatatgtactcaccgctctagcagccagggcaaagctgcgggcatggaacgacgtggatgccctgttcacaacgaaaaattggttgggctatacaaagaagcgggctccgatcggttttcaccgcgtagtcgagatcctgcacaagaacaacgctcccgtccagattctgcaggaatacgtgaaccttgttgaagacgtggataccaagctcaatcttgctacgaagttcaaatgccatgatgtcgtgatcgatacctaccgggacttaaaggatcgtcagcagctgctggcttaccggtcaaaagttgataagggcagtgcggaagaggagaaaatcgacgcgcttctaagctcttcccagatccgctggaagaactag

SEQ ID NO: 218401 - DNA, 1482 bp, synthetic construct
  misc_feature 1..1482: note = Description of Artificial Sequence: Synthetic coding sequence
  source 1..1482: mol_type = other DNA
atgaataggaccaagggagacgaggaggagtactggaactcaagcaagtttaaggcattcacttttgacgacgaagacgatgagctgagccagttaaaagagtcaaaaagggcagtgaacagcctgcgggactttgtggatgatgacgacgacgacgacctggagagagtatcttggtctggtgagcctgtcggctctatatcttggtctattcgagaaacggcaggaaacagcggatccacacatgagggacgcgaacagctcaaatcccgtaattccttcagcagctatgcccagcttccgaagcccactagcacctattccctgagttcattctttcgcggacgaacacgtcctggttccttccagagcctgtccgatgccttgagtgatactcctgcaaagtcctacgctccggaactaggaaggccgaagggagaataccgcgattactcaaatgactggagcccgtctgataccgtcagaagactgagaaagggcaaagtatgttctctggagagatttcggtctctccaggacaaactgcagctgcttgaggaggccgtgtccatgcatgacgggaacgttattaccgcggtcttaatcttccttaagcgaactctcagtaaagagatcctgtttcgtgagcttgaggttcggcaggtggctttgagacacttgatccactttcttaaggagattggcgaccagaaattgttgctggacttatttaggttcctggaccggacggaggagcttgccctgagccactatcgcgagcatctgaatattcaggatcccgacaaacgcaaagagttcctgaaaacttgcgttgggcttcccttcagcgctgaagattctgcacacatccaggaccattacacattgctcgaaaggcaaatcattattgaggctaatgacaggcatctcgagagcgccggtcagactgagatttttagaaagcacccaagaaaggccagcattttgaacatgcctttggtgaccacgctcttttatagctgcttttaccactatactgaggcagagggcaccttcagttcacctgtgaaccttaagaaaaccttcaagatccctgacaagcagtatgtactgaccgcgctggccgcacgcgctaaactgcgggcttggaatgacgtggatgctctattcacgaccaagaattggctgggttacacaaagaaacgcgcaccaatcgggtttcatcgggttgtcgagatcttgcacaagaacaatgcccctgtgcagatcttgcaggagtacgttaatctcgtggaggacgtagacactaaacttaacttggcaaccaagttcaaatgtcacgatgtggttatcgatacttacagagaccttaaggatagacagcagttactcgcttaccgctcaaaggttgacaaaggctctgccgaggaagaaaagattgatgcacttctttcttctagtcagatcaggtggaagaactag

SEQ ID NO: 218402 - DNA, 1335 bp, synthetic construct
  misc_feature 1..1335: note = Description of Artificial Sequence: Synthetic coding sequence
  source 1..1335: mol_type = other DNA
atgaacaggaccaagggggatgaagaggagtactggaacagcagcaagtttaaagcgttcacgtttgacgatgaagatgatgaattatcccagctcaaggagtcgaagagggctgtgaactccctccgcgatttcgtggatgacgacgatgacgatgatcttgaacgcgtgtcttggagtggagaacccgttggctccaggactcgcccaggcagctttcaatcactgagtgacgccctgtccgatacgcctgcaaaaagctatgccccagaactgggacgtccgaaaggcgaatacagagattactcgaatgactggtcgccttctgatactgtgcggaggttacgaaagggaaaagtctgtagcctagagcgatttagatctcttcaggacaaattgcagttgctggaggaagctgtgagtatgcatgacggcaacgtgataaccgctgtcctcattttcctcaagaggaccttgagtaaggaaatcctatttagagagctggaagtgagacaggtggctctcagacacctgatccatttcctcaaagaaattggggatcagaagctgttattggatctcttcagatttctggaccggacagaagagctcgccctgtcgcattatagggaacatctaaatatccaggatccagacaagaggaaggagttcctgaagacgtgcgttgggttacctttcagcgctgaggactccgcccatatccaggaccattacaccctgctcgagcgccagatcattattgaggccaacgaccgtcacttggaatctgctgggcaaaccgaaatttttagaaagcatcccaggaaggcttcaatactaaacatgcccctggtgaccaccctcttctattcctgtttctaccactacacagaggctgaagggactttcagtagccccgttaatttgaagaaaacattcaaaattccagataagcaatacgtgctcacagctcttgctgccagagccaagctccgtgcttggaacgacgtggatgccctgtttacaactaagaactggttgggatataccaaaaaaagggccccaatcggattccaccgtgtggtggagatcttgcacaaaaataatgccccagtgcagatcctgcaggaatatgtgaacctagtggaggacgtggataccaaattaaatttggctactaaattcaaatgccatgacgttgtaatcgatacctatagagacctgaaggatcggcaacaattactcgcctacagatctaaggttgacaagggtagcgctgaggaggagaagatcgatgccctcctatcgtcctcacagattcgctggaagaattag

SEQ ID NO: 218403 - DNA, 1482 bp, synthetic construct
  misc_feature 1..1482: note = Description of Artificial Sequence: Synthetic coding sequence
  source 1..1482: mol_type = other DNA
atgaatcgcacaaagggtgacgaagaagaatactggaactcctctaagttcaaagcgttcaccttcgacgacgaagacgacgagctcagtcaacttaaggagagcaaaagagcggtcaactcgctaagagatttcgttgacgacgacgatgacgacgacttagagagggtgagttggagtggggagcccgtgggttctatctcatggtctatccgcgagaccgccggaaatagcggttccacccatgaggggagagagcagctgaagagcagaaacagttttagctcttatgctcagctgcccaaacccacttccacttatagcctctcatcttttttccggggacgaactaggcctggaagcttccagtcactgtcagatgcactttccgatacccctgctaaatcttacgccccagagttgggaagacccaaaggtgagtacagagactacagtaacgattggagcccttccgacacagtccggcgactgagaaaaggaaaagtgtgctcacttgaacgtttcaggtccctccaggataagcttcagctgttagaggaggctgtgtcaatgcacgacggcaacgttataactgccgttctgatcttcctgaaacgtacactgtctaaagaaatcctttttagggagttggaggttcgtcaggtcgcgcttagacacctgatccatttcctcaaggaaatcggcgaccagaaattgttactggacctgtttaggtttcttgaccgtactgaagagctcgccctcagccactaccgcgaacacctcaacatccaggaccccgataaacggaaagaattccttaagacctgtgtcggtctgcctttcagcgcggaggactccgctcacatccaggaccactataccctgttggagaggcagatcattatcgaggccaacgatagacatctggagtccgcagggcagacggaaatcttcagaaaacatcctcgcaaggcttccatcctgaatatgccgctggtgaccacccttttctattcttgcttttaccactacactgaggccgaaggcaccttctcttcacctgtcaatctcaagaagaccttcaaaatccccgacaaacagtacgtgctcacggctttggcggctcgcgctaagttaagagcatggaatgatgtagatgcactgtttactaccaagaactggttaggttatacaaagaagagggcgccaatcggttttcacagagttgtggaaatcctgcacaaaaacaacgcccctgttcagatcctccaggaatacgttaacctggtggaggacgtcgatactaagttgaatttggccacaaaatttaaatgtcacgacgtagtgattgacacttatagagacctgaaagaccgtcaacagctcctggcctatagaagcaaagtggataagggttctgccgaggaggaaaagatcgatgccttgctgtctagctcccagatccgatggaagaactag

SEQ ID NO: 218404 - DNA, 1560 bp, synthetic construct
  misc_feature 1..1560: note = Description of Artificial Sequence: Synthetic coding sequence
  source 1..1560: mol_type = other DNA
atgactacggggcttatactattcttccaatccgggagaccactcggagctggggttagactgggactcggcctgaggatgaatagaacaaaaggagacgaagaggagtactggaacagtagcaaatttaaagcttttacctttgatgatgaggacgacgagctatcccaactgaaagagtctaaacgggcagttaacagcctgcgcgactttgtcgacgacgacgatgacgatgatcttgagagggtgtcttggtccggcgagcccgttggctccataagttggtccatcagggagactgccggtaactctggttctacgcacgagggtagagagcagctgaaatcaaggaatagcttttctagttatgcacagttaccaaaaccgacttcaacatacagtttatcgtcgttcttccggggtagaacacggccagggagtttccaatccctgagcgacgccctgagcgacacacccgctaagtcttacgcgccagaattgggtaggcccaaaggagaatatagagactattctaacgactggagccctagcgacacagtccgaagacttaggaagggcaaggtgtgttccctggagcggttcaggtctttacaggataagctgcaactcctggaggaagcggtctctatgcacgatggcaacgtcatcactgccgtcctcatcttcctcaaacgaactctgtccaaagagatcctatttagggagctagaagtgcgccaggtcgccctcagacacctgatccactttctgaaggagatcggggatcagaaacttttattggaccttttccggtttttggacagaactgaggaattggccctgtcccactatcgcgagcaccttaacatccaggatccggacaaaaggaaagaatttctgaaaacatgcgtgggactcccattctcggcagaagactctgcgcacattcaggaccactacaccctgttggaacggcagattatcatagaggcaaatgaccgccacttagaatcggcaggtcagaccgagatattccggaagcacccacggaaagcctccatcctgaatatgcccttagtgacaacacttttctacagttgcttctaccactacactgaggccgaagggaccttcagcagccccgtaaatctgaagaaaacttttaaaattccggacaaacagtacgttttaaccgcattggcagctcgagcaaaactaagggcctggaatgatgttgatgccctttttactacgaagaactggttgggctataccaaaaagagagccccaatagggtttcacagggtggtggagatcctccataagaataacgctcccgtacagatactgcaagaatacgtgaacctcgttgaggacgtcgacaccaaactgaacctcgcaactaaatttaaatgtcacgacgtcgtgatcgatacttaccgcgacctaaaagaccggcagcagctacttgcctatcgcagtaaagttgataaggggtctgctgaagaagagaagattgatgccctgctttcctcctcccagataaggtggaagaactag

SEQ ID NO: 218405 - DNA, 138 bp, synthetic construct
  misc_feature 1..138: note = Description of Artificial Sequence: Synthetic coding sequence
  source 1..138: mol_type = other DNA
atgaacagaaccaagggcgacgaggaggaatactggaatagttccaaatttaaggcctttacatttgatgatgaggacgatgagctgtctcagctgaaggagagcaagcgagccgtcaacagtctgagggacttttag

SEQ ID NO: 218406 - DNA, 1482 bp, synthetic construct
  misc_feature 1..1482: note = Description of Artificial Sequence: Synthetic coding sequence
  source 1..1482: mol_type = other DNA
atgaaccgcacaaaaggcgatgaggaggagtactggaacagtagcaagttcaaagccttcaccttcgatgacgaggatgatgagctgtcacagttaaaggagtcgaagcgcgcagtcaatagcttacgggactttgtggatgatgacgacgatgacgacctggagcgcgtttcttggagtggagagcccgtgggatcaatctcttggtctatcagagaaaccgccggaaactctggtagcacacacgaagggagggagcagttaaagtctcgcaacagcttcagcagctatgcccaactgccaaaaccaactagcacttactcacttagtagcttttttcggggtcggacacggcctgggtcttttcagagtttgtccgatgctttgagcgatactcctgcgaagagttacgcgccagagcttgggcgaccaaaaggcgagtatcgggactactcaaatgattggtctcccagcgacacagtaaggagactcaggaagggcaaggtctgcagccttgagcgctttcgctccctacaagacaagctgcagctgctcgaggaggcagtaagcatgcatgacggcaatgtgataactgccgttctgattttcctgaagagaaccctgtccaaggagatccttttccgggagctcgaggtgagacaggtggctttacggcacctgattcatttccttaaggaaatcggcgatcagaaactacttttggacctgttccgatttctcgacagaaccgaggagctggccctctcacactaccgagaacacctcaacatccaggacccggacaagcgcaaagagttccttaaaacctgcgtcggccttccttttagtgctgaggactccgcacatatccaagatcattacactctgctcgaacggcagataattatagaagccaacgatagacatctcgaatcagcaggacaaacggagatattcaggaagcaccccaggaaagctagtatccttaatatgcctctggtgactactctcttctacagctgcttctatcattacaccgaagcggaagggaccttttcttctcctgtcaaccttaaaaagaccttcaagatcccagataaacagtatgttctcacagcgctagcagcccgtgccaagttgcgggcttggaatgacgttgatgcactgttcacaaccaagaactggctcggctataccaagaagagggcccctataggctttcaccgcgtcgtggagatcctacacaagaacaatgctcccgtccagattctgcaagaatatgtcaatctggttgaagatgtggacacaaagttgaaccttgctaccaagttcaagtgccacgatgtcgtgattgatacgtacagagacctgaaagaccgacagcaactgctggcatacaggtccaaagtggacaagggctcagctgaggaggaaaagatcgatgccctgctcagtagctcacaaatacgatggaaaaactag

SEQ ID NO: 218407 - DNA, 735 bp, synthetic construct
  misc_feature 1..735: note = Description of Artificial Sequence: Synthetic coding sequence
  source 1..735: mol_type = other DNA
atgttccgcagaaaacttacggcccttgattaccataatcctgccggatttaactgcaaggatgagacagagttccggaattttattgtgtggttagaagaccagaagatccggcactataagattgaggatagggggaatttgagaaacatccactctagcgattggcccaaattttttgaaaagtaccttcgcgatgttaactgccctttcaagattcaggacagacaggaggcgattgattggttgctcggtctggctgtgcggctggaatacggtgacaatgcagagaaatacaaggatcttgtacctgataactcaaagacagctgacaatgccacgaaaaatgcagagcctctgattaatctggatgttaataatcctgacttcaaagccggtgtcatggcactcgcgaatttacttcagatacagcggcacgatgactatcttgtaatgctgaaagcaattcgaattttggtgcaagagcgcttaacccaagatgcagtggcgaaggctaaccagacaaaggaagggttgccagtcgcactggacaaacacatcctgggcttcgacacaggtgacgcagtgctgaatgaggcagcccagattcttcggctgctgcatattgaggaactgcgagagctccaaacaaagatcaatgaggccatcgtagccgtgcaagccataatcgcagatccaaaaacagaccatcgcctggggaaagtgggcagatag

SEQ ID NO: 218408 - DNA, 177 bp, synthetic construct
  misc_feature 1..177: note = Description of Artificial Sequence: Synthetic coding sequence
  source 1..177: mol_type = other DNA
atgttgcagagtattataaaaaatatatggatcccgatgaagccctattatactaaggtatatcaggaaatttggattgggatgggcttaatgggttttatcgtatacaagattagagccgctgacaaaaggagtaaagcgctcaaggcctccgccccagcacccggacaccactag

SEQ ID NO: 218409 - DNA, 228 bp, synthetic construct
  misc_feature 1..228: note = Description of Artificial Sequence: Synthetic coding sequence
  source 1..228: mol_type = other DNA
atgaagttgtatgggacgaggggatctgacatctcacacttccagtgccaaatgcttcagtctattatcaagaacatctggatcccaatgaaaccctattacacaaaagtgtaccaggaaatatggatcgggatggggctcatgggcttcatagtttataaaatacgtgccgctgacaagcgctcaaaagctctaaaagccagcgcacctgctcctggtcaccactag

SEQ ID NO: 218410 - DNA, 177 bp, synthetic construct
  misc_feature 1..177: note = Description of Artificial Sequence: Synthetic coding sequence
  source 1..177: mol_type = other DNA
atgctgcagtccatcatcaaaaatatttggatacccatgaagccttactataccaaggtttaccaagaaatttggatcgggatggggttgatgggattcatcgtttataaaatccgggcagccgacaagcggagtaaagcattgaaggcttccgctcccgcacctggacaccattag

SEQ ID NO: 218411 - DNA, 177 bp, synthetic construct
  misc_feature 1..177: note = Description of Artificial Sequence: Synthetic coding sequence
  source 1..177: mol_type = other DNA
atgctgcagagcataatcaagaatatttggattccgatgaaaccttattatacaaaggtgtatcaggaaatatggattggcatgggcttaatggggtttattgtttacaagattcgcgctgctgataaacggagtaaggctttgaaggcatctgccccagcccctggccaccactag

SEQ ID NO: 218412 - DNA, 2928 bp, synthetic construct
  misc_feature 1..2928: note = Description of Artificial Sequence: Synthetic coding sequence
  source 1..2928: mol_type = other DNA
atgacacagcagcctcaagacgacttcgaccggtcagtcgaagatgcccaggcctggatgaaagcagttcaggatcagcttcaggtcaatgacaacacccaggggcctagagctgccttggaagcaagactgtgggaaaccgaaaagatatgccagttggagcccgagggccgagtcagagtggacctcgtgcttaggatggcagaagccctgctggcttgctgtccaggcgatcaaaagcctggtattttggcacgattaaaagatattaaagcccaatgggaggagaccgtgacttacatgactcactgccacagcagaatagaatgggtgtggttacactggagtgaatatttgctggctagggacgaattctatagatggttccagaagatgatggtgacattggagccacacattgagctccaactcgggttgaaggaaaaacagtggcagctcagtcatgctcaggtgctcctgcacaacgttgataaccaggctgtgctccttgatcggttactggaagaggccgcttccctgttcaaccgcatcggggatccctctgtggatgaggacgctcagaaacgtatgaaagccgagtacgatgcagtgaaagctaaagcccagaagagagtggatctgctcgagcaggtagctcgggaacatgaggagtaccaagcaggagtggatgaattccagctgtggttaaaggctgtggttgaaaaggtgaacggttgcctgggacggaactgtaagctcccgattacccagcggctctctaccctacaagatatcgcaaaggacttcccaagaggagaggaatcactcgagaccctggaggagcaaagcgccggagtcatccggaacacctctccactgggagctgagaaaatcactggagagctcgaagaaatgcggaaggtcctggagaagctgcgagccctctgggaggaagaggaggaacggcttagaggcctcctgagatcgcggggtgcatgggagcagcagataaaacaactcgaagcagagctttccgaattcagaatggtgctgcaaagactggcacaggagggcctgcagcctgccgctaaagcaggaaccgaggatgaattagtggcacactggcggaggtacagcgcgacaagggctgctctggcaagtgaagaacccagggtggaccggctgcaggcccaattgaaagagcttattgtgttcccccataacctgaagccgctgagcgactccgtcatcgccaccattcaggagtatcaatcactgaaagttaagtcggcacgtcttcgaaatgcggcagccgtcgagctctggcagcactttcagcggcctctgcaggatttgcagctgtggaaggctcttgcccagcggctgctcgaagtcacagctagcctgccagatctgcccagtcttcatacatttctgcctcagattgaagctgccctaatggagtcttcaagactgaaggagctgctgactatgctccagcttaagaaagatctgctcatcggcatcttcgggcaagaaagagctactgccctgctggagcaggtggctggcagtatgcgggatcgcgacctgctgcacaactccctcttgcaacggaaaagcaagctccagtcactgctcgcacaacataaggattttggggctgcgttcgaaccgctccagagaaaactcctagatctgcaggttagagttcaggccgaaaaaggactacagcgagacttgcctgggaaacaggcgcagctcagccggttgcagggactccaggaggagggcctcgatctgggggcacaaatggaagccgctaggccccttgttcaagaaaacccaaaccaccagcacaagatggatcagctgagctcagatttccaggctctccaacgcagtctggaagacctggtggacagatgtagacaatcagtgcaggaacactgtacatttagccatcagcttcttgaactcaggcagtggatcgtcgtcactactcagaagctcgaagcccaccggggagaagctgggccaggggacgctgagagccaggaggccgaatttgaacggttggtagctgagttccctgaaaaagaagcacagttatctttggtcgaagcccagggatggctcgtcatggaaaaaagcagcccagaaggggcagccgtcgtgcaggaggaacttcgcgagttagctgaaagctggcgggctcttaggctgctcgaggagagccttctgtcccttatccgcaactggcaccttcagcggatggaggtggactcagggaagaagatggtgtttacaaacaacattcccaagtcaggcttccttattaaccccatggacccaatcccccgacatagaaggagagccaaccttcttcaggaggaggaaggctcacacgaggacttttcccagctcttgaggaacttcggccaatggctccaggttgaaaattcaaagctcgtaagaattattgcaatgcgcacaagcacagccgaagaccttaggacccgcaaatccaagcttcaagaactggaggcacgagtcccggagggacagcatctgtttgagaacctgcttcggctgggcccagcacggggaactagcgatgaattggaagacctccgctatcagtggatgctgtacaaatccaaactcaaggacagtggccatctgctgacacagtcgtccccaggcgaaccaactggcttccaaaagacgcgacgatggagaggcttgggtagcctgtttcggcgagcttgttgcgtggcactgcccctacagctgcttctgctgctgtttctcctgctgctgttccttttgccgattagggaagaagatcgatcatgcacactggccaataacttcgcaaggtcctttaccctcatgctcaggtacaatggcccacctcctacctag

SEQ ID NO: 218413 - DNA, 1791 bp, synthetic construct
  misc_feature 1..1791: note = Description of Artificial Sequence: Synthetic coding sequence
  source 1..1791: mol_type = other DNA
atgacgcagcaaccccaggatgatttcgatcgttccgtggaggatgcccaggcttggatgaaggctgtgcaagaccaactgcaggtcaacgacaatacccaggggccacgcgctgccctggaagctagactatgggagacagaaaaaatctgccagttagagcccgagggcagggtgagggttgatctcgtgctgcggatggccgaagctctgctcgcctgctgcccgggagaccaaaagcccggtattttggccaggttgaaggacatcaaggcccagtgggaagaaactgttacctatatgacccattgtcacagccgaatcgaatgggtctggctgcattggtcggaatatctccttgctcgggatgagttctaccggtggtttcagaagatgatggtgaccctagagccccatattgaactccagcttggcctgaaagagaaacagtggcaactgtcacacgcccaggtcctactgcacaacgtagacaaccaggccgtgctccttgatcgcctactggaggaggcagcatccctgttcaataggattggggacccttcagttgatgaagacgcccagaagcgcatgaaggccgaatatgatgctgttaaagcaaaggcacagaaaagagtggacctgttggaacaggttgccagagaacatgaagagtaccaggccggtgtggacgagttccagctttggctgaaggcagtagttgagaaagtcaacggctgtctgggcagaaactgcaaactgcccatcacccagcgccttagcacacttcaggacattgccaaggattttccgagaggcgaggaatcacttgagactttggaagaacagtctgcaggcgtaattcggaacacttcccctcttggggcagaaaaaataacaggggaactcgaggagatgagaaaggtgttagagaagctccgcgctctgtgggaggaagaggaggaaaggctgcggggactgttgcgtagccggggagcttgggagcaacaaatcaagcagctggaggcagagctgagtgaatttcggatggtgctgcagagactagcacaggaagggctgcagccagcggcaaaggccggaacagaggatgagcttgtcgcgcactggcggaggtattccgccacaagagcagccctagcaagcgaggagcctcgggtggatagattgcaggcccagctaaaagagttaatcgtgttcccacataatctgaaacctttatcagattcggtcatcgcaacgatacaggagtatcagtcactaaaggtcaagtcagcaaggcttagaaacgccgctgccgtggaactgtggcagcactttcaacgccctctccaggaccttcagctctggaaagccctagctcagcgcctgctcgaggtcacagccagcctccccgatctcccatcccttcacaccttcctgccccagatcgaagccgcactgatggagagctcccgtctgaaggaattgttgacgatgctacaactgaagaaggatctactgataggtatcttcggccaggaacgggctacagctctcctcgaacaggtagctggcagtatgagagatagggatctactccacaattccctactgcagaggaaatctaaactccaaagcctgctggctcagcacaaagatttcggagcagcgtttgaacctctccagcgaaagctgctagacctgcaagtccgcgttcaggccgagaagggcctgcaaagagatctccccggtaagcaggcacaattgagccgccttcaagttagagggctatag

SEQ ID NO: 218414 - DNA, 2913 bp, synthetic construct
  misc_feature 1..2913: note = Description of Artificial Sequence: Synthetic coding sequence
  source 1..2913: mol_type = other DNA
atgacgcaacagccgcaggacgactttgacagatcagtcgaggatgcccaagcttggatgaaggccgtgcaggaccagctgcaggttaatgacaacacacagggtccacgggctgctctggaggctcggctgtgggaaacagagaagatttgccagctggaaccagaggggagagtgcgcgtggaccttgtcttgaggatggcggaggccctgctcgcgtgctgtccaggtgaccagaagcccggaattcttgcgagacttaaagacatcaaggctcagtgggaagagacagtgacttacatgacccactgtcattctcgaatcgaatgggtttggttgcattggtcggagtatctgctggcaagggacgaattttatcggtggttccaaaaaatgatggtgacactagagccgcacatcgagctgcaactggggctcaaagagaaacaatggcaattgagccacgcccaggttctcctgcataacgtggacaaccaggccgtgctcctcgatcgcctcctggaggaagccgcatccctcttcaacagaatcggtgacccttctgttgatgaagacgcccagaagaggatgaaggcagaatacgacgcagtcaaggcaaaggcacagaagcgcgtggatttgctggaacaggtagcgcgagagcacgaagagtaccaggcaggggtggatgagttccagctttggctaaaagctgtggtggagaaggtcaatgggtgtctgggcagaaattgtaagttgcccattacgcaaagattaagcacactacaagatattgctaaggattttcctaggggcgaggagagcttggagacactcgaagagcagagtgcaggagtgatccgtaatacgtcccctctaggggcagaaaaaataaccggcgaattagaagaaatgagaaaggtgctggaaaaactaagggcactctgggaggaggaggaagaacggctgcgcggtctgctgcgctcaaggggagcttgggagcagcagatcaagcaacttgaggcggagctgtcagagttccgtatggtgttacagcggctagcacaggaaggcctccagcccgctgcaaaggcgggtaccgaagacgaactggtggctcactggaggaggtatagcgcaacccgggcagccctcgcttctgaggaacctcgtgttgatcggctgcaagcacagctaaaggagctgatcgtgttcccacataacctgaaacctctctcggacagtgtgattgcaactatccaggagtaccaaagcctgaaggtgaagagcgccagattgaggaacgctgccgcagtggaactttggcagcacttccagaggcccttgcaggacctgcagctgtggaaggccttagctcaaaggctgcttgaagtaaccgcctcacttcccgatttacccagcctccatacattccttccacaaatcgaggcagctctgatggaatcatccagactaaaggagctactgacaatgctgcaactgaaaaaagacctattgatcggaatctttggccaggagcgagccaccgctcttcttgagcaagtggccggttccatgagggaccgcgatctgttgcataacagcctcttgcagcggaaatcaaaactccagagcctgcttgcccagcataaggactttggggcagcctttgagccccttcagcgaaaactgctcgacctgcaagtccgcgtacaggcggagaaaggccttcaaagggatctgcctggcaaacaggcacaactgagtcggttacagggcttgcaggaggaaggtctggatttgggtgcgcagatggaggctgctaggccactggtgcaggaaaatcctaatcatcagcacaaaatggatcagctgagctccgatttccaggccctccaaagaagcctggaagatctcgtagataggtgtaggcagtccgtgcaggagcattgcacattttcacaccagctgctcgagctgaggcaatggatcgtggtgactacacagaaactggaggcccaccggggagaagccggaccgggagacgcagaatcacaagaggcggaatttgaacgtctggtggcggagttcccagagaaagaggctcagctttctctggtcgaagcccaagggtggcttgttatggagaagtccagtccagagggggcagccgtggtgcaagaggagctgcgcgaattggcagagagttggcgcgcactgcgattgctggaggagtccttattgtcccttatccgcaattggcacttgcagcgaatggaggtggatagtgggaagaagatggtatttacgaataacatccccaagagcggatttctgattaatccgatggaccccatcccacggcacagaagacgggaggaggaaggcagtcatgaggacttctcacaactactgaggaacttcggtcaatggttacaggtcgagaacagtaaactcgtgcgcattatcgcgatgcgaaccagtactgccgaggacctccgcacgcgtaaaagcaagctacaggaactggaggcccgagtgcccgagggtcaacacctcttcgagaacttgctgcgcctcgggcctgccaggggcacctccgacgaacttgaagatctcaggtaccagtggatgctgtataagtctaagctcaaagatagtggtcacctcctgacgcagtctagccctggtgagcctaccggcttccagaaaactagaagatggcggggactgggctcactgttcagaagagcttgttgcgtagcccttcccctgcagcttctgttgttgctcttcctgctgttattatttctgttgccgatacgcgaagaggatcggtcatgcacactcgcaaacaatttcgcgcgatctttcacgcttatgctccgttacaatgggccaccaccaacttag

SEQ ID NO: 218415 - DNA, 3471 bp, synthetic construct
  misc_feature 1..3471: note = Description of Artificial Sequence: Synthetic coding sequence
  source 1..3471: mol_type = other DNA
atggggaatctcctcagtaagttccggccagggtgtagacggaggcccctccccggacctggaaggggagcacccgctccgttgtcacgggatgccagtcctcctggccgagcccatagtgtgcccacacctagaccgtttcggggactgttcagacggaacgccaggaggcgacccagcgctgcctctatctttgttgccccaaagcgcccttgtccattacctcgcgcagcagccgcaccactcggggttttgcctgccgtggggtggggccttgccatcaggaagacaccgatgttgccagcaagaaaccctcctcgctttggccacccatcatccgtccggatcccgccaccatccaggatgttcaccctgcttctgccctcccctcgggagccagccgtcaaggctcgcaagcctatccccgctacacttctggaagaaaccgaagtgtgggcgcaggaaggacccaggcgggtgaagaaagatgaggaccccgtccagatcgagggcgaggatgacgaaaaacggacacccctgtcctcaggcgaagcctcctccacatcaaggagtcagggcactcagggcgatgtggccagttttcgttgctcgccgggtccgctggaaggaaacgtgtaccacaagttttctgagaactccatgtccgaaaaggcccaggccagtcctgcttcttcctgccttgaaggcccagccatgccatcgacccactcgcaagccggttgcgctcgccatctgggaaagcctgatcctgacgccactgctcctccggagccagccgtgggttgctccctgctgcagcagaagcttgccgctgaggttctcaacgaagaaccccctccctcaagcttaggcctcccgatcccacttatgtctggcaagagaatgcctgacgaaaaacctttctgcatcccaccccgttccgctgctcctcccagggctgccaggaaccgcccttgcaagcgaaagatgtccatacctctactgctgccacttcccccaagtctgcctctattgtgggataggggggaactgccaccacccgctaagttaccttgtctgagtgtcgaaggagacctgcataccctagagaagtcccctgaatataaacgcaactctcgcatattggaagacaagactgagaccatgactaactcttctatcacgcaacctgcaccgagtttctctcaaccagtccagaccaccgacagcttaccgcttaccacctacaccagccaggtctccgcccctctacccattcccgatctagcagaccttgcaaccggaccgctgattttgcctatcccccctctgtcaaccacaccaaaaatggatgagaagatcgcattcaccatcccaaattcacctctggcactgccagccgatcttgtgccgatcctcggagaccaatcgaatgagaaggggggaagttataattctgtggtcggagcggctcctttgacctccgaccctcctactcccccaagtagcacgccatccttcaagccccctgtgacaagagagagccctatctctatgtgcgtggatagccctcctcccctcagtttccttaccctgttgcccgtccctagtaccgggacctcggtgatcacctcaaagcccatgaactctactagcgttatttccacggtcaccactaacgcgtccgcgcaccttacgtctcaaactgcggtcgatcctgaagtggtgaatatggacacaaccgccccatcccaggtggttattttcaccagtagtctgtcctccagggtttcatccctccccaactcccagattcactgctctgctgaacagcggcaccctggaaaaacaagcgtctacacctctccattgccatttatctttcacaacaccactccatccttcaatcagctcttcggcaaggaagctacacctcaacccaagtttgaagcgcctgatggtcaaccacagaaggcctccctgccatcagcctgtgtttttcttagtctacccataatccccccacccgacacaagtacacttgtcaattcagccagcactgcgtcctccagcaaaccacctatcgaaacaaacgccatgcacaccactccccctagcaaggcagtcattctgcagtctgctagcgtgtcaaaaaagtacctacccttttaccttggcttgcccggatctggcaacacccagccgagcggaaatacggccagcgtccagggaagcacaagcctacctgcccagagcgtgagagcacctgctacagcaagtaatcatccactgaaccctggagccacccctcagccgaagttcggcgcacccgatggtccccaacagaagaccagtctgccaagtgcgcatgattttcttagcttgcctatcatggtgcccccagacacatctaccctggtgtcatccgccagcgcggcttcgctgtcaaagcctgctatcgacactagcgatatgaataccacccctccatctaagactgtaatcctgcagtctacttttgtttctcggaaagaggagtacataagattctatatgggacttccaggtagcgggaatactcttcacagtgatagcatagcaagcgcccaggtgtccacatctttcccggcacaggctgaccggagaccaacaactacatcgtcccaccctctgaataccggctcaatatcccatagtaccctgggcgcaactgatggtcagcagaaaagcgatagctcctttatcttggggaacccggcaaccccagctcctgttattgggctgactagtcccagcgtgcagcccctgagcggctcaataataccacccggtttcgcagagctaacatccccctatacggccctgggcacgcccgtgaatgctgagcccgtggaggggcacaacgccagcgcattccccaatgggactgctaagacctccggtttccggattgctacagggatgccaggtacaggcgactccaccctcttggtgggcaatacaattccaggccctcaggtcataatgggcccaggcacgccaatggatgggggatccatcgggttctctatgagcgcccctggcccttcctctacatccggggagttgaatataggacagggccaatctggaacacccagtacgactagcgtgttccccttcgggcaggccgcttgggacccgactgggcattccatggctgccgcaccacaaggagcttcaaacattccagtatttggatatactagcgctgccgcatacataccgggtctggacccgcctacccagaacagctgcagtggtatggggggagatggaacccgaagtatagtcggaggcccttgtgtccccgctttccagcagtgtattctccagcatacatggacagaacggaagttttacaccagctcaacacactactacggccaggaaacatacgtccgaaggcacgtgtgtttccaactgccctag

SEQ ID NO: 218416 - DNA, 5732 bp, synthetic construct
  misc_feature 1..5732: note = Description of Artificial Sequence: Synthetic coding sequence
  source 1..5732: mol_type = other DNA
atggcttgttgccacaaagtgatgctgttgcttgacactgccggtggcgctgcgaggcattctcgagttaggcgcgcagccctgaggctcctcacttacctctcttgtcgctttggactagcgagagtgcactgggcatttaaatttttcgactctcagggagcccgttcacggccttcacgcgtctcagattttcgcgaactcgggtcacgatcttgggaggatttcgaagaggagctcgaagcccgactggaagaccgcgctcacctccccggaccagcaccccgtgccacccatacgcatggggcactgatggagaccctgctggactaccaatgggacaggcccgaaattacttcccccactaagcctatcctgcgctccagtgggcgtcggctcctggacgtcgagagcgaggctaaggaagccgaagctgctcttgggggactggtgaacgccgttttcctcctggctccttgcccacattcacagcgcgaactccttcagtttgtgagcggctgcgaggcccaggctcagcggttaccgccaactccaaagcaagtgatggagaagctgctgcccaaaagggtgcgcgaggttatggtagccaggaaaattacattctactgggtcgacacaacagaatggtcaaagctgtgggaaagccccgaccacctaggttactggacagtctgtgaactgctgcaccacggaggcggaaccgttctcccaagcgagagcttttcctgggacttcgcccaggcaggcgagatgcttctccggtccggcatcaaactctcttctgaaccacacctctctccctggataagcatgctgcccacagacgctacgctgaataggctgttgtacaattcccctgaatacgaggcttccttcccgcgaatggagggcatgctgtttctgcctgtggaagcaggaaaagagatccaggagacctggaccgtgaccctggaacctctcgctatgcatcagaggcacttccagaaacctgtcaggatctttctgaagggtagcgtggcccaatggtctctgccaacttctagcacactaggcacagattcctggatgcttggatcacctgaagagagtacggccacacaaagattactgtttcagcaattggtcagccggctgacagccgaggaactgcacctcgttgccgacgtagatccaggtgaaggacgccctccaatcaccggtgtgatcagccctctgagtgccagtgcgatgatacttacggtgtgccgtaccaaagaagcagagttccagcggcacgtgttacagacagccgtggccgactctccaagagacaccgcttccttgttttccgacgtcgtggacagcatcctcaaccagacccatgacagcctggctgatactgctagcgctgctagtcctgtccccgaatgggcgcagcaggagcttggccacaccacaccatggtcaccagcagtggtcgagaagtggtttcctttctgcaacatcagcggcgcttccagcgacctaatggagtccttcgggctgctgcaggccgcatccgccaacaaggaggaatcttctaagactgagggagagctgattcactgcctggctgagttataccagagaaagtcccgtgaggagtcaactattgcccatcaggaagattcgaaaaagaaacggggagttcctcgaacacctgtgcgccagaagatgaatacaatgtgcaggagtctgaaaatgctgaatgtggccaggttgaatgttaaggcccagaagctgcatcctgatgggagcccggacgtcgccggagaaaaagggatccagaagatcccttctgggagaacagtcgacaaattggaggaccgaggacgtactcttcggtcaagcaagccaaaggactttaagactgaggaagagctgctctcttatattagggagaactaccagaaaacagtcgccacaggggaaatcatgctgtacgcctgcgctcggaacatgatcagtaccgtgaaaatgttccttaaatctaagggcaccaaagagttggaagtcaattgtctcaatcaggtgaaaagctccctgcttaagaccagtaaaagtctccgccagaacctgggaaaaaaacttgataaagaagacaaggtccgagagtgccagttgcaagtcttcctgagattggagatgtgtctccaatgcccatccattaacgaaagtaccgatgatatggagcaggtcgtggaagaggttacagaccttctgcgtatggtgtgcctcaccgaagacagcgcctacctggccgagtttctggaggaaatcttgagactatacatcgatagtatcccaaaaactctgggcaacctttacaattctctcggctttgttatcccccaaaaacttgccggtgtcctcccaaccgacttcttcagcgatgattctatgacccaagaaaataagtctcctttgctgagcgtgccttttctgagtagcgcccgtaggagcgtcagcgggtccccagagtctgacgagctccaagaactccgaacaagaagtgcaaagaaaagaagaaaaaacgcactgattcgccataagtccatcgccgaggtcagtcagaatttgcgacagatcgaaataccgaaagtttctaagcgcgcaaccaagaaagagaatagtcacccagcaccccaacagccctctcaacccgttaaagatacggtccaggaagttaccaaggttaggcgaaacctgttcaatcaggagctcctttctccgtcgaaacgctcgctgaagcggggacttcccagatcccactctgtttcggctgtggacggactggaggataagttagacaacttcaagaagaacaaaggttaccataagctcctgactaagtctgttgccgagacacccgtgcacaagcaaatctccaaaagactgttgcaccgccagatcaaaggcaggagctccgatccaggccctgacattggggttgtcgaggagtcacccgagaaaggagatgagatctcacttcggcgatccccacggattaaacaattgagttttagcagaacgcactccgctagcttttactcagtctcgcagcccaaatccagaagtgtgcagcgggtgcactctttccagcaagataagagcgaccagagagagaacagccccgtgcagtccattcgttcacctaaatctctgctctttggggctatgtctgagatgatatcaccttcagaaaagggatcagctaggatgaaaaagcggtcgaggaatactctcgactcagaggtaccagccgcataccagactcccaaaaagagtcaccagaaatctttgagcttcagtaagactacaccacgcagaattagtcacaccccacaaacacccctgtatactccagaacgcctgcagaagtctcccgctaagatgactccaacaaagcaggctgccttcaaagagtccttaaaggacagttcctcacccggacatgactctccccttgactccaaaatcactccccaaaagcgccacacacaggccggtgagggtacgagtctcgagacaaagaccccccgtacgcccaaacgccagggaactcagcctcctggatttcttcccaactgtacatggccacattccgtcaatagttctcccgagtccccctcatgccccgctccacctacatctagcacagctcaacccaggcgcgagtgcctaacacccatccgcgacccgctccgcaccccccctcgcgctgctgcatttatggggacacctcagaatcagacccaccaacagccgcatgtattacgtgccgctcgggcagaggagcccgctcagaagttaaaagacaaagctattaagactccaaaacgtccaggaaattctacggtcacaagttctccacccgttactccaaagaaattgttcactagccctctttgcgacgtgagtaagaaaagtccttttcgaaaatccaagatcgagtgccccagcccaggcgagctcgatcaaaaagaacctcagatgtcccccagcgttgctgctagtctctcatgccctgtaccgagcaccccacccgaactaagccagagagccacgctcgacactgttcctccccctccaccatcaaaagtcggtaaacgctgcaggaaaactagtgatccccgtcgcagcatagtcgaatgtcaacctgatgccagcgccactccaggggtgggaaccgctgactcgcctgctgccccaactgacagcagggatgaccaaaagggattgtccctctctcctcagagccccccagagcggagaggttacccaggaccaggactcagaagcgattggcacgcaagctcacccttgctaatcacgagcgataccgagcacgtgactctgctctccgaggcggaacatcacgggatcggcgacctgaagagcaatgtattgtccgtggaggaaggcgaaggcttgcggaccgccgatgcggagaagtctagcttgagccacccagggatcccgcctagtcccccttcctgcggcccaggatcccccttgatgccctcccgggacgtgcattgcaccacagacggcaggcaatgccaggcatctgcccagcttgacaatctccccgcatcggcctggcatagcaccgatagtgcttcacctcagacatatgaagtcgaactcgagatgcaagcctccgggttgcctaagctcaggatcaagaagattgatccttcctctagcctagaggccgagccattgtctaaggaggaatcctcacttggggaggaatccttcctgcctgcactgtctatgcctagggcctcaaggtccctctccaaacctgaacctacctatgtgtctccaccttgtcctaggctcagtcacagtaccccagggaagtcacgcggtcagacttatatctgccaggcctgtaccccaactcatgggccaagtagcaccccatcaccgtttcagactgacggcgtgccgtggaccccctctcctaagcattctggtaaaacaacaccggatattattaaggactggcccaggcgtaagagggctgtgggctgcggcgctggatcctcaagcggacggggtgaggttggagcagacttgcctggctccctctctctgctggaatctgaaggaaaggatcatggtctcgaactgtcaatccatcggacccccattctagaggactttgagctggaaggcgtgtgtcaactgcctgaccaatctccaccccgaaactccatgcccaaggcagaagaagcaagcagctggggacagtttgggctgtcttcacgaaaaagggtattactggcaaaagaagaggccgaccggggtgctaaaaggatctgtgacctgcgtgaagattccgaggtttcaaagtctaaggagggatccccatcctggtcagcctggcagctccccagcactggtgacgaagaagtgttcgtttctggcagcacccctccccctagttgtgccgtacgctcatgtctgagtgccagtgcactacaggccctgacccagagccctctgttgtttcagggaaagaccccatcctcccagtcaaaggacccacgggatgaggatgttgatgtactacctagcaccgtagaagacagccctttcagtcgcgctttctcccggagaaggccaatctcccggacttatactcgaaagaagctgatgggcacctggctggaagatctgta

SEQ ID NO: 218417 - DNA, 354 bp, synthetic construct
  misc_feature 1..354: note = Description of Artificial Sequence: Synthetic coding sequence
  source 1..354: mol_type = other DNA
atgaaactgtcttcagccgctggccaggagtcacctggacacccccacccctctccacccgcttggacgctcaagaagcctagcgagtctgtggctcagcgtgcaatgtgcagtgcacgggcttgtccagtcgcctgcccagtgggctgccccatcgcctgtccggtgtcttgccccgtggcctgcccggtggggtgtccggtgggaagcatggcaactgcccctcagggcttatcaccacaagagtgggaagctgatcgggagactggctccagtagtcacgcaggcactactcaatgttcgatccactctccgtcttcttcaagcaggcacttatcaaggactcagacttag

SEQ ID NO: 218418 - DNA, 627 bp, synthetic construct
  misc_feature 1..627: note = Description of Artificial Sequence: Synthetic coding sequence
  source 1..627: mol_type = other DNA
atgtcatccgagccgcctccaccttaccctggaggtccaacagcccctctcctcgaagagaagtcaggagcccctcctacgcccggtcgctcctccccggctgttatgcagcccccacctggcatgccactccctcctgctgatatcgggccaccaccatacgagcctccaggccacccaatgccacaacctgggttcattccacctcacatgtccgctgatgggacttacatgcctccaggattctacccccctcccggtccacatccccctatgggctactacccccctggtccgtatactcctggaccctaccccggacctggcggtcacacagcaaccgtcctggtcccatctggagccgctacaaccgtcaccgtgctgcagggagagatctttgagggggcacctgtgcagaccgtgtgtcctcattgccagcaggcaatcaccacaaagatttcctatgagataggactgatgaacttcgtgctggggttcttttgttgttttatgggctgtgatctggggtgctgtctgatcccttgcctgatcaacgattttaaagatgtcacacatacttgtccaagctgtaaggcctacatctacacatacaagagactatgttag

SEQ ID NO: 218419 - DNA, 765 bp, synthetic construct
  misc_feature 1..765: note = Description of Artificial Sequence: Synthetic coding sequence
  source 1..765: mol_type = other DNA
atgtctctcgccagaggtcacggggacacagctgccagcacagccgctcccctgtcagaggagggagaggtgactagcggacttcaggccctggccgtggaggacactgggggaccctcagcttctgcaggcaaggcagaggatgagggggaaggcggacgggaagaaactgaacgggaaggaagcgggggagaagaagcccagggagaagtgccttccgccggaggcgaggaacctgcagaggaagacagtgaagactggtgtgtgccatgctctgacgaagaggtggagttgccagccgatggtcagccgtggatgccgccaccatcagagatccagagattatacgaactgttggcagcccacgggacactggagctgcaagcggagattctgccacgaaggcctccaacaccagaggcccagtccgaagaagaacggtctgacgaggagccggaggctaaggaggaggaagaggaaaagccacatatgcccacagaattcgacttcgatgacgaaccagttacccccaaagactccctcatcgatcgccgaagaacgcccggttcctcagctcggtcacagaagcgcgaggctcgactagataaagtccttagcgacatgaagaggcacaagaaattggaagagcagatactgaggactggcagggacctgttttcacttgattctgaggatcccagtcctgcttctcccccactgaggtccagcggatccagcctattcccgaggcagcgcaagtactag

SEQ ID NO: 218420 - DNA, 2010 bp, synthetic construct
  misc_feature 1..2010: note = Description of Artificial Sequence: Synthetic coding sequence
  source 1..2010: mol_type = other DNA
atggggtcagatccttccgcgcctggaaggccaggctggacaggatccctgctgggtgaccgggaagaagcagcgcgacctaggctgttgcccctgctgctcgtgctgctgggatgtctggggctgggcgtcgccgctgaggacgccgaggtgcatgcggaaaattggttgagactgtacggatatctgccccagccgagcaggcacatgagcacaatgcgctctgcccagatattagcttccgctctggccgagatgcagcgattttatggcattcccgtcaccggggtgttggacgaggaaacaaaagaatggatgaaaaggccaaggtgcggcgtgcctgaccagtttggagtgagggtcaaagctaacctgagacggcgacgaaaaaggtatgctctgaccgggcgaaagtggaataatcatcacctgacctttagcatacagaactacaccgagaagctagggtggtaccattcaatggaagccgtgagaagggcctttcgggtctgggaacaggccactccactggtgttccaggaagttccttatgaagacatccgcctccggaggcaaaaggaggcagatattatggtgctcttcgcttcaggatttcacggagacagttctcctttcgacggcacgggaggatttctagcccatgcttatttccctggacccggactgggaggggatactcattttgatgcagatgagccctggaccttttcctccactgaccttcatggaaacaatctgtttttagtcgcggtgcatgagcttggccacgctctggggctcgagcacagttccaaccccaacgccatcatggcacctttttatcagtggaaggatgtagataactttaagttacccgaggacgatttgcgtggaattcaacagctctacggaacccctgatgggcagcctcaacccacacaacccctgcccacagtaacaccaaggcgcccaggtcgaccggaccaccgtcccccacggccacctcaacccccacctccgggtggaaaacccgaacgtccacctaaaccaggcccaccagttcagccaagagccaccgagagacctgaccaatacggtccaaatatatgcgatggagattttgacaccgttgccatgttgagaggggaaatgttcgtcttcaagggcagatggttttggcgcgtacggcataaccgagtgcttgacaactatcccatgccaatcggtcacttttggcgcggattgcctggggacatttccgcagcttacgagaggcaggatgggcgtttcgttttcttcaaaggcgaccgttactggctgttcagagaagcaaacctggagcctggttatccacagccactgacctcatacggactgggcatcccatatgacagaatagacaccgccatatggtgggaacctactgggcatacgtttttttttcaggaagatagatattggaggttcaatgaggagactcagagaggggaccccggttacccaaagccaatttcagtatggcaggggatccctgcttctccgaagggcgcattcctctcaaacgacgccgcttatacttacttctacaagggcaccaagtactggaaattcgataacgagcgtctcaggatggagcccggataccccaaatccatattaagagactttatgggatgccaggagcacgtggagcctggcccacgttggcctgacgtggcgagacctccatttaatccccacggcggagcagaacccggagcagatagcgcagaaggtgacgttggggatggggacggtgactttggtgcaggcgtgaacaaagatggcggtagtagggtggtggtgcaaatggaagaggtggccaggaccgtcaacgtcgtcatggtgttggtacccctgctccttctcctgtgcgtgctagggttgacatatgctcttgtgcagatgcagcgaaaaggtgcacctcgcgttcttctttactgcaagcgctctctgcaggagtgggtgtag

SEQ ID NO: 218421 - DNA, 561 bp, synthetic construct
  misc_feature 1..561: note = Description of Artificial Sequence: Synthetic coding sequence
  source 1..561: mol_type = other DNA
atgtcagctgctccactggtgggctattcatcgtccggtagcgaggatgaaagcgaagatgggatgagaaccagacctggggatgggagccacaggagaggacaaagtcctctcccaagacagcggttcccagtccccgacagcgtgctgaacatgtttcctggcacagaagaagggccagaggacgattctactaagcacgggggtagagtgcggacctttccacacgaacgcggtaattgggctactcacgtttatgtgccctatgaagctaaagaggagttcctggatctgctagacgtgctgctgcctcacgcgcagacttatgtgcccaggctggtgcgcatgaaggtgtttcatctgagtttgtctcagagcgttgtgttgcgacatcattggattctccccttcgtccaggcgctgaaagcgcgaatgacaagcttccattctccccacccagggccacactgcctgataggaaccaaggacgcccctgtgacacaggaaatcccaaaagaccttggtgcccttcgccaagagccaggatcccagacacggtag

SEQ ID NO: 218422 - DNA, 744 bp, synthetic construct
  misc_feature 1..744: note = Description of Artificial Sequence: Synthetic coding sequence
  source 1..744: mol_type = other DNA
atgtccgccgcacccctggtgggatacagttcctcaggctctgaagatgaatctgaggacgggatgcggacacgtccgggagacgggagccaccggagaggtcagtcccccctccccagacagcgatttcctgttcccgatagtgtactgaacatgttcccgggaaccgaggaggggccagaggatgattccaccaagcatggcggtagagttcggacctttccgcacgaaaggggaaattgggccacccacgtatacgtgccctacgaggcaaaagaagagtttctcgatttgctggatgttcttttacctcacgcacagacatacgtgcccagactggtccgcatgaaagtgttccatctttcattatcccaaagtgtggtcctcaggcatcactggatcttaccatttgtgcaggcactcaaggcacgcatgaccagctttcataggacttttatcggtctggaagtgacaagcggccacgcgcaatttctcgatctagtctctgaggttgatcgcgtgatggaagaatttaacctgacaacattctaccaagaccctagtttccacctcagcttggcttggtgtgtgggcgacgccaggctgcagttggaggggcagtgcttgcaggaactgcaggccatcgtcgacggattcgaagacgccgaagtgcttctcagagtccacacagaacaagtcaggtgtaagtctggtaacaaatttttcagcatgccactcaagtag

SEQ ID NO: 218423 - DNA, 642 bp, synthetic construct
  misc_feature 1..642: note = Description of Artificial Sequence: Synthetic coding sequence
  source 1..642: mol_type = other DNA
atgtctcccctgcccaggcagaggttcccggtgcccgattctgttctgaatatgtttccgggaactgaagaggggcctgaggatgacagtacaaaacacggcggaagggtcagaacctttccacatgaaaggggtaattgggccacccatgtttatgtgccatacgaagcgaaggaagagtttttagacctattggatgtgcttctgcctcatgcacaaagcgtcgtgttaagacatcactggatcttgccatttgtgcaggcattgaaggctcggatgacgagcttccaccggtttttcttcactgcaaatcaagttaagatctacaccaatcaggaaaagaccagaacctttatagggctagaggtcacctcgggccacgcgcagtttctcgatttggttagcgaagtggatagggtgatggaggagttcaatctgactaccttttaccaggacccaagtttccatctctcgctcgcgtggtgtgtgggggacgccaggctgcaactcgaggggcagtgcctgcaagagctccaggcaatcgttgatgggtttgaggatgcagaggtcctccttcgggtccacacagaacaggttagatgtaaaagtggcaacaagttcttttctatgcccctgaagtag

SEQ ID NO: 218424 - DNA, 1683 bp, synthetic construct
  misc_feature 1..1683: note = Description of Artificial Sequence: Synthetic coding sequence
  source 1..1683: mol_type = other DNA
atgggctccactgattccaaattaaatttccgcaaagcagtgattcaactgacaaccaagacccagcctgtggaggcaaccgatgacgcatacgatccagttgggtatggaattccatacaaccatttgctcttctccgattatcgcgagcccctggtcgaagaggccgctcaggttctgatcgtaactttggaccacgactccgcaagctcagcaagtcctaccgttgacgggactaccactgggaccgcaatggatgacgcagacccaccaggtccagagaatctgttcgtgaattacctttctcgcattcatagggaagaagacttccagttcatactgaaggggattgccaggctactgagtaaccccttgctgcagacgtacctgccgaattcaaccaagaagatccagttccatcaggagctcctcgtgctgttctggaagctctgtgactttaacaagaaatttctattctttgtgctaaaatccagcgacgtgctggatatactcgtcccgattctgttctttttgaatgacgcacgtgctgaccaaagcagggtgggtttgatgcatattggggtttttatcttattgctgttaagcggagagcggaactttggagtgcgacttaataagccatatagcatccgcgtcccaatggacattcctgtgttcaccgggactcatgcagacctgctgatcgtggtgtttcataaaatcataacaagtggccaccagagactccaacccctgttcgactgcctgctaacgatagtggtcaacgtctccccttacctgaaatccctgagtatggtgacagcgaacaaattacttcacctcctggaagcattctctacaacatggttcctgttcagtgcagcacagaaccaccacctggtgttcttcttgctggaagtgttcaacaacatcatccagtaccagtttgatggaaattccaacctggtatatgcgatcattaggaaaagatctatctttcatcagctcgccaatctgccaaccgatccccctacaattcataaggctctgcagaggcgtcgcagaacccccgagcctctgtcaagaacgggatcacaagagggaaccagtatggagggctcccggccagcagcgccagcagagccgggaacattgaaaacttcactcgtggcaacacctgggatagataagctcactgagaaatcgcaggtctccgaggacggcaccctgcgctcactcgagcctgagcctcagcagagccttgaagacggaagccccgctaagggggaaccttcccaggcatggcgggagcaacgccgtccttcgacgtcctccgcctccggccagtggagccccactcccgagtgggtactgagttggaagagcaagttaccactccaaacgatcatgcggttgttacaagtcttggttcctcaagtggaaaaaatctgcatcgataaaggcttgactgatgaaagcgaaattctcaggtttctccaacatggaaccctggtgggccttctccccgtgcctcaccccatcctcatacgtaaataccaggcgaatagcgggacagcaatgtggttccggacttatatgtggggggtgatatatctaaggaatgtggaccctcctgtgtggtatgacactgacgtgaaactgttcgagattcagagagtctag

SEQ ID NO: 218425 - DNA, 2367 bp, synthetic construct
  misc_feature 1..2367: note = Description of Artificial Sequence: Synthetic coding sequence
  source 1..2367: mol_type = other DNA
atgggttcgaccgacagcaagctaaactttagaaaagcggtcatacagctaactactaagacccagcccgtcgaagcaaccgatgacgctttttgggatcagttctgggcagataccgcgacgagcgtacaggatgtgttcgccctggtacctgccgctgaaattcgggctgtacgggaggagagtccctcaaacttggctaccttgtgttataaagccgttgagaagcttgtgcagggtgccgaaagtggctgccactctgagaaggagaagcagatagtgctgaattgtagcaggcttctaactcgggtgcttccttacatctttgaagatcccgattggaggggatttttctggagtacagtcccaggggctggcagagggggacagggggaagaagacgatgagcatgcaagacctctcgctgagtctttactactcgccatcgctgatctcctcttttgtcccgatttcactgtgcagtcacaccgccgaagtacagtcgattcagcggaagacgtgcattcccttgactcatgtgaatacatttgggaggcgggagttggatttgcccacagtccacagcctaattatatacacgatatgaaccgaatggaactattaaagctactgctgacctgcttttctgaagccatgtacttgcctccggctccagagagcggcagcacaaatccttgggtgcaattcttctgtagtacagaaaataggcacgctcttcctctgttcacgagcttattgaacaccgtttgcgcctacgatccggtgggttacgggatcccttacaaccatttactttttagcgattacagggagcccctcgtagaggaggcagcccaggtcctgatcgtaactctggaccacgattccgcttccagcgcttcacctacggtagatggtaccaccaccggtacagcaatggacgacgccgatccacccggtccagaaaatctgtttgtgaattacctgtcccgcatacaccgtgaggaagacttccaatttatcctgaagggtattgccaggctgcttagtaatccactcttacagacttaccttccaaattccaccaagaagattcaatttcatcaggagctgcttgtcttgttttggaaactctgtgatttcaacaaaaagtttttattctttgtactgaagagctccgacgtactggatattttagtgccaatcttgttcttcctcaatgatgctcgcgcagaccagtccagagtggggcttatgcacattggagtctttatcttactacttcttagcggtgaacgtaattttggagtgcggttaaacaaaccttacagtatccgagtgcccatggacattccagtgttcacaggaactcacgccgacctactgattgtggtcttccacaagataatcacctccgggcatcagcggctccagcccctctttgactgtctgctgaccattgtagtgaacgtctccccttacctgaagtcgctgtctatggtgaccgcgaacaaactgctccacctcctcgaggccttttctaccacttggtttctgtttagtgccgcacaaaatcaccatttggtgttttttctcctggaagtctttaacaatatcatacagtatcaatttgacggaaacagtaacctggtttatgccattataaggaaaaggtccattttccatcagctggccaatctacctactgaccccccaacaattcataaggccctgcagcggcgtaggcgtacaccagagcctttgtcaaggacagggtctcaagaaggcaccagcatggagggaagcaggcctgctgccccagcagaacccggtaccttaaagaccagtctggtcgcaactcctggaatcgataagctgacagagaagagccaagttagtgaggacgggacgctccgcagccttgaaccagaacctcagcagtccctcgaagacggcagcccagccaaaggagagccaagccaggcttggagggaacagaggaggccctcaacgagttccgcatcagggcaatggagtcccacgcctgaatgggttctgagttggaagagcaagcttccgctccaaacgattatgcgactgctgcaggtcctggtgccacaggtggaaaagatttgcatagataaaggattgacagatgagtctgaaatcttgaggtttcttcagcacggaaccctggttggcctcttaccagtgccccaccctattttaatccggaagtatcaggctaatagcggcaccgccatgtggttccggacctatatgtggggggtaatctaccttcgtaacgtggatccaccggtctggtatgacactgacgtcaagctttttgaaatccagagggtgtag

SEQ ID NO: 218426 - DNA, 810 bp, synthetic construct
  misc_feature 1..810: note = Description of Artificial Sequence: Synthetic coding sequence
  source 1..810: mol_type = other DNA
atgtcttctgaccacctgaacaactctactctgaaagaagctcagtttaaggatctgttcctgaagaaagcagaactggaattcgcacaaatcatcattattgtcgtggtggtcacagtcatggtggtggttattgtatgtctgctgaaccactacaaggtctcaaccaggtcattcattaacaggcctaaccaaagccggcgtagagaggacgggcttccacaagaggggtgcctgtggcccagcgactcagcagcgcctagacttggagcgtcagaaatcatgcacgcacccagatctagagaccgcttcaccgctcccagctttattcagcgggatagattcagcaggttccagccgacatacccctacgtgcagcacgaaatcgatctgccacctactatctccctcagcgacggcgaggaaccccctccgtaccaaggaccctgtacactgcagttacgtgatcccgagcaacagatggagcttaacagggaatcagtaagggcgcctccgaaccgtacaatattcgacagtgatctgatcgacatcgctatgtattctggtggaccgtgtccaccaagttccaatagtggaatctctgcctccacgtgtagcagcaacgggaggatggaggggcctccacccacttacagtgaagtgatgggccatcatccaggcgcttcttttctgcatcaccagcgctccaacgctcacagaggcagccggctccaattccagcaaaataacgcagaatctaccatcgtgccaattaaaggcaaggaccggaaacctggaaacctggtgtag

SEQ ID NO: 218427 - DNA, 921 bp, synthetic construct
  misc_feature 1..921: note = Description of Artificial Sequence: Synthetic coding sequence
  source 1..921: mol_type = other DNA
atgccagaggccggtttccaggcaacgaacgcgttcactgagtgcaaatttacgtgcacttcgggaaagtgtttgtacctggggagcctggtgtgtaatcagcagaatgactgcggcgacaactctgacgaggaaaactgtctgcttgtcaccgaacatcctccccctggtatcttcaactcagagctcgaattcgcacagatcattatcatcgtcgtggtggttactgttatggttgtcgtgatcgtatgcctcttgaaccactacaaagttagcactagaagcttcatcaaccgtcctaatcagtcaaggaggcgagaagatggtctcccccaggaaggctgcctgtggccctctgattcagctgctcccaggctcggggctagcgagatcatgcatgctcctaggagtcgcgatcgatttacagctcctagcttcatccagagagatcggttctcgaggttccagcccacatatccctacgtgcagcacgaaatcgatttacctcccacgatatctctgagtgacggtgaggagccccctccctaccaggggccttgcacgctgcagctgcgcgatcccgaacagcagatggaactaaacagggaatccgttcgggcaccacccaataggaccattttcgattccgacctcatcgatatcgccatgtacagcggcggtccctgccctccatcatccaactccggaatttccgctagcacatgttcctcgaatgggagaatggaaggtccacctcccacctactcggaggttatgggccatcaccctggcgcaagtttcttgcaccatcagcggtccaatgcccataggggttcacggctccagttccagcaaaataatgccgagagtacaattgtgcccatcaaggggaaagatagaaaacctggtaacttagtttag

SEQ ID NO: 218428 - DNA, 747 bp, synthetic construct
  misc_feature 1..747: note = Description of Artificial Sequence: Synthetic coding sequence
  source 1..747: mol_type = other DNA
atggccgctgaactggaatttgcccagataattatcattgtggtggtcgtcacagttatggtcgtggtaatcgtttgccttctcaaccactacaaggtgtccaccagaagctttataaatcggcctaaccaatctcgaagaagagaagatgggctaccccaggaaggctgcctgtggccgtcggacagtgccgctcccaggctaggggcttcggagataatgcacgccccaagatctagggataggtttactgctcccagttttatccaacgcgaccgattttctcgtttccagcctacatatccctatgtccagcacgaaattgatttgccaccgacgatatctctgagtgacggcgaagagccacccccttaccaaggcccttgcaccttgcaacttagggaccccgagcagcagatggagctgaacagagaatccgtgagagcacctccaaaccgaaccatcttcgatagcgatctgatcgatattgcaatgtactctgggggaccatgccctccttcaagcaactcaggcatttctgctagcacttgctccagtaacggtagaatggaaggacccccacccacgtattctgaagtgatgggccatcatccaggagccagttttctgcaccatcagcgatcgaacgcacatcgcggaagtagactgcagtttcaacagaataacgccgagagcaccatagtcccaattaagggcaaagatcgcaagcctggaaacctggtgtag

SEQ ID NO: 218429 - DNA, 756 bp, synthetic construct
  misc_feature 1..756: note = Description of Artificial Sequence: Synthetic coding sequence
  source 1..756: mol_type = other DNA
atgtctagtgaccatctgaataattcaactttgaaggaagcccagtttaaagacttgtttctgaaaaaagctgaactggaatttgcacaaatcattataatcgtggtcgtcgtgacagttatggtggtggtgatcgtttgtctactgaaccactacaaagtgagcacgcgtagttttatcaacagaccgaatcagagtcgtaggcgggaagacggattgcctcagatcatgcacgcgcctcgttctcgagaccggtttacggcaccttcgttcattcaaagagatcgctttagccgctttcagccgacctatccatacgtgcagcacgagatcgacctgccaccaactatctctctctccgacggggaggagccaccaccataccaaggaccatgcaccctccagctcagggatcctgaacagcagatggagctgaacagagagagtgtgcgggcacctccaaacaggaccattttcgacagcgatttgattgacatcgccatgtacagcgggggaccctgccccccatcgagcaactctgggatctccgcctcaacgtgctcgagcaacggtcgaatggaagggcctccccctacctatagtgaagtaatgggacatcaccccggagcaagctttcttcaccaccagagatccaacgcccacaggggctcgagattacagtttcaacaaaacaatgcagagtcaacaattgtgcccattaagggcaaagaccgtaaaccaggtaatttagtctag

SEQ ID NO: 218430 - DNA, 867 bp, synthetic construct
  misc_feature 1..867: note = Description of Artificial Sequence: Synthetic coding sequence
  source 1..867: mol_type = other DNA
atgcctgaagccggattccaagctaccaatgcctttactgaatgcaagttcacttgtacctctgggaagtgcctgtacctcgggtccctggtgtgtaaccaacagaacgactgtggagacaattccgacgaagagaactgcctgcttgtcacggagcaccccccaccagggatcttcaatagtgagctcgagttcgcacagattatcatcatcgttgtggtggtgactgtgatggttgtcgtgatcgtctgtctgctgaaccactacaaagtctctaccagaagctttattaatcgacctaaccaatcgcgacgccgtgaggatggcttgccccagataatgcacgcacctagaagtcgggaccgattcaccgccccttccttcatccagcgagacaggttttcccggtttcagcccacatacccttacgtgcagcacgaaatagatctcccccctacaatatcgctgtccgatggggaggaaccacccccataccaaggtccctgtaccctccagctgcgcgaccctgagcagcaaatggaactgaaccgcgagtctgtccgcgcaccccctaaccgtaccatcttcgattccgacctgatcgatattgctatgtattctggaggaccctgccccccttcgagtaactcgggcatttctgcttcaacctgcagtagcaacggccgaatggaggggcctcccccaacttattccgaggtgatggggcatcaccctggcgcaagttttcttcatcatcagagaagtaatgcccacagaggcagtcgcttacaatttcagcagaacaacgctgaatctacaattgttccaatcaagggaaaagataggaagcccggaaaccttgtgtag

SEQ ID NO: 218431 - DNA, 693 bp, synthetic construct
  misc_feature 1..693: note = Description of Artificial Sequence: Synthetic coding sequence
  source 1..693: mol_type = other DNA
atggctgcagaactcgaattcgcacaaatcattatcattgtagtggtggtaacggtgatggtcgtcgttattgtttgtttgttgaatcattataaggtatcaacccgatccttcattaaccggccaaatcagtcgaggaggcgcgaagacggcctgccacaaattatgcacgctcccagatcaagagacagattcaccgctccaagtttcatccagcgcgatcgattttctcgcttccagccaacttacccttacgtccagcacgaaattgatttgcccccaaccatctctctgagcgacggggaggagcccccaccctatcagggaccttgtaccctccagctgcgtgaccccgaacagcaaatggaacttaatcgcgagtccgtgagggcccctcctaacaggactatcttcgactcggatttgattgacattgccatgtacagtgggggtccatgtccccctagttccaacagcggtataagcgcctccacttgttctagcaatggtagaatggagggcccacccccaacctatagcgaggtaatgggacatcatcctggagcaagctttctccatcaccaacgctcaaatgcacatagggggtcgagattgcagtttcaacagaataacgcagagagtacaatcgtcccgataaaggggaaggacaggaagcccggaaacttggtgtag

SEQ ID NO: 218432 - DNA, 1119 bp, synthetic construct
  misc_feature 1..1119: note = Description of Artificial Sequence: Synthetic coding sequence
  source 1..1119: mol_type = other DNA
atggcaaagagcaagacaaagcatagactctgctcacaagaaagtagtgtgagcgccttactggcatcctgtacgctttcagggtcaaatagtagcaactcagacggctcatttcactacaaggacaaactgtatcggtccgcatctcaggccctgcaggcctacatcgacgattttgacctcggccagatctaccctggtgcttcaaccggcaagattaacatcgatgaggactttacaaacatgagtcagttttgcaactacatatacaagcccaataacgcatttgagaacctcgaccacaaaaaacattccaacttcattagttgcaggagacatacagtgaacgatatagatagcatgtccctcacgaccgatgacctgctgcggttgccggcagatgggtccttcagttatacctatgtggggccaagccatagaacatccaagaagaacaaaaaatgcaggggtcgtctgggctccttggacattgaaaagaacccgcattttcagggcccttacacgtctatgggtaaagataattttgtgacaccggtcatcaggagcaacatcaacggaaagcagtgcggtgacaagatcgagctgttaatactgaaggccaagcggaacctcgaacagtgtactgaagaacttcctaaaagtatgaagaaggatgactccccatgcagcctggacaaattggaggcggacagatcctgggagaatattccagtcaccttcaagtctccagtgcctgttaattcagatgactctcctcagcaaactagccgcgctaaaagcgccaagggagtcctcgaggacttcctaaataacgataaccagtcctgcactttgtccggcggtaaacaccacggtccggttgaggccctcaaacagatgctgtttaacctgcaggcggtgcaggaacggttcaatcagaataagaccacggaccctaaagaggaaattaaacaggtgagcgaggatgattttagcaaacttcagcttaaagaaagcatgattcccataacaagatcactgcaaaaagccctgcaccacttgtcacgcctccgggacctggttgacgataccaatggcgagcgtagcccaaaaatgtag

SEQ ID NO: 218433 - DNA, 1602 bp, synthetic construct
  misc_feature 1..1602: note = Description of Artificial Sequence: Synthetic coding sequence
  source 1..1602: mol_type = other DNA
atggccaaatccaaaaccaagcaccgtttgtgcagtcaggaaagctccgtttccgccttgttggcctcatgtacattatcaggctcaaactcttcaaacagtgacggttcctttcattacaaagataagctgtaccggtctgcctcccaggccctccaggcttatattgacgatttcgacctcggacagatctatccaggggctagcacggggaagatcaatatagatgaggactttaccaatatgagtcagttctgcaattacatttataagccgaacaacgccttcgaaaatctggatcacaaaaagcactctaactttatcagttgcagaagacacactgtgaacgatattgattcaatgagtttgaccacagacgacctgctccgcttgcctgcagacgggagcttctcttacacttacgtggggccaagtcacaggaccagcaaaaaaaataaaaaatgccgaggcagactgggttcactggatattgagaagaacccccacttccaaggaccgtacacttccatgggaaaggacaattttgtgaccccagtaatccggtctaatataaatggtaagcaatgtggacggctcaaaaatccaaagctgatgaatagaactaataattgcatctcagaatccagcctgagcttccccaaaaaatcctctttcaaggatagctccgaacatagcttggagaaaaattacccgaggtggttgacaagccagaaatcggacctgaatgtaagcgggatcacttccatacctgatttcaagtacccagtatggctgcacaatcaggatcttcttcccgacgctaactcacagcgggtctatcaaattttcaaagatgatcagtgctcccccaggcactctcaccaggcccaaggcactagtcggctgattaacaagctggactgctttgaatacgccttcgagcccagtaatttttctaacagcctgtcagacgacaaagaactggtgaacgaatacaaatgcgacttcgaacatagccagtgccaatgcgaaaatcccctcctgccgggacagtccactaagccctttagcggagacaaaatcgagctattgatcttgaaagctaaacgcaacctggagcagtgcacagaagagctccccaaaagcatgaagaaagacgattccccatgcagcctggataagttagaagccgatcgctcatgggagaatataccggtgactttcaagagccccgtacctgttaactcagacgattccccacagcagacctccagggccaagagcgccaaaggggtgctggaggacttcctaaacaatgacaatcagagctgtactcttagtggcggtaagcatcacggcccagtggaggccttaaaacaaatgctgttcaatcttcaggccgtccaggaaaggtttaatcagaataaaaccaccgacccaaaagaggagattaaacaggtgagcgaggacgacttttctaagctgcagttgaaagaatctatgatacctattacgcggagcctgcaaaaggctcttcaccaccttagtagactgagggacttggtcgacgacactaatggtgaaagatccccaaaaatgtag

SEQ ID NO: 218434 - DNA, 522 bp, synthetic construct
  misc_feature 1..522: note = Description of Artificial Sequence: Synthetic coding sequence
  source 1..522: mol_type = other DNA
atggctgcaccctcaggcggatggaacggggtcggggcttcactatgggcagccctgcttctgggggctgtagcactgcggcctgcggaagccgtgtccgagcctacaaccgtagccttcgacgttcgaccaggaggggtcgtgcacagttttagccataatgtgggacccggagacaaatacacctgcatgttcacatatgcttcccagggcggtactaacgaacagtggcagatgtccctaggcacctcggaggaccatcagcattttacgtgcacaatatggagaccccaaggcaagtcctatttatactttacccaattcaaggctgaggtgcggggagcggagattgagtatgccatggcttactcgaaggcggcttttgagcgggaatcagacgtccccctgaagacggaagagttcgaagtaacaaagacggctgttgctcaccgccctggcgctttcaaggcagagctgagcaagctggtaatagtggctaaagcctctcgaaccgagctatag

SEQ ID NO: 218435 - DNA, 426 bp, synthetic construct
  misc_feature 1..426: note = Description of Artificial Sequence: Synthetic coding sequence
  source 1..426: mol_type = other DNA
atgacaatcatggtggaagatattatgaagctgttgtgttccttgagtggggaacggaaaatgaaggcagccgtgaagcacagcggcaagggtgcgctagttacaggggctatggcatttgtgggaggcctagtggggggtcctccgggactggctgttggaggcgcagtggggggtttacttggggcatggatgacctcaggccagttcaagccagtaccgcagattctcatggaattgcccccagccgagcagcagagactcttcaacgaggcagctgcaataatacgccacctcgaatggacggacgcagtacagcttacagctctcgtgatgggtagcgaggcgctgcagcaacagcttttagccatgctggtgaattatgtcacaaaggaactgagagccgagatccagtatgatgattag

SEQ ID NO: 218436 - DNA, 324 bp, synthetic construct
  misc_feature 1..324: note = Description of Artificial Sequence: Synthetic coding sequence
  source 1..324: mol_type = other DNA
atgacaattatggtagaggacattatgaaacttctgtgtagtctcagcggcgagcgcaaaatgaaggcagcggtgaagcactcaggaaagggggctctggttacaggggctatggcctttgtggggggactggtagggggacccccaggattggctgtggggggtgcagtcgggggactcctgggtgcctggatgacgagcggacagtttaagccagtaccacagattctgatggaactgcccccagccgaacagcaacggttgtttaacgaggccgctgctattacaagaccatgctctagttcttgctggccctgctggtag

SEQ ID NO: 218437 - DNA, 459 bp, synthetic construct
  misc_feature 1..459: note = Description of Artificial Sequence: Synthetic coding sequence
  source 1..459: mol_type = other DNA
atggagaggctcaaaagccataagcctgccaccatgacaatcatggtggaggacattatgaaattgctttgttccctttcgggcgaaagaaaaatgaaggcagctgtaaagcactctggcaagggagccctggtgacgggagccatggcttttgtgggtggcttggtcggcggacctccgggactggctgttggcggagcagtaggcggattgctaggcgcatggatgacaagtggccagttcaagcccgtgccccagatcctgatggaactaccccctgccgagcagcagcgcctgtttaacgaggcagccgcaataattcggcacctggaatggacagatgcagtccagttgaccgcactggtcatgggttcagaagctcttcaacaacaactactagccatgctcgtgaactatgtcaccaaggaactaagggctgaaattcaatacgacgactag

SEQ ID NO: 218438 - DNA, 648 bp, synthetic construct
  misc_feature 1..648: note = Description of Artificial Sequence: Synthetic coding sequence
  source 1..648: mol_type = other DNA
atggaaaaaaaccctcctgacgacactggccctgtccacgtgccccttgggcacattgtcgccaacgaaaagtggagaggcagtcagctggcccaagagatgcaaggaaagataaaactcattttcgaagatgggctcacacctgatttctatctgtccaaccgctgttgtattctctacgtgaccgaagccgacctggttgctggtaacggttatcgaaaacgactcgtgcgcgttaggaactccaataatctcaaaggcattgtcgtagtcgaaaagacccgtatgtccgagcagtattttcccgctcttcagaaattcacagtgctcgatcttggtatggtcttgcttcctgtcgcatctcaaatggaggccagttgcttggtgatacagctggtgcaggagcaaacaaaagagccttcgaagaacccactgttaggaaagaaacgggctcttctgctttcagaaccgtccctgctgcgcaccgtccagcaaattcctggcgtcggaaaagtaaaggccccacttctgctgcaaaaattccccagcattcagcagttgagcaatgccagtattggcgagctggaacaggttgtgggccaggctgtcgctcaacaaatccatgccttcttcacgcagcctcggtag

SEQ ID NO: 218439 - DNA, 648 bp, synthetic construct
  misc_feature 1..648: note = Description of Artificial Sequence: Synthetic coding sequence
  source 1..648: mol_type = other DNA
atggagaagaatcctccagatgacacagggccagtgcacgtcccactcggacacattgtagctaacgagaagtggcgtggatctcaactggcccaggagatgcagggaaaaataaagctgatttttgaggacggactaaccccagacttctacctctccaaccgttgttgtattctttatgtcacagaggccgacttggtcgccggtaatggatatcgtaagcgtctagtcagagtaagaaattcaaataacctaaaaggcatcgtcgtcgtggagaaaacacgcatgagcgagcagtactttccagctcttcagaagttcactgtcttggacctgggcatggtgctgctcccagtcgcgtctcagatggaagcatcttgtctggtcattcagctagtgcaggagcagacaaaagagccaagcaagaaccctctactgggtaaaaagagagcccttcttctgagcgaaccaagtctcctgaggactgtgcagcaaatacccggagtgggaaaagtgaaagcgccactgcttttgcagaagtttccttctattcaacagctgtccaatgcaagcatcggagaactggagcaggtcgtggggcaagcagtggctcagcagatccacgccttctttacacagcctagatag

SEQ ID NO: 218440 - DNA, 1227 bp, synthetic construct
  misc_feature 1..1227: note = Description of Artificial Sequence: Synthetic coding sequence
  source 1..1227: mol_type = other DNA
atgtccgagcacgttgagcccgcagcccctggacccggacctaatgggggaggtggcggtcctgccccagctcggggaccaagaacacccaatctgaatcctaaccctctcatcaatgtgcgcgaccgactctttcatgcccttttcttcaaaatggctgtcacctactcgcgcttatttcctcccgcattccgtcgcctgttcgagttctttgtcctactgaaggccttgttcgtgctttttgttttggcgtacatacacattgtcttttcacggtccccgattaactgtctcgagcacgtgcgcgataagtggcccagggagggaatactccgtgtcgaggtgcgccacaactcatctcgagcaccagtctttctgcagttctgcgactctggcggacgcggatctttccccggtctggctgtggagccgggttctaacctcgacatggaggacgaggaagaggaggaactaacaatggagatgtttgggaactccagcataaagtttgagcttgatatcgaacccaaggtctttaagcccccaagcagtacggaggcactgaatgacagccaggagtttccatttcccgaaacaccgacgaaagtctggccccaagatgaatacattgtggaatactccctggagtacggcttccttagactgagccaggctacacgccagcggctctccattccggtaatggtggtgacactcgaccccacaagagaccagtgtttcggagatcgattctctaggctgctgctcgacgagtttctgggttatgacgacattcttatgtcatcagtaaaggggcttgctgagaacgaggagaacaagggctttctgcgtaatgtcgtttccggcgagcattacagatttgtgagcatgtggatggcgcgaacaagctacctcgcagccttcgccatcatggttatcttcactctgtctgtcagtatgcttctgcgctatagccaccatcagatttttgtgttcatagtcgacctgctgcagatgctggagatgaatatggcgatcgccttccccgctgcgcctttgctgacagttatactcgccctggtgggtatggaggctattatgtctgagttcttcaatgacacaacgactgcattttatataatcctgattgtctggctcgccgatcagtatgatgccatatgctgccacacgtcaacttctaagagacactggctccggattccatag

SEQ ID NO: 218441 - DNA, 1863 bp, synthetic construct
  misc_feature 1..1863: note = Description of Artificial Sequence: Synthetic coding sequence
  source 1..1863: mol_type = other DNA
atgagcgaacatgtcgagccagcagctcctggccctggacctaacggaggaggaggcggaccagcccctgctagaggacctcgcactcctaatctaaaccccaacccccttatcaacgtgcgagaccgcctgtttcatgccctcttcttcaagatggccgtgacatacagcagactgttcccgccagcctttaggcggctgttcgaattctttgtcctgctgaaagcattattcgttctctttgttctcgcgtatatccacattgtctttagccgatcacccataaactgtctcgagcacgtgcgagataaatggccacgggagggaattcttcgtgtagaggtgcgccacaattccagtagagccccagtatttctgcagttctgtgacagcggtggcaggggatctttccctgggctggcggtagaacccggtagtaatctcgacatggaagatgaagaggaagaagaactgacaatggaaatgtttggaaattccagcattaaatttgagctggacattgagccgaaggtattcaaaccacctagctccactgaagcgctcaacgactctcaagaattccccttccctgagacccctacaaaggtatggcctcaagacgaatatatcgtcgagtattccctggagtacggcttcctacggctatcgcaagccacaaggcaacggcttagtatcccggtaatggtggtgaccttagacccaactagggaccagtgtttcggggacaggttcagcagactgctgttagacgagttccttggctacgatgacattcttatgagcagtgtcaagggcctggctgagaacgaggaaaacaaagggttcttaaggaatgtggtatccggcgagcattacaggtttgtatcgatgtggatggccaggacctcttatctcgccgcatttgccatcatggtcatcttcacattgtcagtgtcgatgctgctgaggtattcccatcaccagatcttcgtgttcatagtggacttattgcagatgctggaaatgaacatggctatcgcattccccgcagcacccctgcttaccgtcatactggccttggtgggaatggaagccattatgagcgaatttttcaacgacactactactgccttctatatcattctcattgtgtggctggccgatcagtacgacgcaatatgctgccacacatctacctctaagcgtcactggctgaggtttttctacctgtatcatttcgccttttatgcctatcactacagattcaacgggcagtattcttctctggcgctggtcacatcatggctctttatacaacattccatgatttactttttccatcactacgagctccccgcaatcctgcaacaggttaggattcaggaaatgcttctgcaagcccctccgcttggtccaggcaccccaaccgcgttgcctgatgacatgaataataactctggtgccccagctaccgcccctgactctgccggtcaacctcctgccctagggccagtgtctccaggcgcaagcgggagtccaggtccagttgccgctgctccttcctccctggtggccgcagccgcttccgtggccgctgctgctggcggagacctcggttggatggccgagaccgccgctatcatcaccgatgcatcctttttgtccggcctatctgcttcgcttctggaacggagacccgctagccctctcggccctgcgggaggactcccccatgcccctcaggatagtgtgccaccaagcgattcagcagcctctgacactacaccccttggagctgccgtgggtggcccttccccagctagtatggcccctactgaggccccatctgaggtcggaagttag

SEQ ID NO: 218442 - DNA, 447 bp, synthetic construct
  misc_feature 1..447: note = Description of Artificial Sequence: Synthetic coding sequence
  source 1..447: mol_type = other DNA
atggccgcttcccctgccaggccagccgtgctggcactgactggattggcactgctactcctgctctgctggggacctggcggaatatcaggaaataagctgaaattgatgttgcagaaaagggaagcaccagtgcctaccaagactaaggttgcagtagacgagaacaaggccaaggagttcctggggagcctgaaacggcaaaaacgtcagctgtgggatcgcactcgccctgaggtacagcagtggtatcagcaattcttgtacatgggctttgacgaggccaagttcgaggatgatataacgtattggctcaacagggataggaacggacacgagtattacggcgattactaccagcgccattacgacgaggacagcgcgatcggcccacgctcaccatatggctttcgccacggggcaagcgttaactatgacgactactag

SEQ ID NO: 218443 - DNA, 2964 bp, synthetic construct
  misc_feature 1..2964: note = Description of Artificial Sequence: Synthetic coding sequence
  source 1..2964: mol_type = other DNA
atgacaccggctctgcgagaagcgaccgcaaagggcatcagtttctcctcacttcccagcacaatggaatctgataaaatgctctatatggaaagcccacggaccgtggatgagaaattaaaaggggacacattctctcaaatgctggggtttccgacacccgagcccacattgaataccaatttcgtgaacctgaaacactttggctcccctcagagttcaaaacactatcaaactgtttttcttatgcgctccaacagcacactgaacaagcataatgaaaattataagcaaaaaaaattgggcgagccttcatgtaataagctaaaaaacatattgtataacggctctaatatccagctatctaagatttgcctatcccatagcgaggaatttattaaaaaagagcccttgtcagataccaccagtcaatgcatgaaagacgtgcagatcattcttgatagtaacatcactaaagacacaaacgtagataaagtccagctacagaattgtaagtggtaccaggaaaacgccttgctggataaggtaacagacgccgaaattaagaaaggactgttgcactgcactcagaagaaaatcgtgccaggacatagtaatgtgcctgtttccagctccgcagccgagaaggaagaggaggtgcatgctcgcctgctgcattgcgtgagcaagcagaagattttactctctcaggccaggaggactcagaagcatctgcagatgctcttggcgaagcacgtcgtcaagcactatggccagcagatgaaactgtccatgaagcaccagttacctaaaatgaagacattccacgagcccactaccatcctcgggaactccctgcccaaatgtaccgagatcaagcctgaggtgaataccctaaccgccgaaaataaactgtgggatgacgccaaaaacggtttcgctcgctgtactgctgccgaaatacagcgctttgctttctcagctactgggctcctgagccatgtagaagaggggttggattctgatgcaacagattctagctccgacgatgacctggatgaatacactctgaggaagaacgtcgcggtgaattgctcaacagagtggaaatggcttgtcgacagggccagggtagggtccagatggacatggctgcaggcccaaataagcgatctggagtgcaagatccagcagttaactgatattcacaggcagattagagcctctaagggaattgtggttctcgaggagtgccagcttcctaaagacatcctcaaaaaacaaatgcagtttgccgatcaggctgcttctttgaatatcctgggaaacccccaggttccacaggagtgtcaggatccagtgccagaacaggatttcgagatgtccccatcctctcctaccctgctcttgcgtaatatagagaagcagtctgcgcagctgaccgagattattaactctctcatcgctccgctgaacctgagccctaccagctcacccctgtcttcaaagagctgtagtcataaatgcctggcaaacggcatttaccgtagcgcttccgaaaatctcgatgaattaagcagtagtagcagctggctacttaatcagaaacactccaaaaagaagaggaaagatcgcactaggttaaaatccagcagcctgacattcatgtccacatcagctcgtaccagaccccttcagtccttccataagcggaagctgtaccgcctttcacccactttctattggacccctcagacattaccttccaaagagaccgcattcctgaataccacccagatgccctgtttgcagagcgcctccacctggagtagttacgagcataattccgaatcgtacctccttagagagcacgtgtcagaattggactcctccttccattctgttctctccctaccctctgacgtacccctgcatttccatttcgagactctgctgaaaaaaacagagattaaggggaacctggccgagaataagtttgtggacgagtatattattagtccctctcctgtccatagcacccttaaccagtggaggaacggatattcacccatctgcaagcctcagattcgatctgaaagcagcgcccagctcctgcaagggagaaaaaaacgccatctttcagaaactgcactgggcgagcgcaccaagttggaagagagcgacttccagcacacagaaagcggatcgcacagcaatttcacagctgtgagtaacgtgaacgtgctctcacgcatccagaacagctcccgaaacaccgccagacgacgactccgttccgaatcatcctacgacattgacaacatcgtcattcctatgagcctggtggcgcctgctaaactggagaagctgcagtataaggaaattctgaccccgagttggaggatggtagtcttgcagccactggatgagtacaatcttggaaaagaggagatagaggatctgtccgacgaagttttttccctgagacataaaaaatatgaagagcgcgagcaggctagatggagcctgtgggagcaaagcaaatggcaccgcagaaattctagagcttattcaaaaaatgtggagggccaggacctcctgttgaaggagtatcctaacaacttctcatcatcacagcaatgcgccgctgcaagtccacctgggctgcctagcgaaaatcaggatctttgtgcctatggcctgccttctttaaaccagtctcaagaaacaaagagcctatggtgggagcggcgtgctttccctcttaagggggaagacatggcagctctattgtgccaggatgagaagaaggaccaggtggagcgcagttccaccgcttttcacggagaaatattcggaacatcagtgccagaaaatggccaccaccccaagaaacaatccgacgggatggaagaatacaaaaccttcggtctgggcctgactaacgtgaaaaagaatcgttag

SEQ ID NO: 218444 - DNA, 687 bp, synthetic construct
  misc_feature 1..687: note = Description of Artificial Sequence: Synthetic coding sequence
  source 1..687: mol_type = other DNA
atgtcctacgcagagaagcctgatgaaatcactaaggatgaatggatggagaagctcaacaacttacacgtgcagcgagctgacatgaatcgcctgatcatgaactaccttgtgactgagggcttcaaggaggccgcagaaaagttcagaatggaatcgggaatcgagccgagtgttgatctggaaacacttgatgaaaggatcaaaattcgcgagatgattttaaaaggccaaatccaagaggcaattgccctgataaactccctccacccggagttgttggatacaaacagatacttatacttccacctccaacagcaacatcttatcgaacttattcggcagagggagacagaagccgctctggagttcgcacagacccaacttgccgagcagggagaagagagcagggagtgtttaacagaaatggagaggacacttgcattactggcctttgattctcccgaagaatccccattcggcgacctgctccatacaatgcagaggcagaaggtatggagtgaggtcaaccaggccgtgctggattacgaaaatcgagaatccactccaaagctggctaaactgctcaaacttctactgtgggcccagaacgaactcgaccagaagaaggttaagtatcctaaaatgacagacctctctaaaggcgtcattgaagagcctaagtag

SEQ ID NO: 218445 - DNA, 468 bp, synthetic construct
  misc_feature 1..468: note = Description of Artificial Sequence: Synthetic coding sequence
  source 1..468: mol_type = other DNA
atgtcctatgccgagaagcctgacgagattaccaaagacgaatggatggagaagttaaataatttgcacgtgcaaagggctgacatgaaccggctgatcatgaattatctcgtgacggaagggttcaaagaggcagccgagaagttccggatggagtccggtatagaacctagcgtggatctggagacgctggacgagaggattaagatcagggagatgatcctgaagggacaaatccagcaggtggtgcacgactgttggcggaaggagagggtgttcatcctatccgatctgcccagcagcatttctgctgcgagccaccctccttccagcgctggctctgctgatgtgctcctcttatttacacataggaccgtgccttgctcagtcgttggcagaagggaggtggttcaaggctgcgtgcactgcctaagagtaggtacagttgacggccacatggccctgtag

SEQ ID NO: 218446 - DNA, 3534 bp, synthetic construct
  misc_feature 1..3534: note = Description of Artificial Sequence: Synthetic coding sequence
  source 1..3534: mol_type = other DNA
atggacgtttaccctccacgaagacaagggctgccacgcgctcgatctcccggaggttctagtaggggtagtccaagcgtctcgtgtagccggcttaggcaagtccagtctatacttactcagtcctcaaagtctcgtcccgatgggattctgtgcatcttgggaattgatagcaggtacaatgagggctgtcgtgaactggcaaattacctgttgttcggcttatataaccagaacacatccgactttgagaaaaccggcttttctgaggaagttctggacgatgtgattattctgataaaatcggacagtgtacatctatactgcaaccctgtgaactttcggtatcttttgccctatgtggcccattggaggaacttacactttcactgtatgaccgagaatgaatacgaggatgaggaggcggcagaagaattcaaaatcaccagtttcgtggacatggttcgggactgctccaggatcggaatcccatatagttctcaaggccacctgcagatcttcgacatgttcgtggtggagaagtggcccattgtacaggctttcgccctggaagggattggaggtgatggattctttaccatgaagtacgagctgcaagatgtgagccttaatctgtggaatgtgtactctaaaatggacccaatgtcactggaaagcttgttgagtgatgatcttgtggccttcgagcaccagtggacatccttcttcgctaattttgacaccgagattccgttcctgctggaacttagcgaaagccaggccggagaacctttcaggagttacttttcccacggcatgatctcatctcacataacagagaattcaccaaatcggcaaccttttgtacttttcggtaaccactctacgagagagaacctgaacgcaggcaatttcaattttccttccgaaggccatttagtgagaagcactggcccaggtgggtcattcgcaaagcacatggtcgctcagtgcgtatctcctaaagggccactggcatgctctagaacctactttttcggggctacccacgtgccatacctaggaggtgactcaaagttgcctaaaaagaccgaacagataaggttgctaagtcagatatacgccgctgtcatcgaagccgtgcttgctggcatcgcctgctacgcaaagacctcaagtcttacaaaggcgaaggaagttgccgagcagaccctgggctctggcctggattcatttgagctgatcccatttaaggctgcactgcgcagtaagatgacatttcatattcacgccgtcaacaaccagggcaggatagttccccttgacagtgaagatagtttatccttcgttaaaacagcttgcatggccgtgtacgacattcctgatttactcggcggaaacggctgcctcggcagcgtggtatttagcgaaagcttcctcacttctcaaatcctggtgaaagaaaaagatgggaccgtaactaccgagacgtcaagtgtggttctgaccgccgcagtgcccagattctgcagctggcttgtcgaagataatgaagtaaagctgagcgagaaaactcagcaggccgtcaggggtgatgaatccttcctgggaacctatctgactgggggagagggggcatacctgtacagctctaatctccagtcctggccagaggaaggaaacgtccacttttttagcagtgggctgctattttcccactgcaggcacagaagcataataatttcaaaagatcatatgaattccatatcattctacgacggcgacagtactagcactgtcgctgcgctcttgattgactttaagtcctccctgctaccccatctgcctgtgcattttcatggctcctctaactttctgatgattgcccttttcccaaaaagcaagatctaccaggccttctactctgaagtgttttccctctggaagcagcaggataatagtgggatctcacttaaagtgatccaagaagatgggctgtctgttgagcagaagcgcctgcatagcagtgcccagaaactgttttccgccctgtcccaacccgctggggagaaacgatcctctctgaagttgctgtcggccaagctgcctgaattagattggttccttcaacacttcgcaatctcaagtattagtcaggaacccgtcatgcggacgcatttaccagtgctgctgcagcaggcagagatcaacacaacgcacagaattgaaagcgataaggtgattattagcatcgttaccggcttgcctgggtgccacgcctccgagctttgtgctttcctcgtgacgctccacaaagagtgcggccgttggatggtctacagacagattatggactcatctgagtgcttccatgcagcccactttcagaggtatcttagcagcgcgctggaggctcagcagaatcgatctgccagacagagcgcctacattagaaagaagaccagattattggttgtgctacaggggtatacagatgttatcgatgtcgttcaagctctacaaacccatccagattccaacgtgaaggcttcttttacgatcggcgcaattaccgcttgcgtggagccaatgtcctgctatatggaacataggttcctgtttcctaagtgcctggaccagtgtagccagggcctagtgtccaatgtggttttcacaagccacactaccgaacagaggcacccactcttggttcagctgcagagcctgatccgtgccgcaaaccccgctgccgcatttatcctggccgaaaatggaattgtgacccggaacgaggacattgagttgatcctgtctgagaatagcttctccagccccgaaatgctgcgtagcaggtacctaatgtaccctggttggtatgaaggtaagttgaatgccggtagtgtctatcctcttatggtgcaaatttgcgtatggtttgggaggcctctggaaaaaacccggttcgtcgccaagtgcaaggctatacagtcttcaattaaaccatcgcctttctccggtaatatttaccacatactgggtaaggttaagtttagcgactctgaacgaacaatggaggtgtgttacaacactctggctaactcactgagcatcatgccggtgcttgagggtccaaccccccctcccgacagcaagagcgtctcccaggactctagcggccagcaggagtgttatctggtctttatcggttgctcactgaaggaggatagtataaaagattggctgagacagtctgccaaacagaagcctcagcgaaaggctcttaaaacgagagggatgcttacccagcaggagataaggtccatccacgtcaaacggcacctcgagccgcttcctgcgggatatttctacaacggaacccaatttgtaaacttctttggggacaagacggatttccacccactgatggaccagtttatgaacgattatgtggaggaggctaacagagagatcgaaaagtacaatcaggagttagagcaacaggaataccatgacttattcgaactgaagccatag

SEQ ID NO: 218447 - DNA, 1488 bp, synthetic construct
  misc_feature 1..1488: note = Description of Artificial Sequence: Synthetic coding sequence
  source 1..1488: mol_type = other DNA
atggaagggtgtctgggtcaggagctgtttagcaatcacatgtttcttacaagcctctcttcccccaatcggcagccgtttgtgctgtttgggaaccattctactcgggaaaatctgaacgctggtaacttcaactttccttcagaaggacatcttgtgcgaagcaccggtccaggcggaagcttcgctaaacacatggtggcccaatgcgtctctcccaaaggaccgctagcatgctcccgcacctacttcttcggagccacacacgtgccctacttaggaggagatagcaagttgcctaagaaaacggagcagatgcttctgagccagatttacgcagccgtaattgaggcggtgcttgccggaattgcttgctacgccaagaccagtagtctgacaaaggctaaggaggtcgccgaacagaccttaggttccgggctggactcttttgaactaataccattcaaagccgctctgcgctcaaagatgacctttcatatccacgcggtgaataaccaagggcgtattgtaccattggattccgaggattctttgtccttcgtgaagactgcttgtatggccgtctatgacattcctgatctcttgggcggaaatggctgcttaggctccgtggtgttcagcgagtcttttttaacttcacagattctggtgaaagagaaggatggcactgtgacgaccgaaaccagtagcgttgtgctcaccgctgctgtccctaggttctgcagctggctcgtcgaagataatgaggttaagttaagcgaaaagacccagcaggccgtgagaggagacgagagcttcttgggaacatatctgacgggcggagaaggagcttatttgtattcttctaacctccagagctggcccgaggaaggcaacgtccattttttcagttcagggcttctcttctcacattgtcgacatagatcaattattattagcaaagatcacatgaactcaattagcttttatgatggagactcaacctcaactgtggccgcactgcttatagattttaagagctctttgcttccccacctcccggtgcacttccacggaagcagtaatttcttgatgatcgcactgttcccgaagtcaaaaatctaccaggcattctattccgaagtattttcactgtggaagcagcaggacaattcaggaatcagtctgaaagtgatacaggaagacgggcttagcgtcgagcagaaaagactccactcttccgcccagaaactcttcagtgctctgtcccaacctgcaggggagaagagatccagcctgaagctgttatctgcaaaactgccggagcttgactggtttctacagcacttcgctatttcctccattagccaggagccagtgatgagaactcatctgccggtgctcttacagcaagccgaaatcaacacgacgcataggatagaatctgacaagatggatggagtctccccaaaccatggccagctttag

SEQ ID NO: 218448 - DNA, 615 bp, synthetic construct
  misc_feature 1..615: note = Description of Artificial Sequence: Synthetic coding sequence
  source 1..615: mol_type = other DNA
atgggggaagcggaagtgggtggcggaggagctgccggagataagggcccaggggaggcagctacttctccagctgaagagaccgtggtgtggtctcctgaagtggaggtctgtttgttccacgctatgttgggtcataagcctgtgggagtgaaccgacatttccatatgatatgtatcagggacaagttcagccagaacataggtcgccaggtcccttcgaaagtgatctgggaccatctgagtacgatgtatgatatgcaagcactgcatgagagtgagatccttcccttccccaatcccgaacgcaacttcgttctgcccgaagaaataattcaggaagtgcgggagggcaaagttatgatagaggaagagatgaaggaggaaatgaaggaagatgtggacccacacaacggggctgatgacgtcttcagcagcagtggctccctcggaaaggcgagcgaaaagtcctccaaggacaaagagaagaattcaagcgacctcggatgtaaggagggagcagacaaacgtaagcggagtcgcgttaccgacaaggtgctcaccgcgaatagtaatccatcctccccctctgcagcaaaaagaagaaggacatag

SEQ ID NO: 218449 - DNA, 1278 bp, synthetic construct
  misc_feature 1..1278: note = Description of Artificial Sequence: Synthetic coding sequence
  source 1..1278: mol_type = other DNA
atgtacccatctaataagaagaaaaaagtgtggcgcgaggagaaggaaagactgttgaagatgactctcgaggaacgacggaaggagtatctacgggactatattccacttaatagcatcctgtcttggaaagaggagatgaaaggaaaaggccagaacgatgaggagaacacccaggagaccagtcaggtgaagaaatcgcttacagagaaggtctccctctatcggggagacatcaccctgctggaagtagatgccattgtgaacgccgcaaatgcaagcctgttaggcggtggcggtgtggacgggtgcattcatcgagcggcaggaccctgcttgctggccgagtgccgaaacttgaacggttgtgacaccggccacgctaaaattacctgcggttacgacctgcccgcaaaatatgtgatacacaccgtgggccctattgccaggggacacattaacggatcccacaaggaggacctggccaactgttacaaatctagcctgaagctcgtaaaagaaaataacatccgatctgtagctttcccctgtatctccacggggatctacggcttcccaaatgagcccgcagccgtcatcgctctaaacacaatcaaggaatggctcgccaagaaccaccatgaggtcgaccgcatcatcttctgtgtctttctggaggtggacttcaaaatatataaaaaaaagatgaatgagtttttttcagtcgatgataacaacgaggaggaagaagatgtggagatgaaagaggactctgacgagaacggccctgaagaaaagcagagcgtcgaagaaatggaggagcagtcccaggacgctgacggcgttaacacagtaacagtccctgggcctgcctccgaggaggccgtggaggactgcaaggacgaagactttgcaaaggacgaaaacatcactaagggtggtgaggttaccgatcactcagtccgcgatcaggaccaccctgacggccaggagaatgatagcaccaagaatgaaataaagatcgaaaccgagtcacaatctagctatatggaaacagaggagctctccagcaaccaggaggatgccgtaatcgtggagcagccggaggtgatacccctgactgaggaccaggaagaaaaagaaggcgagaaagctcccggagaagacacaccacggatgcctggaaagtctgagggaagtagtgaccttgagaacactcctgggcctgacgccggagcacaggacgaggcaaaggagcagaggaatggtacaaaatag

SEQ ID NO: 218450 - DNA, 1248 bp, synthetic construct
  misc_feature 1..1248: note = Description of Artificial Sequence: Synthetic coding sequence
  source 1..1248: mol_type = other DNA
atggcatttctgatgcaccttctggtgtgtgtgtttgggatgggatcttgggtgaccatcaacgggctgtgggtcgaactacccttacttgtgatggaattaccggagggatggtacctgccttcttacctgaccgtagtaatacaacttgctaacatagggcctctcctcgttacacttttgcaccacttcaggccctcctgtctgagcgaagtgcctattatttttaccctactgggcgtcggcacggtgacatgtataatcttcgcgtttctttggaacatgacttcctgggtgttagacgggcatcacagtatagccttcctggtcctgacgttctttttggcgttggtggattgcacctccagcgtgactttcctcccatttatgtcccggctgcccacatactaccttaccacctttttcgttggagaggggttgtctggtcttctgcccgctctggtggcccttgcacaggggtccggccttactacatgtgtgaacgtgaccgagatttcagactccgtgccgtctcctgtcccaactcgtgagaccgatatagctcaaggtgtgccccgagccttggtctctgcacttcctggcatggaagcaccactgtcccatctagaaagccggtacctgccggcacacttttcccctcttgtgttttttctgttattgagcatcatgatggcctgctgcctggtggctttctttgtactgcagcggcagcccagatgctgggaggcatccgtggaggacctccttaacgaccaagttaccctgcatagcatcagacccagggaggagaacgacttgggccctgcagggactgtggacagtagtcagggccaggggtacttagaggagaaggcggcaccctgttgtccggcacacctggcgtttatatacaccctggtcgcattcgtgaacgccctgaccaatggtatgctgcctagtgtccagacatactcctgtctctcttatggaccagtggcctaccatctggccgcaacactgtcaatcgtagccaaccccctggccagtttagtgtctatgtttctcccgaatcggagcctgctctttttgggcgtgctttctgtgctcggaacatgtttcggtggctacaacatggcaatggccgtgatgagcccctgtcctcttctgcagggccattggggcggtgaggtgctgatcgtctccattcgacctgttggtctcttgccgctgaggactccccacccatag

SEQ ID NO: 218451 - DNA, 1038 bp, synthetic construct
  misc_feature 1..1038: note = Description of Artificial Sequence: Synthetic coding sequence
  source 1..1038: mol_type = other DNA
atgctccggcctgcaggcttgtggagactgtgtcggcgaccttgggccgctcgggttccggctgaaaacctgggccgacgggaggtcacctccggggttagtccgagaggtagcacttcacctagaactctgaatatctttgatcgggatctgaaaagaaagcaaaaaaactgggccgcacggcagccagaaccgacaaagtttgactatttgaaggaagaggtaggatctcgcatcgccgatcgagtgtacgatatcccccgtaactttccgctggctctcgatctcggctgtggacgcggttacattgctcagtaccttaataaggagacgatcggcaagttcttccaggcagatatcgctgagaatgccttgaaaaattcaagcgaaactgagattcctacggtgagtgtgctggctgacgaagagtttcttccgttcaaagaaaacacattcgacctcgtcgtatcatctctctcactccactgggtgaatgatctgccccgtgccttagaacagattcattacatactgaaacccgacggggtctttatcggggcaatgtttggaggggatactctgtacgagctgcgatgtagtctccaactggcagaaacagagcgggaagggggattctccccgcacattagcccttttacggctgttaatgatttgggacacctccttggtcgggctggatttaatacccttactgtcgatacagatgaaatccaggtgaattacccagggatgtttgaactcatggaagatttacaggggatgggtgaaagcaattgcgcttggaataggaaagctctgctgcatcgcgatacaatgttggccgctgctgccgtttaccgggagatgtataggaacgaggacggtagtgtccccgcaacgtaccagatttattacatgatcgggtggaaataccacgagtcccaggcgaggcccgctgaacgcggttctgctaccgtttctttcggagagttgggtaagatcaataatctcatgcccccaggcaaaaagtcccaatag

SEQ ID NO: 218452 - DNA, 954 bp, synthetic construct
  misc_feature 1..954: note = Description of Artificial Sequence: Synthetic coding sequence
  source 1..954: mol_type = other DNA
atgttgcggccagcaggactatggcgactctgccggcgtccgtgggcagcccgagttccagctgagaatttaggaaggagagaagtgacctccggcgtttccccccgaggttcaactagcccacgcactctgaacattttcgacagggacctgaagcggaagcaaaaaaactgggccgcaaggcaaccagagcctaccaaattcgactaccttaaagaagaggtgggctctaggatagccgatagggtgtacgatattcccagaaattttccattggccctagatttgggatgtggtcggggatatatcgctcagtatctcaacaagctgcagctctttcactgtcgtaagttactagagagcttttcaaagctgacactccagaagatgctgtgcctgcactgggttaatgacctgccccgagccttggagcagatccactacatactgaagcccgatggggtctttattggggctatgttcggtggtgacactctgtacgagctcagatgctcactgcaactggcagagaccgaacgagagggaggattcagtccccatataagtccttttacggcagtgaatgacctgggccacctgctgggcagagcgggattcaatactctcacagtcgataccgatgagatccaggtcaactacccaggcatgttcgaactcatggaggacctgcaagggatgggagaaagtaactgcgcttggaaccgaaaggctctgctgcacagggacaccatgctggcagcggctgccgtgtatagggaaatgtatcggaacgaagatggaagtgtgccagcgacgtaccagatctattatatgatcgggtggaaataccatgagtcacaggcacggccagcagaaagaggcagcgccactgtttctttcggggagctcggcaagatcaataacctcatgccccctggcaaaaaaagccagtag

SEQ ID NO: 218453 - DNA, 804 bp, synthetic construct
  misc_feature 1..804: note = Description of Artificial Sequence: Synthetic coding sequence
  source 1..804: mol_type = other DNA
atgttaaggcccgcaggtctgtggaggctttgccggaggccatgggctgcaagagtgcccgctgagaacctcggaaggcgagaagtgacgtccggggttagccctagggggagcacatctccgaggacattaaatattttcgaccgcgatctgaagcgtaagcagaagaactgggccgctcgccaaccggagcctaccaagttcgattatcttaaagaggaggtgggcagtcggatcgccgatcgggtgtatgacatcccacgcaattttccactggccttggatctgggctgtgggagaggctacattgcccagtatctgaacaaggagacgattggcaaatttttccaggccgatattgcagagaacgccttaaagaactctagcgaaaccgaaatccccacagtttcggttctcgctgacgaagaatttctgcccttcaaagagaatacctttgatcttgtcgtatctagtttgtcgctgcattgggtgaacgaccttccacgggcactggagcagattcattacatcctaaagccagatggtgtctttatcggcgcaatgttcggaggggacaccctctacgaactgcgctgctccctccagctggcagagacagagcgggaaggcggattttcacctcatatctcgccgttcacagccgtgaatgacttaggccacctcctcggcagagcagggttcaacacattgaccgtagacaccgatgagatccaggtaaactatcccggaatgttcgagctcatggaagacctgcaggaacagaagagtaggatgctgacctag

SEQ ID NO: 218454 - DNA, 771 bp, synthetic construct
  misc_feature 1..771: note = Description of Artificial Sequence: Synthetic coding sequence
  source 1..771: mol_type = other DNA
atgaaacttactcggaaaatggtgctgacaagggctaaagcctctgagctccattcagttcgcaaactgaactgctggggatcccgcctcactgacattagcatctgtcaggagatgccttcgctagaggtgataacgctgtcggtgaacagtataagcacactggagcctgtatcgcgctgccagcgactgtccgagctttacttacgcagaaacaggatcccaagcctggcagaactcttctatctgaaagggctgccaagactgcgtgtgttatggttagccgaaaatccatgctgcggaaccagcccacacagatacaggatgacagtgctaagaactctgcctcgcctccaaaagctcgataatcaggccgttactgaggaggagctaagcagagctttgagtgagggcgaggaaattacggcagcaccagaacgggaaggcactggtcacggcggacctaagttgtgctgcacattatcatctctatctagcgccgcagagacggggcgtgatcccctcgactcagaagaggaggctacctccggcgctcaggacgaacggggtctgaaaccaccaagcagaggccaatttcccagcctcagtgcgagagacgcgtctagcagccatcggggaagaaacgttttgactgccatactgttactcctgcgagagctagatgccgaagggcttgaggccgtacagcagactgtcggctcaagactccaggcactgcggggagaggaagtgcaagagcacgcagagtag

SEQ ID NO: 218455 - DNA, 654 bp, synthetic construct
  misc_feature 1..654: note = Description of Artificial Sequence: Synthetic coding sequence
  source 1..654: mol_type = other DNA
gtgacacaggggcctcaggggttacgggcaagtggcaggagctgcgttgggcctttcctgagccacctaggacgcgatcggacaccaggtgtgctcacagagttgagatgcgtggtccccgcacggcttacagcgcttgagcggtcgagaaagcccagaggcagggggcgtggcaggtacattactctccttccagtgccggaagccgaccctatcctggagagagtccctcagcccgagttttgctcctgtgtaaattccatcagcaccctcgaacccgtgagcaggtgtcaaaggctgtctgagctgtaccttcgcagaaatagaatcccttcattggcagagctgttctatctgaaggggctaccacgtttgagggtgctatggcttgccgaaaacccatgctgtggcactagcccccataggtaccggatgaccgtgctccgtacgctccctagattacagaaactggataatcaggccgtgaccgaggaggaactctcccgtgccctgagtgagggggaagagattactgccgctccagagcgtgagggaactggtcatgggggaccaaaactctgttgtacactgtcctccctttcctcggcagctgagacagggcgtgacccactggatagtgaagaggaggcatag

SEQ ID NO: 218456 - DNA, 1128 bp, synthetic construct
  misc_feature 1..1128: note = Description of Artificial Sequence: Synthetic coding sequence
  source 1..1128: mol_type = other DNA
atgaaactgacgagaaagatggtcctgaccagagcgaaagcttctgagctccacagtgtccgcaaactgaactgctgggggtctaggcttaccgatatatctatctgccaagaaatgcccagcctggaggtgatcaccttaagcgttaattcaataagtactcttgaaccagttagccgctgccagaggttgagcgagctgtacctgagaaggaatcgtattccctccctggctgagctgttttacctgaagggtctccccaggctgcgcgtgctgtggctggccgagaacccctgctgtggtactagtcctcacagataccgaatgaccgtgctgcgaaccctgccccgactgcagaaactcgataaccaggcagtgacagaggaggaactttcgagagccttgagcgaaggcgaggaaataactgcggctcctgagagggagggcactgggcacggcggtcctaagctgtgttgcactctctcatcgctcagttctgccgcagaaacagggagggaccccctcgattccgaagaggaagcgaccggggctcaggacgagcgtgggttaaaacctccttccagaggacagtttccttccctctccgcgcgtgacgcaagcagtagtcacaggggccgagtatccggtggccctctcggcgctgccgctgcctctgctcactgcacccactgcaccgagactgtaggcagagaacacggagcctctcaaggccctgtggggagggagcacggtgcctcgcaaggcttggaagaactgtgtccccgtggttcctgtgtgtgtggcagtgtgaacgctcatacaagggtgactcgagcgccacacggggcagtcctggcacctcagcccctcctgctgtcctggtctgtggagtgcgggccaggcccatgctgggctgagggcaatcgctcacacgtcgaagaggtgccccacacgcgtcctcaggcgggactgttatgtagtgactcccccagcgtgccgaacgtgctgaccgcaatcctccttttgctcagggagttggatgctgaaggactcgaggcggtccagcagaccgtcggtagtagactccaggcgctgaggggcgaagaggtccaggagcacgcagaatag

SEQ ID NO: 218457 - DNA, 807 bp, synthetic construct
  misc_feature 1..807: note = Description of Artificial Sequence: Synthetic coding sequence
  source 1..807: mol_type = other DNA
atggcagccgttagagtcctggtagcttcccgcctcgccgctgcgtctgctttcacgagcctctctcctgggggaagaacaccatcacagagagctgccctccacctctccgtccctaggcccgcagctcgggtggctctggtgttgtcaggttgtggagtgtatgatgggacagagattcacgaagcgtctgctattttagtgcatctcagccgcggtggggctgaggtgcagattttcgcacccgatgtcccacagatgcacgtgatcgaccacaccaagggccagccatcagagggcgagagtcgtaatgtgctcacggagagcgcacgcatcgccaggggcaagatcactgatctggctaacctctccgccgctaatcacgacgcagccatcttccctggcggttttggtgcagctaagaatctgagcacattcgcagtggatggaaaggactgtaaagtcaacaaagaggtcgaacgggttcttaaggagtttcaccaggccggtaagccgatagggctttgctgtatcgcacccgtgttggctgccaaggtgctcagaggagttgaggtcacagttggacatgaacaggaggaagggggtaagtggccctacgccggaaccgctgaggccattaaagccctcggagccaagcactgtgtcaaagaagtcgtggaggctcatgtggatcaaaagaacaaggtcgtgacgacaccagcttttatgtgtgaaactgcactgcattacatccacgatgggatcggcgctatggtgagaaaagtcctcgagcttactggcaagtag

SEQ ID NO: 218458 - DNA, 714 bp, synthetic construct
  misc_feature 1..714: note = Description of Artificial Sequence: Synthetic coding sequence
  source 1..714: mol_type = other DNA
atggcggctgtaagagtactggtggcctcccgcctggcggctgcgagcgcctttacgtcactgtcaccagggggaaggactccctcccagcgtgccgctttgcatctgagtgtgcctcgtccggctgcgagagttgccctggttttatctggttgcggagtttatgacggtactgagattcacgaagctagcgccattttggtgcacctatccaggggcggtgcggaggttcaaatattcgccccagacgtaccacagatgcatgtcatagaccacacaaaaggacagccttcagagggcgaatcgcgaaatgtcttgaccgaaagtgcgaggattgccaggggaaagatcacagacctcgcaaacttaagcgcagcaaaccatgatgccgctatctttcccggaggcttcggggcagccaagaatctcctgtgctgcatagctccagtattggctgccaaggtcctgaggggagtcgaggtcaccgttggtcatgaacaggaagaggggggtaaatggccgtacgctgggaccgcagaagccattaaggctctcggcgctaaacattgcgtcaaagaagtcgtcgaggctcatgtagatcagaagaacaaagtcgtgacaacacccgcttttatgtgtgaaaccgccctgcattacattcatgatggaatcggtgctatggtccgaaaggttctggaactgacgggaaagtag

SEQ ID NO: 218459 - DNA, 1023 bp, synthetic construct
  misc_feature 1..1023: note = Description of Artificial Sequence: Synthetic coding sequence
  source 1..1023: mol_type = other DNA
atggctgaaggcggagaacttatgtcaaggctcctgagtgaaaacgccgatctgaaaaagcaggtcagattactcaaagaaaaccaaatgctccggagattactctcccagtcatgccaggagggaggcggacacgatctcctgccgcctagggcacatgcttatcccgaagcaggaagccccggaagtggagtacccgatttcgggaggttcacaagtgtcgcagacacgccttcacaattgcagaccagcagcctcgaggatcttttgtgttctcatgctccgctgtcctccgaagatgatacttcccctggatgcgcagcccctagtcaagccccattcaaggcattcctgagcccccctgagcctcattcacacagaggcactgaccgaaagctgagccccctattgagtcctcttcaggatagcctcgtggataagaccctgctggagcctagggaaatggtgcggcctaaaaaagtgtgcttcagcgagagctctctccctaccggcgaccggactaggaggtcctactacctgaacgagatccaatcattcgcgggtgccgagaaagacgcgagggtcgtcggggagatagctttccagctggataggcgcattcttgcctatgtcttccctggcgtgacacggctgtacggctttacggtggccaatattcctgagaagatagaacaaacttcaacaaagtcactggacggatccgttgatgaaaggaagctccgggagttgactcaacgatacctggctctgtcggcaagactggagaaacttgggtatagcagggacgtgcaccctgcattcagtgaatttctgatcaatacatacggcattctgaaacaacggccagatctgagggccaaccccctgcactctagccccgctgctttaaggaaactagtcatcgatgtcgtacccccaaagttccttggagattccctcttactacttaattgcctgtgtgagctgtccaaggaggacggaaagcccctcttcgcttggtag

SEQ ID NO: 218460 - DNA, 561 bp, synthetic construct
  misc_feature 1..561: note = Description of Artificial Sequence: Synthetic coding sequence
  source 1..561: mol_type = other DNA
atggtgcggccaaagaaagtgtgcttcagtgagtctagccttcctaccggggaccggacccgacggtcttactacctgaacgagatacaatcctttgccggagcggaaaaggacgcaagggtggtgggggagattgcattccagctggaccggcgtatcctggcctacgtgtttccaggcgtgactcggctatacggttttacggtcgctaacatccctgaaaagatcgaacagacctccacgaagtccctggacggatctgtggacgaacggaagctgcgagaactcactcagaggtatttagccctgtccgcacggttggagaagcttggctattccagggacgttcaccctgccttctcagagtttttgataaatacctacggcatcctgaaacagcgccctgatttgcgtgccaaccccttgcacagcagccccgcagccttacgcaagcttgtaattgatgtggtgcctcccaaattcctgggggactctcttcttctcctgaactgtctctgcgagttatcaaaagaagacggtaaacccctgttcgcatggtag

SEQ ID NO: 218461 - DNA, 438 bp, synthetic construct
  misc_feature 1..438: note = Description of Artificial Sequence: Synthetic coding sequence
  source 1..438: mol_type = other DNA
atggtccaactcatagctccactcgaggtgatgtggaatgaagccgctgacctcaaaccccttgcactgtcccggaggcttgagtgcagtggcggaatcatggcccactactcgcccgatctacttggaccagagatggagtctagatactttgcccaggtgggccttgagcatctggcctccagttcacctcctgcttttgggttcctcaagtgtttggactactctatctcggtgctatgttccgccacctccctcgcaatgctggaggataaccctaaggtatctaagctggctacaggcgactggatgctgacactcaaaccgaagagtatcaccgtgcctgttgagatccctagttcaccccttgctggcaggcccagaagacgccgacgattgaggtgcccccatgaccagcactctcagggcacgtgctag

SEQ ID NO: 218462 - DNA, 429 bp, synthetic construct
  misc_feature 1..429: note = Description of Artificial Sequence: Synthetic coding sequence
  source 1..429: mol_type = other DNA
atgatttcgactgccagggtgcccgctgacaaaccggttcgtatcgctttctccttgaatgatgcgagtgatgacaccccgcctgaagatagcatcccactggtcttccccgagttggatcagcagctacagcccctgcctccttgtcacgactcagaagagagcatggaggtattcaagcagcattgtcaaatcgctgaagagtaccatgaagtgaaaaaggagattaccttgctcgagcagaggaagaaggagctgattgctaaactcgaccaagccgagaaagaaaaagttgatgctgccgagctcgtacgggagtttgaagccctgaccgaagaaaataggacattgcgcctggcccagagccagtgtgtagagcagttagagaagctgagaattcagtaccagaaacgtcagggctcctcttag

SEQ ID NO: 218463 - DNA, 729 bp, synthetic construct
  misc_feature 1..729: note = Description of Artificial Sequence: Synthetic coding sequence
  source 1..729: mol_type = other DNA
atggttcagttgatagcccctttggaggttatgtggaacgaggcagccgaccttaagcccttggcactcagccgtaggctggaatgctccggtggtatcatggcacactactcccctgacctgttgggaccggaaatggagtcacgatacttcgctcaagtaggactcgagcatctcgcatcctcaagtcctccagccttcggattcctaaagtgtctggattacagtatctctgtgctgtgctcagccacgagcctggctatgcttgaggacaatccaaaagtctcgaagcttgccaccggtgactggatgcttaccctgaaacctaagtctattaccgtgcctgtcgaaatcccatcctctcccctggatgacactccaccggaagattcaatcccactcgtgtttccagaactggatcagcagctccagcccctcccaccttgccatgatagtgaggagtcaatggaggttttcaaacaacactgccagattgccgaggaataccatgaggtaaagaaagagattactctcctggagcagcggaagaaagagttgatagcaaagctggatcaggccgaaaaagagaaagttgacgcagccgagctcgttcgggagttcgaggctttgacagaggagaatcgcactctcagactcgcccaatcacagtgcgtcgagcagctcgagaagttacggattcagtaccagaagagacaaggcagttcctag

SEQ ID NO: 218464 - DNA, 429 bp, synthetic construct
  misc_feature 1..429: note = Description of Artificial Sequence: Synthetic coding sequence
  source 1..429: mol_type = other DNA
atgatctcaaccgccagggtcccagcagataagcctgtgagaatcgctttctccctcaacgacgcgtcagacgatacacctcctgaagattcaattccgctggtctttccagaattagaccaacagctgcaacctctccccccttgtcatgattccgaggagtctatggaagtttttaagcagcactgccagatcgccgaggaataccacgaggtcaaaaaagagatcacattgctggaacagagaaaaaaagaactaattgcgaagttggatcaagccgagaaagagaaagtagacgccgctgagctcgtgcgagaattcgaggccctcacagaagaaaaccggactctgcgactggctcagagccagtgcgtggagcaactagagaaacttcgcatccagtaccagaagagacagggcagctcctag

SEQ ID NO: 218465 - DNA, 429 bp, synthetic construct
  misc_feature 1..429: note = Description of Artificial Sequence: Synthetic coding sequence
  source 1..429: mol_type = other DNA
atgatttctacagccagagtacctgctgacaagccagttaggattgccttcagcctgaacgacgcaagcgacgatacaccgccagaggattcaatcccactggtctttcccgaattagatcagcagttgcagcctctaccgccttgtcatgactcagaggaaagtatggaggtctttaagcagcattgtcagatagccgaggaataccatgaggtaaagaaggagatcacgctgctcgagcaacggaagaaggagctcatagccaaactggatcaagccgaaaaggagaaagtggacgctgcagaactggttcgggaatttgaggcgttgaccgaagaaaatagaacactgaggctcgctcagagccaatgcgtggagcaacttgagaaactgagaatccagtaccagaagcgccaaggttcatcctag

SEQ ID NO: 218466 - DNA, 429 bp, synthetic construct
  misc_feature 1..429: note = Description of Artificial Sequence: Synthetic coding sequence
  source 1..429: mol_type = other DNA
atgatttccacagctagggtgcctgcagataaacccgtgcgtattgcattctctttgaatgacgcctctgacgacactcccccagaagattcaatcccattggtattcccagaattagaccagcagctgcagcctttgcccccttgccatgatagcgaggagtccatggaagttttcaagcagcactgtcagatagcagaagagtaccatgaggtaaaaaaggaaatcacactcctcgagcagagaaaaaaggaactgattgccaaactcgatcaggccgaaaaggagaaggtcgatgctgcagagctcgtgagagaatttgaggcgcttacagaggaaaaccgcacactgcggcttgctcaatcccaatgcgttgaacagctagaaaagctccgcatccagtaccagaaaaggcagggcagctcttag

SEQ ID NO: 218467 - DNA, 429 bp, synthetic construct
  misc_feature 1..429: note = Description of Artificial Sequence: Synthetic coding sequence
  source 1..429: mol_type = other DNA
atgatctctaccgcacgggttcctgcggacaaacccgtacgcatcgcattttctctcaacgatgcttccgacgacacacctcccgaggacagcatccctctagtgttcccagagctggatcagcagttacagcccctgcccccttgccacgattctgaagagtccatggaggtctttaaacagcattgtcagatcgcggaagagtatcatgaggtgaagaaggagattactctgctggagcagcgtaagaaggaattgattgctaagctcgaccaggctgaaaaggaaaaagttgatgccgctgagctggtgcgcgaattcgaggcccttacagaggaaaatcggaccctacgtctggctcagagccaatgtgtcgaacaactcgaaaagctcagaattcagtatcagaagcgacagggttctagttag

SEQ ID NO: 218468 - DNA, 429 bp, synthetic construct
  misc_feature 1..429: note = Description of Artificial Sequence: Synthetic coding sequence
  source 1..429: mol_type = other DNA
atgatcagcacggcccgtgttccagctgataagcccgtccggattgcctttagtctgaatgatgcctctgacgatacccctcctgaggactcgatacccctagtcttccccgaactcgatcagcagttacagccattgccgccttgccatgactcagaggaatccatggaggtgtttaaacagcattgccagatcgcagaggagtaccatgaagtcaagaaagagatcacgttgctggagcagagaaagaaggaattaattgctaaactggaccaggccgagaaggagaaagtggacgcagcagagctggtgagagaatttgaggctctcacggaggagaatcgaacactgcggctggctcaaagccagtgtgtggagcagctggagaagctaaggattcagtaccaaaaacgacagggctcctcttag

SEQ ID NO: 218469 - DNA, 729 bp, synthetic construct
  misc_feature 1..729: note = Description of Artificial Sequence: Synthetic coding sequence
  source 1..729: mol_type = other DNA
atggttcagttaatcgcccctttagaagtcatgtggaatgaagcggcagacctgaaaccattagccctctcaagacgactggagtgttccggcggtatcatggcccattacagcccggacctcctgggcccagaaatggagtcacgatacttcgcccaagtcggactagaacatctggcctcatcgtctcctccagctttcggtttcctcaagtgcttggactactcaatcagtgtactctgctccgccacctccctggcaatgctggaagataatcctaaggtgtcaaagctggccactggcgattggatgttgacattaaaaccaaaaagcatcactgtcccagtggagataccttcatcgccactcgacgacactccacccgaggattccatccccctggtcttccctgaactggatcagcaactgcagcccctgcccccttgccatgactccgaggagagcatggaagtgttcaagcagcactgccagattgctgaagagtatcacgaggtgaaaaaggaaattaccctgttggaacagaggaaaaaggagctgatcgcgaaactcgatcaggccgaaaaagagaaggtagacgccgcagagttggtcagagagttcgaggcacttacggaagagaaccgcacactgaggttggcccagagtcagtgtgttgaacagttggagaagctcaggatacagtaccagaagcgccagggctcctcttag

SEQ ID NO: 218470 - DNA, 135 bp, synthetic construct
  misc_feature 1..135: note = Description of Artificial Sequence: Synthetic coding sequence
  source 1..135: mol_type = other DNA
atggtgcagctgatagcccctcttgaagtcatgtggaacgaggctgctgacctcaaaccactcgctctctccaggagactcgaatgttctgggggtattatggcccactattctccagatctcctgggaccttag

SEQ ID NO: 218471 - DNA, 285 bp, synthetic construct
  misc_feature 1..285: note = Description of Artificial Sequence: Synthetic coding sequence
  source 1..285: mol_type = other DNA
atgataagcactgcacgagtcccagctgacaagcctgtgaggattgccttcagtctcaacgatgcaagcgacgacactccccctgaggattcaatccctttggtctttcccgaactggatcagcaactgcaaccgctgcccccatgtcacgattctgaagaaagcatggaagtcttcaagcagcactgccaaatcgccgaggaataccatgaggttaagaaggagattaccctgcttgagcagcgcaagaaggagctgatagctaaactggaccaggccgaatag

SEQ ID NO: 218472 - DNA, 411 bp, synthetic construct
  misc_feature 1..411: note = Description of Artificial Sequence: Synthetic coding sequence
  source 1..411: mol_type = other DNA
atgctggtgagctcaagtagcctcacgccattccccccagtccggaccgccgatgacacccctccggaagacagcatcccactggtctttccggaactagatcagcagttgcagcctctccccccatgtcacgactctgaggaaagcatggaggtcttcaagcagcattgccagatagccgaggagtaccacgaagtgaaaaaagagatcactctcctggaacaacggaagaaagaactaattgctaaacttgatcaggccgagaaggaaaaggtggatgctgccgaactcgtgagggagttcgaggccctcacggaagaaaacagaacactgcgtctggcccagtcacagtgcgtggaacagttggagaagctccgtatccagtaccagaaacggcagggtagctcttag

SEQ ID NO: 218473 - DNA, 786 bp, synthetic construct
  misc_feature 1..786: note = Description of Artificial Sequence: Synthetic coding sequence
  source 1..786: mol_type = other DNA
atggtggtagtagccgctgctcccaaccctgctgacggaacccctaaggtcctcctgttgtcaggacagccagcatccgctgcaggagcccctgcaggccaggcactcccccttatggtgcctgcacagcgcggtgcttctccagaagcggcttccggaggcctccctcaagcacgcaagaggcagcggctgacccacctcagcccagaggaaaaggccctgcgcagaaagctaaaaaatagagtcgccgcacagaccgctcgggatcggaaaaaggctaggatgagcgagttggaacagcaagtggtggacctcgaagaggagaaccaaaagctcctcctggaaaaccagcttcttcgtgagaagacgcacggcttggtagtagagaatcaagagctgcgccaaaggctgggcatggacgccttggtggccgaggaggaagcggaagctaaaggtaatgaggttaggccagttgccggaagcgcagaaagtgccgcactcagactgcgggctccactccagcaagtgcaagcccaactttcgcccctgcagaatatctccccctggatcttggcagtcctgactctccagattcaatccctaatttcatgctgggccttctggacgacctggactcagagttgtagctcaaatgcactgccccaatccctgcccgcttggaggagttcccagagatctacgcagaaagatcctgttccatatcagccaccattcctgtgccaatgggggcgacaccagcctagctggaagcccttaatgaattag

SEQ ID NO: 218474 - DNA, 528 bp, synthetic construct
  misc_feature 1..528: note = Description of Artificial Sequence: Synthetic coding sequence
  source 1..528: mol_type = other DNA
atgtcgaggagctacaatgacgagctgcagtttcttgagaaaatcaacaagaactgctggcggatcaaaaaaggattcgtgccaaacatgcaagtcgagggagtgttttatgtgaacgacgctctggagaaactcatgtttgaagaactgcggaatgcctgtcggggaggaggtgtggggggatttctgccagccatgaagcaaattggtaacgtggcggcactgccaggcattgtccaccgaagcataggactgcccgacgttcactcgggctacggttttgcgataggtaacatggctgccttcgatatgaacgatcctgaggcagtcgttagtccaggaggagtgggcttcgacatcaactgcggtgtgagacttctgcgtaccaatttagacgaaagcgacgttcagccagtcaaagagcaactcgcccaggcgatgtttgaccatattcctgtaggggttggaagcaagggggacatgatgagggcagtgcactgtcccgaacagaacttggatgtgatatag

SEQ ID NO: 218475 - DNA, 2304 bp, synthetic construct
  misc_feature 1..2304: note = Description of Artificial Sequence: Synthetic coding sequence
  source 1..2304: mol_type = other DNA
atgagccatgccgtgacaatcgaagagccacaagcccaacctcaggtcagccagacgagatacagagagagaagccgagccggatcccatatatcttctaatagagcgtacgacttcctctacgaccccttgtttatcgtatcctccgagaaagatcatacgcaggccaacatccaagcaaccctgattagatcacgcttaaggaaggtgccacgattcaaaaccatgttctcgaatttaatccattatcccagatatagcctatattggtccaagtccgatcccgtcccccctttcatctcccgagagtggaaggggcacaaggagaagcatagggaagcgctgcgccagttgacaaccactgatgccagcttccagatgcctaaagaagtatatgaagatcccgaggttacagggaagaaccgctataagtacttcgaacggccattcctcccttttttccagcagatgccctttaacgtagtttacgcagtgtcaaaagcagagccttacactttccccccaacatcaacaaagcacctgtcaattcccagcaagtccactgtgggcacccaaactgattaccgagatgccgacgttcagacggacccatattccgccgagtatgtggtctgccaggattctatcccagaactcttgacgctagccacactcacctggggtagagggttacctgcaggccaggccgaggtggaaatgatcgaacgtgccagggagaaacgagcctgggaagcttccctgccggcactctccgacacgtctcagttcgagaagcgccgaaaaatgatgaatgagatggaacggaaggagtgggccttccgcgagcaggagatcgagaaactacaagagatcaggctggaagtgctcaaggaactgcttaggaaacgtgaggaaaaccagaatgaggtgaatatgaaacatttaaacgcaagatggagtaaactgcaagagggcaaagaagctaagatggccaaaattcagaggacacacgtcagcacaattcgaaagctggtgggcaaacgcaagaacatcgaaggaaaactggagaggcggaacataatcaaagattactccgattatgcaagccaggtatatgggcctctaagccggttaggatgctttcctgataacaactctgaagatttcgtggtgaagaattactatctaaacacttacgagggcctggtcgagctggagagctgtctacccgacttcgtgacccagccccaaatacgggcacctaagccaaaagttattactaccaaggcaggattcctgaaacgagccgcacgtctcgactatgaactggccgaggtacataaagctttgctggataaaaaaaataaggtcctggaagtgaagaagcctccaaggttcttgcagcggaatccgataccacagccgcgactgccgacgcctaccctagagatgacgtccaacgaagaagaagagatggagatggctgtgatatatctgcagaagctcctacggggtagggtggtacagaatatgatgtttgagggcaaggagaagcgtctcgagctgatccaggagttacgcacttgccacgctctccaggaagacgaaaagctggtcaagaaagcagaaaagcaggtgaccctcgcactgcagcgtcagagaaatctgcatgaacacaaagtaagtctcgttgagaatcacttagccggactggagggtagagcgctcgcagatatgttcgactttctgtccaaggaactcgtgagactgcaggaggagagacgcatccacgcttttgtcatgttagctgaaaggcagagaagagtgagagaggccgaggagagcggcaggaggcaggtggaaaagcagaggctgcgggaggaagatgaaatcttcaaggaagtggtgaaggtacaccattctacaatatcctcatatttagaagacattattttaaatacagaggcaaacactgccgaggagcaggcccgagcagagattgaaaagatggctgagaagattaacgacattgcctacgaaatggagagtaggcgaacctacttgcagagcgaagaaatagtggctgagctggtctacagcttcctaatcccagaggtacagaagtacttcgtgaaagaaaaagttcgaaacgctcagaggaaacatatcctcgcggctcaccagattatacatagttacacagagagtatggtacaaaaaaaattgacggaaggcgaacaagatgaggccagcaatgccgctatgttactcgagaaggagacacagaatgagaataattcttag

SEQ ID NO: 218476 - DNA, 564 bp, synthetic construct
  misc_feature 1..564: note = Description of Artificial Sequence: Synthetic coding sequence
  source 1..564: mol_type = other DNA
atgagccatgcggtgaccattgaggagccccaggcgcagcctcaggtcagccagacccgatacagagaacgaagtcgggctggctcgcatatttcaagtaatagagcctacgatttcctgtacgatccactcttcatcgtgagttcagaaaaggaccacactcaagcaaacatccaggctacgctgatccgcagccgactcagaaaagttcctaggttcaaaacaatgttttccaacttaattcattaccctaggtatagcctctattggtcaaaaagtgatccagtgcccccatttatcagccgggaatggaagggccataaagagaaacatagggaagccttgcgtcagcttaccacaactgatgcaagttttcaaatgccaaaagaagtctacgaggatcctgaggtaactggcaaaaaccgctacaaaggccagaaccacacactctttctgctgcttctgttgagtacctacccatccctccagagcctgctgtgggcgctccgcctgatcattggtatgctgaccttcaagcagatccacacattacaaaacatgtag

SEQ ID NO: 218477 - DNA, 717 bp, synthetic construct
  misc_feature 1..717: note = Description of Artificial Sequence: Synthetic coding sequence
  source 1..717: mol_type = other DNA
atgagccacgccgtcaccatcgaagaaccacaggctcagccacaggttagtcagacccggtatcgagagcgcagcagggcaggcagtcatattagctccaaccgggcatatgacttcctgtatgacccgctgtttattgtcagcagcgagaaagaccacacgcaagcaaacattcaagcaaccctgatcagatccaggcttcgtaaagtgcccaggttcaaaacaatgtttagcaacctaattcattatccccgttacagcttgtactggtccaagtctgacccagttccccctttcatcagtcgggagtggaaggggcacaaggagaaacaccgggaagcactgagacagctaaccaccactgacgcaagcttccagatgccgaaggaggtatacgaagatcccgaggtgacaggaaaaaataggtataaatactttgagcgtccttttctgccttttttccagcagatgcccttcaacgtcgtctatgctgtgagtaaagctgagccgtacacatttcctcctacctctacaaagcatctgtccattccttccaagagcaccgtgggaacccagaccgactatcgggatgcagacgtccaaaccgacccctactctgcagagtatgtggtctgtcaagatagcatcccagaactgctgacactggcaaccctgacttggggagaactggttaacttactgaccattggacggtag

SEQ ID NO: 218478 - DNA, 654 bp, synthetic construct
  misc_feature 1..654: note = Description of Artificial Sequence: Synthetic coding sequence
  source 1..654: mol_type = other DNA
atggacctggcccagccctcccagcctgtggacgaattggaactgagtgtcttggaacgacaaccggaggaaaacaccccattaaatggggctgataaggttttcccatcgctggatgaagaagtgcctcctgctgaggcaaataaagagagcccgtggtcgtcctgcaacaagaatgtggtgggccgttgcaaactctggatgatcattactagtatttttcttggagtgattaccgtcattatcatcggcttatgtctggctgccgtgacctacgttgacgaggatgaaaacgaaattctagaattgagtagcaataagaccttcttcattatgctgaaaatccccgaagagtgcgtggccgaggaagagctccctcatctgctgacagagaggctcaccgatgtctatagtacgtcaccttcactggggagatatttcacgtcggtggagattgtcgactttagcggtgaaaatgccacggtgacatatgaccttcagtttggtgtgccttctgatgacgagaacttcatgaagtacatgatgtctgaagagctggtactcgggattttgctgcaagactttagagatcagaacattccgggatgcgagtcactgggcttagaccccacctctctgctcttgtacgagtag

SEQ ID NO: 218479 - DNA, 444 bp, synthetic construct
  misc_feature 1..444: note = Description of Artificial Sequence: Synthetic coding sequence
  source 1..444: mol_type = other DNA
atggatctcgcacagcctagccagcccgtggatgaacttgagttgagcgtgctggaacggcagcctgaagaaaatacacccctaaacggtgcagacaaggtgtttccaagtctcgacgaggaagtgcccccagccgaggctaataaggagtctccttggagcagctgcaataagaacgtcgtcggaaggtgcaagctgtggatgatcataacatcaatctttctgggcgtaataaccgtgatcatcattggcctctgcctggcagctgtgacctacgtggacgaggacgaaaacgagatacttgagcttagctctaataagactttctttattatgctcaagattcccgaggagtgtgtggccgaggaggaacttccgcatctcttgacagagagagaagttggactgaaacccaacccagaggccctggttgggttcgaatag

SEQ ID NO: 218480 - DNA, 753 bp, synthetic construct
  misc_feature 1..753: note = Description of Artificial Sequence: Synthetic coding sequence
  source 1..753: mol_type = other DNA
atggaccttgctcagccttcccagccagtggatgagttagagctgagcgttttggagagacagccagaagaaaacacccccttgaatggtgccgacaaggttttccctagtttagacgaagaagtcccccctgctgaggccaataaggaaagtccctggagttcttgtaataagaacgtcgtgggcaggtgtaagctgtggatgatcatcacctctatcttccttggggtgattacagtgattatcattggtctgtgccttgctgccgtgacctacgtggatgaggatgaaaacgagatcctcgagcttagttcaaataaaacctttttcataatgcttaagattccagaagagtgtgttgccgaggaggaattaccccacctgctgactgaacggaatgaggtgatggaggctgggttgtgtctgaaggccgttctttaccaggtcttagagatgaaaggcatccacagcgttctccaaaagaggttctgcggcctcatccaaaagcatcaacagcaccagcgaggaggcgattcgtttttgagcaggttctactccctcgcattgtctccggtcaagcaactgccatctaccgctagtgcaggtagcagcctggataagggacgcaagcccgctcgcgtgggagcaataggcagtgccggtatgagccactgttggcgctctttggtgttttgtctgtttctcttctgtttcgtccttttctttgaaactggatccaggtccgtcgcctag

SEQ ID NO: 218481 - DNA, 1293 bp, synthetic construct
  misc_feature 1..1293: note = Description of Artificial Sequence: Synthetic coding sequence
  source 1..1293: mol_type = other DNA
atgtggcggctcgttcccccaaagttgggccgactttctcggagtttaaagctagctgccctcggttccctgttggtactcatggtgctgcacagtcctagtctgttggccagttggcagaggaatgagctgacagataggcgttttctgcagctgaacaaatgccccgcttgtttcgggacaagctggtgtcgcagatttttgaatggacaggtggtttttgaggcctggggcaggttacggttactggatttcctcaatgtaaagaacgtctatttcgcccagtacggagaaccaagggagggtggtcggagacgcgtggtactgaaaagactcggcagccagcgcgagctcgctcaactagaccagagcatctgtaagagggccactggcaggccaagatgtgacctgctacaagccatgccccgaacggaatttgcgaggttgaacggggatgttcgcttgcttacgcccgaagcggttgagggctggtctgatctggttcactgcccttctcagagattgctggacagactggtccgaaggtatgccgaaaccaaagatagtggatcctttctgctgaggaacttgaaggactctgagagaatgcagcttctcttgaccctcgcctttaacccagaacctctcgtgctacaatcttttcctagcgatgagggttggccctttgccaaatatctgggggcatgtggacgcatggtggccgtgaattacgtgggcgaagaactctggtcttactttaacgctccatgggagaaaagagtggacctggcctggcaacttatggaaattgccgagcagctgacaaataacgactttgaatttgccctctatctcctggacgtgtccttcgacaattttgccgtgggccctagggatgggaaggtaatcatcgtggatgctgaaaacgtgcttgtggccgacaagcgtctgattcgacaaaacaagcccgagaactgggatgtttggtatgaatccaagttcgacgattgcgataaagaggcatgtctcagcttttctaaagaaatcctttgcgcccgtgccaccgtcgaccacaactactatgcagtatgtcagaatctcctgtctcggcatgccacctggaggggaacaagcggcggtcttctgcatgatcccccatctgaaatcgccaaagacggcagactggaagcactcctcgatgagtgtgccaacccgaagaagagatacggcagatttcaggcagcgaaagagctgagggagtatttggcccagctgtctaacaatgtccgttag

SEQ ID NO: 218482 - DNA, 666 bp, synthetic construct
  misc_feature 1..666: note = Description of Artificial Sequence: Synthetic coding sequence
  source 1..666: mol_type = other DNA
atgaagagcgagaatggaactgtggtcggatcatttccttcagacgagggctggccctttgccaaatacctgggggcttgtggcaggatggtggctgtaaattacgtcggagaggagctctggtcttactttaacgctccgtgggagaagcgggtggacctcgcatggcagctgatggagattgccgagcagctaaccaacaatgatttcgaattcgctctgtatttgctggacgtgagcttcgacaattttgctgtgggccctcgcgatggcaaggtgatcatcgttgacgccgaaaacgtgctggtggcagataagcgattgatacgccagaataagcctgagaactgggatgtctggtatgaatcaaagttcgatgactgcgacaaagaggcctgcctgtcattcagcaaggagatcctctgcgcaagagcaacagtcgaccacaattattacgctgtgtgtcagaatctcctcagccgtcatgctacatggaggggtactagtggtggcctactgcatgaccccccatcagaaatagccaaggatggtagactggaggccttacttgacgaatgtgccaatccaaagaagaggtacggacgatttcaagccgctaaggagctccgtgagtacctagcacagctatctaacaacgtgcgctag

SEQ ID NO: 218483 - DNA, 5079 bp, synthetic construct
  misc_feature 1..5079: note = Description of Artificial Sequence: Synthetic coding sequence
  source 1..5079: mol_type = other DNA
atgcgacgacccccaccactcgggcctacaaccgcctctgggccagagggaaatgttaggaatcttcaaaaaaggcaggcccctggtcctggtgccgcaggaggctgcggtccagaggctggcggttgcagggaaaacaagcaaaagcgtaggatggtcgccagagccacgcccggaagaggagaggtggagtcagataagtccgtggccgcaagcggcgcaggtaaagctgcaaggagacaggttgagggacgcaggggccctgtgtcacccagcgactcctcagatccgaggggcttagaggcagcgaaggaggccgagctgccactgcagactgagcgccatacaaaagagaaacgtaaagtaacggaggcatcatccgatgaccctcaaccaggactggacctcgtccgtaaagagagcctgaccagctcagaaagttttcaaaccgtcgagtgtttgcagagcctgggcaaggaatcaattatcgagggtattaagaggcggatccgcaacaaaaagttgaagagcctagagaatccccctctcaagatcacggagaacgaggccacgcagaatatcaaggtggagtttcaagatgagctctataagaataccccaaagtacagttgcaacatactctcccctgaggtggagaacaactccgttctcaaattgagagattgtaattgtttcccacactctaaaggctgtaacgacgagaacaacctgccatataaacctgacggcggatgtatgcatgttgctgagaacttttcaaaaaaggagaatttgcggagcctggccgagaaatccgacaccaacagcataccgcagctactccaaacggaagagaatgtcatgggggtcaacaagctcttgcctgaagaatccgacctttatcagagcaagacaaacggcctcctgtcttgtctgcaacacgagaaaaacaaatatagtatcgaggagagttctgtgggccgaaaacccagaaagcgcatgaaactgagtgagaaggccgatgagacggtgacggaaatgaacttttcaaacgaatacaacaagagtgagctgatgctccaggaaaatcagatgatcgccgacggaaaagaggctgagaccaaatccccgctgaacgtgctgagaaaggtgtcccacaacaccgtgagcctgatggaccacctgctttccgttcctgagactgtggaaaaggagaccagcagtgagcaccacgttaatgctgtatttcagaaaaccatcgagcccctcctcaaagaggagaccgagaacgctagcgaaccattaggttacgagagtatggctagcaaggaagacttcaagtccatgaagtccttcatcgggaagtcacccaacgaataccacatagagagaaggtctagccgcgaggacctgcggagtgcctcagaagagctgaaactgtcttgtcagcggaccatacctatgacaggcaagcgaacctggccatactacagttgcgccaggatctccgcctggtgctggaagaaggcttcacttccggagtcaagctactttttgcggggatcccaggagagttgccggcaggttgacgtgcctaagcaccagactaaccagacccatctgacagattctaagcttctgctgcagtcttctttgaccgagactaatacagaaagttcaagcaaggagaagctcgactcaaattccaattgcttatccagcgtaagcgctgtggagccaactctgatggtgatcaaagagccaataatcaaggacgataagaagatcaagtcagaggaactgagcaggaggggtagtgaggtcatatcaaacacaaccgaggacacacaattaacttctgaaacgcagtcccttactggtaataagaagaaagcgcgtggcaatttaacaaagttgaatctaaccgctacaagcaaggatggccaggaggccaacaactctgccggaaagacaatacacagaaaggcttgcatcgctcagcagacctttattgtgcctgatctagtgaaaatcctgaataccggaaggctgactaacttcaagatccccctgcttaagaacaaatcggagaagcgcaaagaggtcaatgcaaagtcttctgaacgagaggcgtatagccccctcgaactgttagataatttatccggcgctgatgtgaggcagaaccggtctaaggaaaatgtctcaatgatgatgctgggtccacaaacactgtccataaggaatagcgttacacccgtgcaggcttcttcagactctttctacaataagaaaagctactccataagccccagctttaccaagcagggcaataatagcaagccatctaaccatgtgtcggaaccaggcaatatcgtgagtaacaaggaagttgcatcacttaccgtcgaaaataacgccttctcttgcgacccagggtatgttgaaaagtcccctagcttctgttgtaacgagcaggaaacctttcgtcctgtgtcaagcgaggtccggggacggaaaattaccaagaacttttcggaagtggggttccctgacattctcaaagcctatgaggacgatgtactcttgattgacgtgatccaggacgatccagatttgtttggagtgagtaacgagggggagctatcatttactagcgaggtgccaaagattagtcaagagcccaatgtagccggtgagcatcagtccacagattcgaagtatatggaaacccctgttaagaaggagccctccgatgatcttcgggagttgcctgttctagattgcggctggattaaacccgacatttgcgcctcaaattcagcagagtcagagattaagcgtgaccccaaggatgtgaacacctctctgggcgaggtggccaatgagacctccgagaacgagactctgggcgatttctctgagcagatcaagggttcagacttggatgagaagcatcggtttactgataaagtgatcaccaaagaggagaaggaaaatatttacgaagtctgtaaatccaaagatagcagaaacgctgacttcatggttggcgaatgccagttcgctgtgcctgtaccaaagcctctgtgcctgctcgttcctccccttaatttatcgggacggcaggaggacaccattctcaatacttggatgaatgatttccgtttccttgggaagcactctgtccttaagcttcagaatccagagacttgcgagatttttaagcgggagaagaatgttggggttttccaaaagagcctcggattaatgattccctataagtattgcaaattccactttaatacattgcgcggatgcgagcggcctctctgcaaatttgcccatgtgcccgagcaaggagacgaaaaagtgtgtatggacgtatttaagaagtacatcaatattaatgagctttgtctgctgcaaagagccgttaacatctttatggagtattacagaaaattccctccaggagtgtactttgatctgcaggttctgaacgaccttctgaattctctgcttaagcactgcctgctgaaagaggtttttcagatagtcaacctgtccatcatggttaagatgctgccttcactcaagatactgctcaatattttcgagtatgtggcgactatgaagctccgaaacgctgttcctgcccttatcgacattttctgcaagctggtggaggcgggaatggtgctagatcccgaacacttcaattacatcgtgaaattgctttatcaggttcaggcgtccaaacaagaaattactgccgtgcttgaaatgaagtcccgactgcagatgcgcagattcaaaaagaactggaaatgtgacctagattcggctcttaacaaactcgaacactgcaaggagaagggggattggaccaagctgggaaagctttacattaacgtgaaaatggggtgcgaaaagttcgcagatttccaaacattttgtgcatgtattgcagagactctcaccaaaaactatgaggatgagaggcctgacatcccgttctgcgaatttgccgaaactgtgtctaaagacccccagaacagtaaggtggataaaggggtgctcggacgtatcggtatctctgcaatgtacttttaccacaaactgttgcaatggagtaagggacggaaagtccttgaaaaactgtatgagctgaagatacacttcacctccctcaagggactcattggaccagaaaagttagcatcacgttgtcagatcgtcaatgtggctgcagagatatttctgaaatctggttcactggatggagctatatgggtcatgagagaaagcgagtggattatcaacaccccactatggccttgcgatcgccttgacgttctgaacaggcacaacctcttgtgcactatcgcacacgagatcctggccaagagcttatataggcagacttttgaggtgttacagaatctgcccggattccagaatagccaagagacagtagaggtctctcaatattctttgttattcaataagctgctgggctcttgcatagagtctagctctttaggtatgtctagctccgtggctgagttcatgatctcaaaatctatacctatagacttctctttcctaaggcggctgatcacaagtctcggcagatctagactttggttaaaagcaagggctcattacaagtccgctctctcccttggctgctacccccctctggaagggaacctatatagaaaacttctcctgattcctagttatctgtcggagatcgaaatgttgttagcgattgaaatctttatggtgtctaacgctagttctatccaatctcctggaacatcaacacagattctacagatcgttcttaagcgctgtgaagacaatcagtcacggagcaacgacgactaccaggctgcagtcgaacgactgatcatggccgctagaattagcgacccaaagctgttcgttaagcatatgactgtgaacgtgaacaaggaacaagtgtacagtcttgagcactgttctgcactcaagtggctgaaagagaatatgaaatgggcaggaaaggtgtggttgttctccaaccactag

SEQ ID NO: 218484 - DNA, 207 bp, synthetic construct
  misc_feature 1..207: note = Description of Artificial Sequence: Synthetic coding sequence
  source 1..207: mol_type = other DNA
atggtgtactatcctgaactgtttgtgtgggttagtcaggagccgtttcccaacaaagacatggagggcagattacccaagggccgactgcctgtgcctaaagaagtgaatcgcaaaaaaaatgacgagaccaatgctgccagcctcactcctttaggctcaagtgaactcagatcaccaaggatcagttacttacatttcttctag

SEQ ID NO: 218485 - DNA, 207 bp, synthetic construct
  misc_feature 1..207: note = Description of Artificial Sequence: Synthetic coding sequence
  source 1..207: mol_type = other DNA
atggtgtattatcccgagctgtttgtgtgggtgtcccaagagccattccctaacaaggacatggaagggaggctgcccaaaggtcgtctacccgtgcccaaagaggtcaatcgaaagaaaaacgatgagactaatgctgcatcactgacaccattaggctcttccgaactccgcagcccacgcatcagttatctgcacttcttttag

SEQ ID NO: 218486 - DNA, 339 bp, synthetic construct
  misc_feature 1..339: note = Description of Artificial Sequence: Synthetic coding sequence
  source 1..339: mol_type = other DNA
atgaaaggcgtttggaactattccgctctgagccgcagagaagacgagacacggacacaacggtctagaatgacagaccgggtgccttgtagcaaatgcttccaggtccactgtcaaatctctgtcctgaattgcgtttactatcccgagctgttcgtgtgggtgagccaagaacccttccccaacaaggatatggagggacggttgcctaaaggcaggctcccagtcccgaaggaggtcaataggaaaaaaaatgacgaaaccaatgctgcatctttaacccctctgggctcctccgaactcagaagcccacggatctcatatcttcattttttttag

SEQ ID NO: 218487 - DNA, 207 bp, synthetic construct
  misc_feature 1..207: note = Description of Artificial Sequence: Synthetic coding sequence
  source 1..207: mol_type = other DNA
atggtgtactacccagaattgtttgtctgggtctcacaagagccgtttccaaacaaagacatggagggtagactccccaagggtcgcctcccagttcccaaagaggttaacaggaaaaagaacgacgaaacgaatgccgcttctctgacaccactcggcagtagtgaactgcgtagtcccagaatctcctatttgcatttcttttag

SEQ ID NO: 218488 - DNA, 207 bp, synthetic construct
  misc_feature 1..207: note = Description of Artificial Sequence: Synthetic coding sequence
  source 1..207: mol_type = other DNA
atggtttactacccagagctgtttgtatgggtttctcaggagccgtttcccaataaggacatggaagggagactgccaaagggtcgccttcccgttcctaaggaggtgaaccggaagaagaatgacgagacaaacgctgctagtttgactcctcttggctcttccgagctgcggagccctagaatcagttacctccactttttctag

SEQ ID NO: 218489 - DNA, 207 bp, synthetic construct
  misc_feature 1..207: note = Description of Artificial Sequence: Synthetic coding sequence
  source 1..207: mol_type = other DNA
atggtatattaccccgagctgtttgtgtgggtatcgcaggagccatttcccaataaggacatggaaggtagacttcccaagggaaggctgcccgtgccgaaggaagtgaaccggaaaaaaaacgatgaaacaaacgctgcctcacttactccactaggcagttccgaacttcgatcacctcggatcagctatctccactttttttag

SEQ ID NO: 218490 - DNA, 207 bp, synthetic construct
  misc_feature 1..207: note = Description of Artificial Sequence: Synthetic coding sequence
  source 1..207: mol_type = other DNA
atggtgtattatccagaactattcgtgtgggtgtcgcaggaaccgtttccaaacaaagacatggaaggacgtctgcctaagggacgcctaccggttcctaaagaagtgaatcggaagaaaaacgatgaaaccaatgccgcaagtctaacgccgctcggctccagcgagttgcgctcgcctaggatctcatatttgcacttcttctag

SEQ ID NO: 218491 - DNA, 207 bp, synthetic construct
  misc_feature 1..207: note = Description of Artificial Sequence: Synthetic coding sequence
  source 1..207: mol_type = other DNA
atggtttactacccagaattgttcgtctgggtctctcaggaaccattccctaacaaggacatggaaggtaggctgcccaaaggtcggctacccgtccctaaagaggtgaatcgcaagaagaacgacgaaactaacgccgcatccctgacccctctgggttccagtgagcttcggtccccgaggatcagctatttacactttttctag

SEQ ID NO: 218492 - DNA, 207 bp, synthetic construct
  misc_feature 1..207: note = Description of Artificial Sequence: Synthetic coding sequence
  source 1..207: mol_type = other DNA
atggtctactaccccgaactcttcgtgtgggttagtcaagagccattccctaacaaggatatggaaggccgactccctaagggcagacttcccgtcccgaaggaagtgaatcgcaagaaaaacgacgagactaatgctgcaagcctgaccccgctcggtagtagcgaactccggagtcccagaatcagctacctccactttttctag

SEQ ID NO: 218493 - DNA, 18 bp, synthetic construct
  misc_feature 1..18: note = Description of Artificial Sequence: Synthetic coding sequence
  source 1..18: mol_type = other DNA
atggtgtattatccctag

SEQ ID NO: 218494 - DNA, 102 bp, synthetic construct
  misc_feature 1..102: note = Description of Artificial Sequence: Synthetic coding sequence
  source 1..102: mol_type = other DNA
atggtgtactaccctgaattgtttgtctgggtatcccaggaaccatttcctaataaagatatggagggccgtttacccaaggggcgactgcccgtaccatag

SEQ ID NO: 218495 - DNA, 207 bp, synthetic construct
  misc_feature 1..207: note = Description of Artificial Sequence: Synthetic coding sequence
  source 1..207: mol_type = other DNA
atggtttattaccctgaactgtttgtgtgggttagccaagaaccctttccgaacaaggacatggaaggccgtctgcctaaggggcgtctccctgttcctaaggaggtcaatcgtaagaagaacgatgaaacaaatgccgcttcccttaccccacttggctcttctgagctccgatcccccagaatcagctatctacatttcttttag

SEQ ID NO: 218496 - DNA, 207 bp, synthetic construct
  misc_feature 1..207: note = Description of Artificial Sequence: Synthetic coding sequence
  source 1..207: mol_type = other DNA
atggtgtactaccctgagctctttgtttgggtctcccaggaaccctttcccaataaggacatggagggcaggcttccaaaggggaggctgcctgtcccaaaggaggtcaatcggaaaaaaaatgacgaaactaacgctgcgtctctgacccccctgggttctagtgagctccgctcccccagaatatcatatctccacttcttttag

SEQ ID NO: 218497 - DNA, 198 bp, synthetic construct
  misc_feature 1..198: note = Description of Artificial Sequence: Synthetic coding sequence
  source 1..198: mol_type = other DNA
atggtctattatcctgagctcttcgtttgggttagtcaggaaccttttcctaataaagacatggaaggacgtctgccaaagggtcggctgcccgtgccgaaggaagttaaccgtaagaagaacgacgaaaccaacgcagctagcttgaccccccttgggtcctccgagctgcgctccccgagaatcagctatttgtag

SEQ ID NO: 218498 - DNA, 735 bp, synthetic construct
  misc_feature 1..735: note = Description of Artificial Sequence: Synthetic coding sequence
  source 1..735: mol_type = other DNA
atgcactacggggctgcgacgcacatccagaacagtcgcagccacggtcttgagacggtgcccggtcatcaacgtttggagcgaggagccggtggcgagactccagagtttcctggctgtcatagccccgcaccacctgaaaactttggcaacgagcttctgcctctcagtgcaccccttcagggtctgtcagaaggcctttacccgcctggacggaacaaaacactccccgctggcgtcctcagggagggtgcagtgcaattcttgcaccggggtctatgcaacagcaatctcagttccgaggcaagcgccagaccttcaggtacccaggacgagttgcattccagcaggcgaaaaacgggccagactcgtcgcgaaggagcgcgtaagcacttggtgtgctcctttagactgtacccctttacagtgcacacagtgtcacctggcaattcccatttagctctctaccaggtgtttaaggccgtgaaactctgccctagtgaaacaagcttttttctctcacggaagtcattaaaaagtagcgacccatggcacccaccgagtttgtcccccaactcctggaatcgccaggctgggttccgcgcttggagctctcatctgataagcctgtccctcacctgctcagacagtcagtccaggcgggtgagctcttcccaacagcctccgcttcactcactgtcatctcatcgcagagcggcacacgttcctgagtag

SEQ ID NO: 218499 - DNA, 480 bp, synthetic construct
  misc_feature 1..480: note = Description of Artificial Sequence: Synthetic coding sequence
  source 1..480: mol_type = other DNA
atgtatcggaggaagtccgggtggactgggtgcgcgattacctgttccccctgcactgccatgacacagctgcggaattgcatgcgcctaagccgcagctgttctctgacctgggagaccccccgatggtatatggctggccgagtggcaacgtccaccagcggatgccactgttggatgtcaaggcgggatcttacgccactgccccacccctctgagccaggagtcttggattgtctgggaccctgtcacctcttgcccctgctgtcccccggtagtccttgttgggtgctggggctgcatttctcactgcatcctccatctgcagcttccgcttcccacgcgttgactatcacttccttgcccccaggcttgctgccatttgtcggcgtggagctgactgctcacccacaagcactgatgggcagaggctttccatccggaatgggagctgcaggcaggcatctctgttttctgtag

SEQ ID NO: 218500 - DNA, 480 bp, synthetic construct
  misc_feature 1..480: note = Description of Artificial Sequence: Synthetic coding sequence
  source 1..480: mol_type = other DNA
atgtaccgcagaaagagcggttggaccgggtgtgccatcacatgctcaccatgtaccgccatgacccagctaaggaactgtatgcgactgtctcgatcctgctcactcacctgggagacaccacgctggtacatggccggtagggtggcaacctcaacctcagggtgccattgctggatgagtcggagggacttgaccccactgcctcatccttccgagcctggggtgttggactgtttagggccttgccacttactgcccctcctgagtccgggaagcccttgctgggtgctggggctgcacttcagccttcatccgcctagcgccgctagtgcctcccacgccctgaccattacttctttaccaccaggcttattgccttttgtaggagtggaattaacggctcatccacaggcactcatgggacggggttttcccagtggaatgggggcagcgggaaggcacctgtgcttcctgtag

SEQ ID NO: 218501 - DNA, 480 bp, synthetic construct
  misc_feature 1..480: note = Description of Artificial Sequence: Synthetic coding sequence
  source 1..480: mol_type = other DNA
atgtataggcggaaaagtgggtggactgggtgcgcgatcacctgctccccatgcactgccatgactcaactcaggaattgtatgcgactgagccggtcatgctctctcacctgggaaacacccagatggtatatggccggaagggttgccaccagcacatcaggatgtcactgctggatgagtagacgggatttgacgcctctaccccaccctagcgaaccaggcgttctcgactgtttgggcccatgccacctgctccccctcctaagtcccggatcaccctgctgggttctaggactgcattttagtctgcacccccctagcgccgcttcagcgagccacgccctcactatcacttcgttaccccctgggctgctgcctttcgtcggggtggagttgaccgctcacccgcaggcactgatggggagaggtttccccagcgggatgggtgcagccggaaggcatctatgcttcctgtag

SEQ ID NO: 218502 - DNA, 480 bp, synthetic construct
  misc_feature 1..480: note = Description of Artificial Sequence: Synthetic coding sequence
  source 1..480: mol_type = other DNA
atgtatcggaggaagtcaggctggaccgggtgcgcaatcacgtgcagtccctgtacggcgatgacacagcttaggaattgcatgagactatcccgctcttgcagcttgacatgggagactcccaggtggtacatggctggtcgcgtggccacaagcaccagcgggtgccactgctggatgagccggagggacctgaccccccttccccatcccagtgagcccggtgtcttggattgtctggggccttgccacctccttcccttgctttctcccggttctccctgttgggtgttagggctgcatttcagcctccatcctccatcagccgctagcgcaagccacgctttaacaatcactagccttcctccaggactgctaccattcgtgggagttgaactgaccgcccacccccaggccctgatgggacgtggcttcccatccggaatgggggctgccggaaggcacctgtgtttcctgtag

SEQ ID NO: 218503 - DNA, 294 bp, synthetic construct
  misc_feature 1..294: note = Description of Artificial Sequence: Synthetic coding sequence
  source 1..294: mol_type = other DNA
atgtcttcagccccagaacctcccacatttaaaaaagagccccctaaagagaaggaatttcagtctcccggtcttagaggcgttcgaaccactacactgtttcgggctgtcaaccctgaactgttcataaagcccaataagccagttatggcattcggattagtcacgctgtcactgtgcgttgcatatattggctacctccacgccattcaggagaacaagaaagacctgtatgaagcaatcgatagcgaagggcactcatacatgaggcgtaagactagcaagtgggattag

SEQ ID NO: 218504 - DNA, 768 bp, synthetic construct
  misc_feature 1..768: note = Description of Artificial Sequence: Synthetic coding sequence
  source 1..768: mol_type = other DNA
atgacaaaaacctccacttgcatctatcatttcctggtgctcagctggtatacatttctgaattactatataagtcaagagggcaaggatgaggtgaaaccgaaaattttggccaatggggctcgttggaaatacatgacactactcaaccttctgctccagacaattttttacggagtcacatgcctcgatgacgtgcttaaacgcacgaaggggggtaaggatattaaatttcttactgcttttcgcgatttactctttactacgcttgcgttccccgtgtccaccttcgtttttctcgccttctggattctgtttctgtataaccgcgatctgatttatccgaaggtgctggacactgtcatccccgtgtggctgaatcacgcaatgcataccttcatattcccgattacacttgcagaggttgtgctacgaccgcacagctatccgtctaagaaaactggcctgactctgttagctgctgctagtatcgcttatatctcaagaattctgtggctctacttcgaaaccggtacctgggtgtatcctgtctttgccaaactgagtctcctgggactcgctgctttcttctctctgtcgtatgtgtttatcgcatccatttatttgctcggagagaaactgaatcactggaaatgggtgagcgttcagattctgcagagatggcgccttgagagcgtgggaatttgctttcagtggcctgactggaagagtccagcgaagcaccagctcgttaaaaatatcagatag

SEQ ID NO: 218505 - DNA, 510 bp, synthetic construct
  misc_feature 1..510: note = Description of Artificial Sequence: Synthetic coding sequence
  source 1..510: mol_type = other DNA
atgacaaagacttcaacctgtatctatcactttctcgtgctgtcctggtacacctttttgaactattatatctcccaggaaggcaaggatgaggttaagcccaagatcctggcaaacggcgcaaggtggaaatatatgaccctgcttaacctgttgctgcaaactattttctacggcgtcacatgcctcgacgacgtgctgaaacggaccaaaggcggaaaggatataaaatttctaactgccttcagagaccttctctttaccactcttgcctttcccgtgagtacctttgtgtttctggctttctggatattgttcctgtacaatagggatctgatctaccccaaagtactggataccgtgattccggtgtggctgaaccacgccatgcacacgtttatctttcccataaccctggctgaagtggtactccggccacactcatatccctccaaaaagactggactgacactgctcgcagcagcttctatagcctacatctcccggtag

SEQ ID NO: 218506 - DNA, 693 bp, synthetic construct
  misc_feature 1..693: note = Description of Artificial Sequence: Synthetic coding sequence
  source 1..693: mol_type = other DNA
atgacgaagacttctacttgtatctaccactttttagttctatcatggtacaccttcttgaactactacatcagccaggaggggaaggatgaagtgaaacctaagatcctggcaaacggggcacgctggaagtatatgacactattaaatctccttttacagactatcttctatggagttacgtgtcttgatgacgtgcttaagcgtaccaaaggtggtaaagatatcaaattccttacagccttccgggacctgttgttcaccacgctcgccttccccgtttcaaccttcgtcttccttgctttttggattctgttcttgtacaaccgcgacttaatatatccaaaggtgctggatactgtcatacctgtctggcttaatcatgccatgcacacgttcatattccctatcacactggctgaggtcgtgctacgacctcactcctacccctcaaagaaaactggtctgactctcctggcagccgcttccatcgcctatatttcaaggatactctggctgtactttgagacagggacatgggtctacccagtatttgctaaactgagcctgctcggactagccgctttcttcagtcttagttacgtcttcatcgccagcatctacctgctaggagagaaattgaaccattggaaatggggggatatgagacagccacgcaagaaaagaaagtag

SEQ ID NO: 218507 - DNA, 507 bp, synthetic construct
  misc_feature 1..507: note = Description of Artificial Sequence: Synthetic coding sequence
  source 1..507: mol_type = other DNA
atgactaagacctctacatgcatctaccactttctggtactgagctggtacacttttctcaattattatatcagccaggagggaaaagatgaagtgaaacctaagatattggccaatggagcccgatggaagtacatgacccttttgaacctcctgttgcaaacgatcttctatggagtgacctgcttggacgacgtactgaagcgcacaaaggggggaaaggacatcaagtttcttactgcattccgcgatttgttatttacgaccctggcttttcctgtctccaccttcgtgttcctggcgttctggatccttttcttgtataaccgggacttaatttaccccaaggtgctggatacggtcatcccagtttggttgaaccacgctatgcatactttcattttccccatcacacttgctgaagttgtcttacggcctcactcttatcctagcaagaagacaggcctgaccctcttggcggcagcctccatagcctacatttcatag

SEQ ID NO: 218508 - DNA, 675 bp, synthetic construct
  misc_feature 1..675: note = Description of Artificial Sequence: Synthetic coding sequence
  source 1..675: mol_type = other DNA
atgtccttcgtggaggatgtgaccattggggagggcgaaagcatcccgccagacacacaattcgtgaaaacttggaggatccagaattctggcgcagaggcgtggccaccaggtgtctgcctgaaatacgttgggggagaccagtttggtcatgtcaatatggtaatggtgaggtccctggaaccccaggaaattgccgacgtcagcgtgcagatgtgtagcccctctcgggctggaatgtaccagggccagtggcggatgtgtactgccacaggcctttactatggggacgtcatatgggtcatcctctcagtggaagtagggggactgctcggtgtgacgcagcagctaagctcgttcgagactgagttcaatacccagccgcatcggaaagtagagggaaacttcaatccattcgcatctcctcagaagaacagacagtccgacgagaacaatctaaaggaccccggtggctccgagtttgattcaatctctaaaaacacgtgggctccagctccagacacatgggccccagccccagatcagactgagcaggatcagaatcgactgagccagaacagcgttaacttgagtccgtccagccacgcaaataacctgagcgtagttacctatagcaaaggcctgcatggcccttatcccttcggacagtcttag

SEQ ID NO: 218509 - DNA, 897 bp, synthetic construct
  misc_feature 1..897: note = Description of Artificial Sequence: Synthetic coding sequence
  source 1..897: mol_type = other DNA
atggagggaatggatgtcgacctggaccctgagctgatgcagaagtttagttgtcttggaacaactgataaggatgttctcatttctgagttccagaggctcctaggatttcagttgaatcctgccggatgcgccttcttcttagatatgaccaactggaatctacaggccgctattggtgcgtactacgattttgaatcccccaatatatcagtgcccagtatgtccttcgtggaagacgtgactataggcgagggggagagtatacctcccgacactcagtttgttaagacctggagaatacagaactctggggctgaggcgtggcctccaggggtgtgtttaaagtacgtggggggtgatcagttcggacacgtcaacatggtgatggttcggtctcttgaacctcaggagattgctgatgtgagtgttcagatgtgttcgccttccagggcgggaatgtatcagggccagtggagaatgtgtacagccactgggctgtactacggcgacgtgatttgggtgatcctgtcagtggaagtggggggactgctgggagtgactcagcagcttagctcgtttgagactgagttcaatacgcagccccatcggaaagtggaaggaaacttcaatccctttgcttcgcctcagaaaaatcgccaaagcgatgagaacaacctcaaggatcccggaggcagtgaatttgacagcatttcgaaaaacacttgggcccctgctcccgatacatgggcacctgccccagaccagacagaacaagaccagaatcggctatcacaaaactccgtgaatctgagcccttcttctcatgccaacaacctttcggttgtgacttactcaaagggcctgcacgggccatatcccttcgggcaatcatag

SEQ ID NO: 218510 - DNA, 699 bp, synthetic construct
  misc_feature 1..699: note = Description of Artificial Sequence: Synthetic coding sequence
  source 1..699: mol_type = other DNA
atggaggggatggacgtggatttggatcccgagctcatgcaaaagtttagttgtctcggcacaacggataaagacgtgttgatatcagaattccagcggctgctcggattccaactcaaccccgctgggtgcgccttctttctggacatgactaattggaacctccaagctgcaataggagcctactatgacttcgagtccccgaatatcagcgtcccctcgatgtccttcgtggaggatgttaccatcggagagggggagagcatacccccagacacccaattcgtaaagacatggagaatccagaacagcgacgtaatctgggttatcctgtccgtggaagtgggagggttactgggggtcacccagcagctttcctcctttgagaccgagtttaatactcagccccaccgtaaagttgagggaaatttcaatcctttcgccagtcctcagaaaaaccggcaatccgatgagaacaatctgaaggaccctggcggaagcgagttcgattcaatctccaagaatacctgggctcctgctccagatacttgggccccagctcccgatcaaaccgagcaggatcagaatcggctatcacagaactcagtgaatctcagccctagttcacatgcaaataatctgtctgttgtgacttattcaaaaggactgcatggcccttatccatttggacagtcctag

SEQ ID NO: 218511 - DNA, 126 bp, synthetic construct
  misc_feature 1..126: note = Description of Artificial Sequence: Synthetic coding sequence
  source 1..126: mol_type = other DNA
atgggtgatatatacatcacttggattggatgtggtctagatcgcctccagtgggagaatgtatccgctatgattgaggaagtctttgaggcaacagacatcaagatcactgtgtataccttgtag

SEQ ID NO: 218512 - DNA, 459 bp, synthetic construct
  misc_feature 1..459: note = Description of Artificial Sequence: Synthetic coding sequence
  source 1..459: mol_type = other DNA
atggcgagttccctgaatgaggatccagagggttctcgcattacgtatgtaaagggagacttgttcgcctgccctaaaaccgatagcctggcccattgcatttcagaggattgtcgaatgggagccggtatcgcggtgctctttaagaaaaagtttggaggagttcaagaattactgaaccagcagaaaaagtccggcgaagtggccgtgctgaaaagagatggccgatatatttactacctaattaccaagaagagggcctcccataagccaacttatgagaatctgcagaagtcgttggaggcaatgaaatctcattgcctcaagaatggtgtaacggacctgtccatgcctaggattgggtgcggcttggaccggctccaatgggagaatgtgagcgctatgattgaggaggtcttcgaagccacagacatcaaaatcaccgtgtataccttatag

SEQ ID NO: 218513 - DNA, 459 bp, synthetic construct
  misc_feature 1..459: note = Description of Artificial Sequence: Synthetic coding sequence
  source 1..459: mol_type = other DNA
atggcctcctccctcaatgaggacccagaagggtccaggatcacctatgtcaaaggcgatttgttcgcgtgcccaaagactgattccctcgcccactgcatctcagaggactgtagaatgggtgctggtatagccgtacttttcaaaaagaaattcgggggagtgcaggagttactcaaccaacagaagaagagtggtgaggtggccgtccttaagcgggacgggaggtacatttactaccttattacgaagaagagagcatctcacaagcctacctacgagaatctccagaagtccttagaagcaatgaaaagccattgtctcaagaatggagtgacagatctgagtatgcctcgtatcggttgtggattagacagactgcagtgggagaatgtgtcagccatgattgaagaggtgttcgaagcaactgacattaagatcaccgtgtataccttgtag

SEQ ID NO: 218514 - DNA, 459 bp, synthetic construct
  misc_feature 1..459: note = Description of Artificial Sequence: Synthetic coding sequence
  source 1..459: mol_type = other DNA
atggcctctagcctgaacgaagatcctgagggcagcaggatcacgtatgtgaagggcgacctgttcgcttgccccaagacggactccctggcacattgcattagcgaggattgtcggatgggtgcagggattgccgtgctgttcaagaagaaatttgggggtgtgcaagaactcctgaatcagcagaaaaaaagcggggaggttgccgttctcaaacgtgatgggagatacatctactacctgataacgaaaaagcgggcaagtcataagcctacttacgaaaatctgcaaaagagcctcgaagcaatgaagtcacactgcctgaaaaacggcgttacagatctgtccatgccaagaattggctgcggattagaccggctgcagtgggaaaatgtgagcgcaatgatagaggaagtgttcgaggcaaccgacatcaaaattacagtgtacacactttag

SEQ ID NO: 218515 - DNA, 459 bp, synthetic construct
  misc_feature 1..459: note = Description of Artificial Sequence: Synthetic coding sequence
  source 1..459: mol_type = other DNA
atggctagcagcctgaacgaagatccagagggatcacgcattacttacgtaaaaggggatttgtttgcatgtccaaagaccgactcccttgcccactgcatatccgaggactgtcgaatgggcgcagggatcgcagtcctgttcaaaaaaaaatttggcggtgtgcaggagctgctgaaccagcagaaaaaatctggcgaggtggcggttctcaagcgcgatgggaggtacatctactatcttattaccaaaaagagagcttcacacaaacccacatacgagaatctgcagaagtcattagaagcgatgaagtcccattgcctgaaaaatggagtaactgatttatccatgccaaggattgggtgtggactggatcggctccagtgggaaaacgtgtctgccatgatagaggaggtgttcgaagccaccgatattaaaattaccgtgtatacactatag

SEQ ID NO: 218516 - DNA, 396 bp, synthetic construct
  misc_feature 1..396: note = Description of Artificial Sequence: Synthetic coding sequence
  source 1..396: mol_type = other DNA
atggcatcaagcttgaacgaggacccagaagggtctagaattacctacgtcaaaggggacctgtttgcttgtcccaagaccgactccctcgcccactgtatctcagaagattgtaggatgggtgccggaatcgctgtgctgtttaaaaagaagtttggcggtgtgcaggagcttctgaaccagcagaagaaaagcggagaggtggcggtcttgaagcgcgatgggaggtacatttactatctgatcactaagaagcgggcaagtcacaaacctacctatgaaaaccttcagaaatccctcgaagcaatgaagtcgcactgcctgaagaatggagtcactgatctgtccatgcctagaattggctgcggcctagaccgtctgcagtgggaaaattag

SEQ ID NO: 218517 - DNA, 1371 bp, synthetic construct
  misc_feature 1..1371: note = Description of Artificial Sequence: Synthetic coding sequence
  source 1..1371: mol_type = other DNA
atggaggcgctgggggatcttgaggggcctcgggctcccggtggagatgaccccgctggctctgcaggggagacacccggttggctttcacgagaacaggtctttgtccttatttcggcggcatctgtgaacctgggctcgatgatgtgttatagcattctcggtccgttttttcccaaggaagccgagaagaagggggcatctaataccatcatcggcatgatatttggttgtttcgctctttttgagttattggcctcgctggtgttcggaaattatctggttcacatcggagcaaaattcatgttcgtagctggcatgttcgtcagcggcggagtgactatattgtttggcgtgcttgacagggtacccgatgggcctgtttttattgctatgtgcttcttggtccgcgtgatggacgcagtgtcgttcgccgctgccatgaccgccagttccagcatcttggccaaggcatttcccaacaatgtggcaacagtcctgggatcgctcgagactttctccggcctggggctaattttagggcctcctgtcggcggatttctgtaccaatcttttggctatgaagtgccttttattgtcctgggttgtgtggtcttacttatggttcctcttaacatgtacattttacccaattacgagtcggatccaggggagcactctttttggaagcttatagctctgccgaaggtgggcctcatcgcctttgtaattaactcactttcgtcttgttttgggttcctggatcccaccctttccttatttgtgcttgaaaagttcaatctgccggctggttacgtgggcctcgtattcctcggcatggctttatcatatgccatcagcagtcctctctttgggttgctgtcggacaaaaggccacctctccggaaatggctgctggtgttcggaaacctgataactgcagggtgctatatgctgctgggacctgtccccatcttacatatcaaatcccagctctggctgctcgtgctcattctagtggtatccgggctctctgcagggatgtcgatcattcccaccttccctgagattctaagctgcgctcacgaaaacggatttgaagaaggtcttagtaccctgggtctggttagcgggcttttctccgcaatgtggtcaatcggcgctttcatgggcccaacactgggaggctttctttacgagaaaatagggtttgagtgggcagcagcaattcaggggctgtgggccctgatcagcggcctggctatgggtctcttctatctgctcgaatactctcgcagaaagcgttccaaatcccagaacatattgagcacagaggaggaaagaaccactctgttgcccaacgaaacctag

SEQ ID NO: 218518 - DNA, 324 bp, synthetic construct
  misc_feature 1..324: note = Description of Artificial Sequence: Synthetic coding sequence
  source 1..324: mol_type = other DNA
atggaggccctgggcgatctcgaagggccaagggcccctggaggtgacgatccagctggttccgctggagagacccctggctggctcagcagggagcaagttttcgttctgatcagtgcggcatctgtgaatctagggtccatgatgtgttatagcatattaggtccgttttttccaaaagaggcagagaaaaagggcgcttctaacaccattatcggaatgatatttggattccagttcactagttggatttgcgggacttccatacccggatacggaaccgtgctgtgtcaccttttcaccacaatctggagtccgaaatag

SEQ ID NO: 218519 - DNA, 324 bp, synthetic construct
  misc_feature 1..324: note = Description of Artificial Sequence: Synthetic coding sequence
  source 1..324: mol_type = other DNA
atggaggctctgggcgacctcgaagggcctcgggcaccaggcggagacgacccagccggttctgccggtgagactcccggatggctaagcagggagcaagtgttcgtcctgatttcagcagcctctgtgaatctgggttctatgatgtgttattccatcctcgggccattttttcctaaagaagctgagaaaaaaggagcctctaataccattatcggaatgatcttcggattccagttcacttcctggatatgcggcacgagcatcccaggctatggcaccgtgctgtgtcaccttttcaccaccatttggtcccctaagtag

SEQ ID NO: 218520 - DNA, 711 bp, synthetic construct
  misc_feature 1..711: note = Description of Artificial Sequence: Synthetic coding sequence
  source 1..711: mol_type = other DNA
atgttctgttttgtgagagtggcaggtatactgggtatctggaaattgtcttgtacctactggagcaagatctacgtatgttccaggaacgtgtgtctaagacgctcgtacaatagcctgtggggcagcttggaaacgttctctggacttggactaattcttggcccaccagtggggggatttctctatcagtcctttgggtacgaggtcccttttatcgtcttaggctgcgtggtactgcttatggttccactgaacatgtacatcctgccaaattacgagagtgacccaggcgagcattcattttggaaacttattgcgttaccaaaggtggggctgatcgctttcgtaatcaatagcctgtccagttgcttcggatttctcgacccaaccctgagtttatttgtcctagagaaattcaacctgccagctggttacgtcgggctggtgttcctgggaatggctttgagttacgccatcagtagtccactgttcggcctcctgtcagacaagcggcctccgctgcggaagtggttattggtgtttggcaatctgatcacagctgggtgctatatgctgctgggacccgtgccaattctacacattaagagccagttatggctgctggtgctcatcctggtggtgtccgggttgtcagcaggaatgtccatcattcccacatttcccgagatcctctcttgcgcccagtag

SEQ ID NO: 218521 - DNA, 654 bp, synthetic construct
  misc_feature 1..654: note = Description of Artificial Sequence: Synthetic coding sequence
  source 1..654: mol_type = other DNA
atggatgctccgaggcgctttccaactctggtacaactaatgcagcccaaggctatgcctgtggaagtgctgggccacttacccaagcggttttcttggttccatagtgaattcctgaaaaatcccaaagtcgtgagattagaagtttggttggtagagaagatcttcggcagggggggagaaaggatccctcacgtccagggtatgtcccagattttgattcacgtaaacaggcttgatccaaatggggaggccgaaatactcgtgtttggaagacccagttatcaagaagacaccattaaaatgattatgaaccttgccgactatcaccgccagcttcaggctaaggggtccgggaaggccttggctcaggacgtcgctacccagaaggctgaaacacagcggtcctcaatcgaggtcagagaggcaggtacccagcgtagtgtcgaggtgagagaagccggaactcaacggtccgtggaggtccaggaggtcggtacacagggctcacctgttgaagttcaggaagccggaactcaacaaagcctgcaagcagctaataagagtggcacacagaggagtccagaagccgcatccaaagctgtgacccagaggtttagagaggacgcacgggatcccgtgacaagactatag

SEQ ID NO: 218522 - DNA, 1416 bp, synthetic construct
  misc_feature 1..1416: note = Description of Artificial Sequence: Synthetic coding sequence
  source 1..1416: mol_type = other DNA
atgccttcagagacccatgcaatgctcgctacgctagccagggttgctgccctcagacggacctgccttttctctggtcgtggaggtggacgagggttgtggactggaagacctcagtctgacatgaataatatcaaaccactggaaggcgtaaaaattctcgatctgacgagggtgcttgctggcccatttgccaccatgaacttaggggacctgggagccgaagtgataaaagtggagcggccaggcgctggggacgatactcgtacgtggggccctcctttcgtgggaaccgagagcacttattacctgagtgtaaatagaaacaaaaagtccattgccgtgaatatcaaggatccaaagggagtgaagataattaaggagctggcagcagtgtgtgacgtcttcgtggagaattatgtgccagggaaactttctgctatgggcctgggttatgaagatatagacgagattgctccccacataatctactgctccatcaccggctacggacagactgggcctatcagccagagagctggatacgatgctgtggcctcggcagtatctgggttaatgcacatcaccggcccagagaacggcgacccagtccgaccaggtgtggcaatgaccgatctggccacaggactgtatgcttatggtgccatcatggcagggctgatccagaaatataaaacgggtaaaggcctgttcatcgattgcaatctgttgagtagccaggtagcctgtctgtcccatattgccgctaactatctgatcgggcagaaagaggccaaacgatggggtaccgcccacggatcaatcgtcccctatcaagcattcaagaccaaagatggctacatcgtagtgggcgcaggcaataaccagcagtttgcaaccgtgtgtaaaattctggacctgccagagttgatcgataactcaaagtacaagacgaatcacctaagagtgcacaaccgtaaggaactgatcaagattctttctgagcgtttcgaagaagaactgaccagcaagtggctgtatctcttcgaggggtccggggttccctatggccctattaacaacatgaagaatgtttttgccgaaccgcaaaatgctgtgtcaggctttcagtccctcctgcatagcctggctcacggccctttcctgcacctgcagggatctgccagagtactccacaacggacttgttatggaaatggaacatccaaccgttggaaagataagtgtgcccggaccggctgtccggtattcaaagtttaagatgagtgaggcccgtccacctcccctactgggccaacataccacacacatcctgaaagaagtgctgcggtatgacgacagagccatcggcgagctcctgtcagcaggagttgtggatcaacacgagacacactag

SEQ ID NO: 218523 - DNA, 1338 bp, synthetic construct
  misc_feature 1..1338: note = Description of Artificial Sequence: Synthetic coding sequence
  source 1..1338: mol_type = other DNA
atgccaagcgagacccacgccatgctggctacgctggcccgagtcgccgctttgcgtagaacatgtcttttcagcggtcgtggcggtggccgaggcctgtggactgggaggccacagtctgacatgaacaatataaagccactggaaggtgtgaagatactggatttgactcgagttctcgccggtccgtttgctaccatgaatctaggcgacctgggagccgaagtgataaaggttgagcgtcctggtgctggtgatgacacacgcacgtggggacccccttttgtgggaaccgagagtacatactacctcagcgtgaaccgaaacaagaaaagcatcgctgtcaatattaaggatccaaaaggagtcaagatcattaaagagctggccgctgtctgtgacgtctttgttgagaattacgtgcccggaaaactcagtgccatgggtctcggctacgaagatatagacgagatcgccccacacattatttattgtagtatcaccggttacggccaaacaggccctatcagccagcgggcaggctatgatgccgtggctagtgctgtgagcggactcatgcacattaccggtcccgagaatggcgacccggtccgccctggagtcgccatgacagaccttgccactggactctatgcatacggcgctataatggcagggctgatacaaaaatacaagaccggtaagggactttttatcgactgtaatctgctgagtagccaagttgcgtgcttgtctcatattgcagcaaactatttaatcggacagaaggaagctaagaggtggggaaccgcccacggaagcatcgtgccttaccaggcctttaagacgaaggacgggtatatagtggtgggggctggtaacaaccagcagttcgctaccgtctgtaaaatcctcgaccttcctgagttgatcgacaactccaagtataagaccaaccatttaagagtgcacaatcgaaaggagctgatcaagatcttgtccgagaggtttgaagaggagctcacgtctaagtggttgtatctgttcgaggggtctggggtgccatacgggcctataaataatatgaagaacgtttttgcagaaccccaagtcctacataacggccttgttatggagatggagcacccaacggtcggcaagatttcggtgccagggcctgccgtgaggtacagcaaattcaaaatgagcgaggcccgtccccctccactgttgggccagcacaccactcatattctcaaggaagtgctacgctatgatgatcgagctattggtgaattgctgtcagcaggggtggttgaccagcacgaaacacattag

SEQ ID NO: 218524 - DNA, 609 bp, synthetic construct
  misc_feature 1..609: note = Description of Artificial Sequence: Synthetic coding sequence
  source 1..609: mol_type = other DNA
atgctggcaaccctcgccagagtggctgcactcagaagaacatgccttttttcgggtagagggggaggcagaggtctctggacaggcaggccacagagcgacatgaataacatcaaacccttagagggcgtgaaaatactggatttgaccagagtcttggccggaccctttgccactatgaatctgggcgacttgggtgcagaagtcattaaagtggagcggccaggcgcaggagacgatacgcgcacctggggacccccattcgtcgggactgagtctacatattatctgagtgtgaacagaaacaagaaatccatcgccgttaatattaaggacccaaaaggcgtgaagatcattaaagagttggccgctgtctgcgatgtctttgtggaaaactatgtgcccggaaaactctccgcaatgggccttggctatgaagatattgacgaaattgctccacacattatatattgcagtattacagaaaaggggtttagccatgtagcccaggatgggctggacctccagacgtcttctaacctgcctgccctggtgtcccagtcagcaggaatcacaggtatgtcacacagagcatggcctacttcatag

SEQ ID NO: 218525 - DNA, 1194 bp, synthetic construct
  misc_feature 1..1194: note = Description of Artificial Sequence: Synthetic coding sequence
  source 1..1194: mol_type = other DNA
atgcctagcgaaactcatgcgatgctggccaccctggccagagtggctgctctcaggagaacctgtctgttctctgggagaggcggaggaagaggactgtggactggccgaccccagtctgacatgaacaatattaagccattggagggtgtcaaaatcctggatctaaccagagtgcttgcgggaccattcgccaccatgaacctaggggatttaggcgctgaggtgatcaaggtggaaagaccaggggcaggcgatgacacccgcacttgggggcctcctttcgtgggaaccgagagcacttactatttatcagtgaatcgaaacaagaaatccattgcagtaaatattaaggatcccaaaggagtgaaaattatcaaggagctagctgccgtttgtgatgtatttgtggagaattatgtccctgggaagctttctgcgatgggacttggatacgaagacattgatgagatcgcccctcacatcatctactgcagcatcactgggtacgggcaaaccggcccaatcagccaacgcgctggctacgacgccgtcgcctcagcggtctcaggcctcatgcatatcacaggacccgaggtcgcttgtctgagccacatagccgctaactacttgataggccagaaggaggcaaaaagatggggaaccgctcatggcagcatcgttccatatcaggcattcaagactaaggatgggtacatcgtggtgggcgcagggaataaccaacaattcgccactgtatgcaagattttggacctacccgagctcatagacaacagtaagtataaaactaaccatttacgtgttcataataggaaggaactcatcaaaatccttagcgagcgttttgaggaggagttaacctcgaaatggctgtacttgtttgaaggcagtggtgtaccctatggtcctatcaataacatgaagaatgtgtttgccgagccacaggtccttcacaacggcctcgttatggagatggagcatcctaccgtcgggaaaatctccgtgcctgggcctgctgtgagatacagcaagttcaaaatgagcgaagctcggccaccacccctcttgggccaacacactacccacattctgaaagaggtgctgcgatatgatgaccgcgcaatcggcgaactgctatccgctggcgtcgtggatcaacacgaaacccattag

SEQ ID NO: 218526 - DNA, 540 bp, synthetic construct
  misc_feature 1..540: note = Description of Artificial Sequence: Synthetic coding sequence
  source 1..540: mol_type = other DNA
atgcagaggcagaattttcgccctccgacccccccttatccaggaccaggcggtggagggtggggttcaggatcttctttcagaggtactcctgggggtggcggtcctaggccccctagtccaagggatggatatggcagcccgcaccacaccccaccttacggcccaagatccagaccatatggctcttctcattccccaaggcatggcggttcgtttccaggagggcgttttgggtcccctagtcctggaggatatccagggagctatagtcgatcccccgctggcagccagcagcaatttggctattccccaggacaacagcaaacccacccacaaggatccccaaggacatcaacacccttcgggtcaggccgagtccgggagaagagaatgtccaacgaactagaaaactactttaaaccatcaatgctggaggatccgtgggccggtttggaacctgtgagcgtcgttgatatctctcagcagtactccaatacccagactttcacgggcaaaaagggacggtatttctgttag

SEQ ID NO: 218527 - DNA, 480 bp, synthetic construct
  misc_feature 1..480: note = Description of Artificial Sequence: Synthetic coding sequence
  source 1..480: mol_type = other DNA
atgaaaatagtcgacgagagagaaaaaaatttagacgataaagcataccggaacatcaaggaacttgaaaactacgcagaaaatacacaatccagtcttttgtatttaaccttagagattctcgggatcaaggatctgcatgctgatcacgccgctagtcatattggcaaagcccaggggattgtgacatgtttacgagccacgccctaccacggttcccgcagaaaggtttttctgcctatggacatttgcatgctgcacggtgtaagccaggaggattttcttagaaggaatcaggacaaaaatgtaagagatgtgatctacgatattgcctcacaggcccatctgcacctcaagcatgcacgctccttccacaagaccgtgccagtcaaagctttccccgctttcctgcagacagagatcaaggatgccgatacccagggcgtctgtttagcacagcccgcatctctggggaaatag

SEQ ID NO: 218528 - DNA, 1002 bp, synthetic construct
  misc_feature 1..1002: note = Description of Artificial Sequence: Synthetic coding sequence
  source 1..1002: mol_type = other DNA
atggcggcaagcgcgcacggaagtgtctgggggcctttgcggttgggcatacctggtctctgttgcaggcggcctccgctgggactgtacgcacgcatgaggaggcttcctggcccagaggtgtctggccgatcagtggccgcagcctccggacccggagcatggggcacggatcactactgccttgaacttctgcggaaaagagactatgaagggtacttgtgttcactgctactgcccgctgagagtagaagttccgtctttgctctgcgcgctttcaatgtggaactcgcccaggtaaaggactctgtatcagagaaaacgataggattaatgcgaatgcagttttggaaaaaaacagtggaggacatctactgcgataaccctccccaccaacctgtggccatagaactgtggaaagctgtcaaacgtcataatctcactaagcgctggctgatgaaaattgtagacgagagagagaagaatctcgacgataaggcttaccgcaatataaaggaactagaaaactatgctgaaaacacccagagcagtctgctgtatttgaccctcgaaatcctcgggattaaagacctccatgcggatcatgcagcatctcatatcggcaaagcacaaggcattgtgacatgtctcagggctacaccgtatcatggaagtaggcggaaagtctttttaccgatggatatctgtatgttacacggcgtgtcccaggaagacttcctgagaagaaatcaagataaaaatgtgagggatgtaatatatgatattgcgagccaggcgcatcttcacttaaaacacgccagaagcttccataaaaccgtgcccgtaaaagcctttccggcttttcttcagacagtgtcgctggaggacttcctgaaaaaaatacagagagtcgatttcgacatcttccacccctctctgcaacagaagaacaccctgctccccctgtacctgtacattcagagctggaggaagacgtactag

SEQ ID NO: 218529 - DNA, 846 bp, synthetic construct
  misc_feature 1..846: note = Description of Artificial Sequence: Synthetic coding sequence
  source 1..846: mol_type = other DNA
atgccgatctccattagccacagctcctggctggtacaacgaaagcgcgactacgagggttatttgtgttcgttactgcttccagccgagagtagatcatctgtcttcgcactgagggcctttaatgttgaactagcgcaggtcaaagacagcgtcagcgaaaagaccatcggtctgatgaggatgcaattttggaagaaaaccgtggaagatatctactgtgacaatccgccacaccaacctgtcgccatcgagctctggaaggctgtcaagcggcataacctcaccaagagatggctgatgaaaatcgttgacgaacgggaaaaaaacctagatgataaagcatacaggaacatcaaagagctggaaaactacgcggagaatactcaatcatccttgctgtatcttaccctggagatactcggcatcaaggatctgcatgctgaccacgccgcttctcatataggcaaggcccaggggatcgtgacttgtctccgagccactccataccacgggtcgcgacggaaggtcttcttgccaatggatatctgtatgctgcacggagtgtcccaagaagattttttgcgcagaaatcaagataagaatgtgcgggatgtgatttatgatatcgcctcgcaggcccatttgcatctcaaacatgcacgatctttccacaagacagttcctgtgaaagcctttccagcattcctccagaccgtaagcctggaagatttcttgaagaagattcagcgcgtggactttgatatcttccatccgagcctgcagcaaaagaacaccctgttaccattgtacttgtacattcagtcttggcgcaagacatattag

SEQ ID NO: 218530 - DNA, 321 bp, synthetic construct
  misc_feature 1..321: note = Description of Artificial Sequence: Synthetic coding sequence
  source 1..321: mol_type = other DNA
atgaaggcaaagagaagccaccaggccgttattatgagtacctctcttcgcgtgagcccaagcatccacggctaccacttcgatacagcgtcgagaaaaaaagccgtcggcaatatttttgagaacacagatcaggagagcctggaaaggctgttccgtaactcaggcgacaagaaggcggaagagagagcgaagattatcttcgctattgatcaagatgtggaggaaaaaacaagggcactgatggcgctgaagaagcggacgaaggacaagttgttccagttccttaaactgcgaaaatattccataaaagttcattag

SEQ ID NO: 218531 - DNA, 1185 bp, synthetic construct
  misc_feature 1..1185: note = Description of Artificial Sequence: Synthetic coding sequence
  source 1..1185: mol_type = other DNA
atggcgggagctgcaatggcggagaggggacgcgtgcccccacctgcacctgccccttccacagagggtttacctagggccttcttgcagtcacttaggacactgttcgacattctggacgatcgcagaagagggtgcgtccacctgagagaaattgagagtaggtggcaagggaccgacgctcgggaattaccacggggagtcttagaaggacttcgccaggtggcgccagccagtggatacctgacctttgagagattcgtagctggcctcaggacctccttgttgagcgcagatgggggacccagggatcccactagggcaccagcacgcccaggcgatcaaccgcctccaccaccacaaagattggtgttcgctcccgctgacgaaccacgcacagtgctggagagaaagccactgccactgggagttagagctcccctcgctggaccaagtgcagcagcgcgttcccccgaacagctctgtgcgccagccgaggccgcaccatgtcccgctgaaccggagcgttcccagagtgccgctctggagcccagctcctcagccgatgctggggctgtggcctgtcgagccctggaggcagactcaggcgacgccaggcgagcacctcgtgcaagaggggagagacggagacacacaatcgcaagcggggtggattgcggcttgcttaagcaaatgaaggaactcgagcaggaaaaagaagtgctcttacaaggcctggagatgatggcccgaggaagagattggtaccagcagcaactccagcgagtgcaggaacgacagcgcagacttggtcagtccagggcatcagctgacttcggagctgctggctcacctagaccgctagggaggctgctacctaaagtgcaggaagttgcccgttgccttggtgaactcttggcagcagcttgtgcgagcagggccctgcccccttccagcagcggtcccccttgcccagccttaacctccacttctccaccggtgtggcaacaacagacaatactaatgctaaaggagcagaataggctcctgactcaggaagtcactgaaaagagcgaaagaattacccagctcgaacaggaaaagagtgctctgataaaacagctgttcgaagcacgcgctctctctcaacaagacggagggccactcgactcgactttcatttag

SEQ ID NO: 218532 - DNA, 1035 bp, synthetic construct
  misc_feature 1..1035: note = Description of Artificial Sequence: Synthetic coding sequence
  source 1..1035: mol_type = other DNA
atgagacgacccaggcagggaggcggtggggctggaggctccgccgcagcacgcgctcgcgcagggggtctggggggaggctctgtgcctgcgagggccagaggcgctccagctgctgctagggctgcatggctccgcgatctgtgcgcgagaatggcgcgtcctcccaggcagcacccaggggtatgggctagcctactcctgctgctactgacaggcccagccgcatgcgccgcatcacccgcagatgatggagccggtcctggtggacgcggacctcgaggacgtgcacgtggggacaccggagccgacgaagccgtacccaggcatgattcatcgtacggcaccttcgccggagagttttacgatctgcgttatttgagcgaggaggggtacccctttcccacagctccgcctgtagatccattcgccaagattaaagtcgacgactgcgggaagacaaaaggttgtttccgctatggaaagcccggatgtaatgctgagacgtgcgactactttctctcatatcgtatgattggcgctgatgtggaattcgagctatctgcggacactgatggttgggtggccgtgggttttagctccgacaaaaaaatggggggagatgatgtaatggcttgcgtgcacgacgacaatggtagagtgcgaattcagcatttctacaacgttgggcaatgggcaaaggaaatacagcgaaatcccgctcgtgacgaggagggcgtatttgaaaataatcgagtgacgtgtcggttcaagcggcctgtcaacgtgcccagggacgaaacaatcgtggatctgcacttgtcgtggtactatctcttcgcctgggggccagccattcagggctccataacacgacacgatattgattcacccccagcgtcagaacgggtggtctccatatacaagtacgaggatatctttatgcctagcgccgcttaccagaccttctcttctcctttctgtctgctcctgattgttgcgttgacattctaccttttgatgggaaccccgtag

SEQ ID NO: 218533 - DNA, 393 bp, synthetic construct
  misc_feature 1..393: note = Description of Artificial Sequence: Synthetic coding sequence
  source 1..393: mol_type = other DNA
atgtcttcatccgggggtgcccctggtgcttcagcgagctccgcccctcctgcccaggaggagggcatgacctggtggtaccgttggttgtgccgcctaagtggtgttttaggagctgtatcgtgcgcaatctcaggactgtttaactgcatcaccatacacccactaaatattgccgctggcgtctggatgatgatggccgtcgttccaattgtcatctccctgacccttacgaccttgctggggaatgcgatcgctttcgctacaggcgtcttatatgggctcagcgctcttggcaagaaaggggatgctatctcctacgccaggattcaacaacaaaggcaacaggcagacgaggagaaactggccgaaacgctcgaaggagagctatag

SEQ ID NO: 218534 - DNA, 519 bp, synthetic construct
  misc_feature 1..519: note = Description of Artificial Sequence: Synthetic coding sequence
  source 1..519: mol_type = other DNA
atgtcctcatcaggaggggctcccggtgccagcgcgtccagcgcaccccctgctcaggaagagggcatgacatggtggtataggtggctctgtcgactgtctggagtccttggtgctgtgtcttgcgcaatatcagggctgtttaactgtattactatacaccccttgaacatagctgcaggagtatggatgatcatgaacgcatttattctgttactgtgcgaggcaccattctgctgccagtttattgagtttgctaacactgtggccgaaaaggttgatcggctccgctcctggcagaaggcagttttctactgcggaatggctgtggtcccaatcgtcatttcgctgacgctgactaccctattaggaaacgcaatcgcattcgccacaggagtgctctatgggctctcagcattgggcaagaagggagacgcaatcagttacgcacggatccagcagcaacggcagcaggctgacgaggaaaaattagccgaaactctcgagggggagctttag

SEQ ID NO: 218535 - DNA, 345 bp, synthetic construct
  misc_feature 1..345: note = Description of Artificial Sequence: Synthetic coding sequence
  source 1..345: mol_type = other DNA
atgctcacagctgcaggttcaacagccgaactctctgcgtgtgccatctccggactgtttaattgcatcacaattcatcctctaaacatagcggctggtgtgtggatgataatgaatgcctttatactgctgttatgtgaggcacccttttgttgtcagtttatcgagtttgcaaacaccgttgctgagaaggtggatagacttcgctcctggcagaaggccgtcttttattgtggaatggcggtcgtcccgattgttatctcattgactctgacaaccctgctcggcaatgctattgcttttgcaaccggggtgctctacggcctttctgctctcggcaaatag

SEQ ID NO: 218536 - DNA, 489 bp, synthetic construct
  misc_feature 1..489: note = Description of Artificial Sequence: Synthetic coding sequence
  source 1..489: mol_type = other DNA
atgagctccagcgctccacccgcacaggaagagggtatgacttggtggtatagatggctttgtagattaagtggagtgctgggggctgtcagctgcgctattagcggactcttcaattgcataactatacacccacttaacattgcagcaggggtttggatgataatgaatgctttcatcctcctgctgtgtgaggcccctttctgctgccaattcattgaatttgccaacacagtagccgagaaggtcgacagactccgttcctggcagaaggctgtgttttattgcggaatggccgttgtgccaatcgtaatttccttgactctgaccacactcctgggcaatgctatagcctttgcaaccggtgtgctttacggcctctctgctctgggaaaaaagggggacgcaatatcctatgcaagaatccagcagcagcgccagcaggctgatgaggaaaagttggccgagaccttagagggcgaactgtag

SEQ ID NO: 218537 - DNA, 702 bp, synthetic construct
  misc_feature 1..702: note = Description of Artificial Sequence: Synthetic coding sequence
  source 1..702: mol_type = other DNA
atgagttcttccggcggagctccaggggcttcagctagctcggccccacctgcccaggaagagggaatgacttggtggtaccggtggctttgcaggttatccggcgtcctgggcgcagtatcctgcgccatcagtgggctgtttaattgcatcaccatccatcccctgaatatcgctgccggagtgtggatgatcatgaacgcatttatcctcttgttatgcgaggcccctttttgctgtcaattcatcgagttcgcaaatacggtcgcagaaaaagtggataggctgcggagctggcagaaggctgtgttctactgtggaatggcagtggtccccattgtaattagtttaacgttgaccaccttattgggcaacgccattgccttcgccacaggtgtcctgtacggtctgagtgcgctaggcaagaaagcacaaactgaggccggttccttcgccgcacagcatccccgagagccaggccctttcagtgagggcactcgacaggcctttgcgacacccgctgtcgtctcaggtgagatcagaatgcctgcaggcgcaatgaggagccctatgccgggatcctcatctcgtggttcgaggaggatgagaaggagcagtaggcggccatggcggggtagctgcgaagggttgggagcaccgccaagtctctctccgctcctggccctgtgcggtagcaaatag

SEQ ID NO: 218538 - DNA, 576 bp, synthetic construct
  misc_feature 1..576: note = Description of Artificial Sequence: Synthetic coding sequence
  source 1..576: mol_type = other DNA
atgagctccagcggaggcgcaccaggcgcttccgcttcaagcgccccacccgcacaggaagaggggatgacatggtggtaccggtggctttgtagactctctggtgtcctcggagcagtgagctgcgcgattagtggattatttaattgtattaccatccatcccctgaacattgctgctggcgtgtggatgatgatggcagtggtgcccatcgtgatcagcctgacgctgaccaccctgctcggcaacgcaattgcctttgccaccggggtgttatacggcctgtcagcgctagggaagaaagcacagaccgaggcaggcagctttgccgctcagcaccccagggaaccgggaccattcagcgagggcacgcgtcaggcctttgccactcccgctgtcgtgagcggcgaaatcaggatgcctgctggtgcaatgagaagccctatgcccggttcctcttcccgagggagtcgtcgcatgcggaggtcttctagacgaccttggcgcggaagctgcgaaggcctgggagcacccccttccctgagccctctcctggccctctgcgggagcaagtag

SEQ ID NO: 218539 - DNA, 669 bp, synthetic construct
  misc_feature 1..669: note = Description of Artificial Sequence: Synthetic coding sequence
  source 1..669: mol_type = other DNA
atgtcaacactatgcccccctccaagccctgctgtagccaagacagaaattgcgttaagcggaaagagccccctgctggctgctacttttgcctattgggacaatattttaggccctagagtccggcatatttgggcaccaaaaactgagcaagtcctgttgtcagatggggagattacttttctggctaatcacacgctcaacggcgagatccttcgcaatgcggaaagtggagccatagatgtgaagttctttgttctttcagagaaaggcgtcatcattgtgtccctgatcttcgacggcaactggaacggcgataggagcacgtatgggttgtctatcatcctcccccagaccgaactgagtttctacctgcccctgcatcgggtatgtgtcgaccgcctgacacacatcatccgcaagggacgcatttggatgcacaaggaacgccaggagaacgtgcagaagattatcctggagggaacagagcggatggaggatcaaggacaatccatcattcctatgctgaccggggaggtcattccagtgatggaactgctgagctccatgaagtcgcactctgtgcccgaagaaatcgatatcgctgatactgtcctgaatgacgacgacatcggagattcgtgccacgaggggtttctgcttaaatag

SEQ ID NO: 218540 - DNA, 669 bp, synthetic construct
  misc_feature 1..669: note = Description of Artificial Sequence: Synthetic coding sequence
  source 1..669: mol_type = other DNA
atgtcaacgctctgcccacctccaagcccagccgtcgcaaagactgagatcgccctctcaggcaaaagtccattactggcagctacgttcgcctattgggacaacatcttggggccacgcgtgcgtcatatttgggcaccgaagactgagcaggtgttgctttctgatggagagatcacgttcctcgcgaaccacaccctgaatggggagatcctgcggaacgccgaatccggggctattgatgttaagtttttcgtgcttagcgagaagggagtcatcattgtgagtctcatctttgatgggaattggaacggcgataggagcacttatggattatcaattatcctacctcagacagagctgagcttctacttgccgcttcacagagtttgtgtggaccggctgactcatatcatccgcaaggggaggatatggatgcataaagaaagacaggagaacgtacagaaaataatccttgagggtacggagagaatggaggatcagggacagtcgatcatccccatgttgacgggggaggtcatcccagttatggaactcctgtcttctatgaaaagtcactctgtgccagaggagattgacattgcggatacggtgcttaatgatgatgacataggggacagttgtcatgaggggtttctgctcaagtag

SEQ ID NO: 218541 - DNA, 1446 bp, synthetic construct
  misc_feature 1..1446: note = Description of Artificial Sequence: Synthetic coding sequence
  source 1..1446: mol_type = other DNA
atgtccactctgtgtccacctccaagccccgctgttgccaaaaccgaaatcgcgttatccggcaagtcacctctattagccgcaacatttgcttactgggacaacattctgggtcccagagtcaggcatatctgggcccctaaaacagagcaggtgctgctctcagacggagagataaccttcctggccaatcacacattgaacggcgagatcttgcgcaatgccgagtcaggggctatcgatgtgaagttctttgtgctgtccgagaagggcgtcatcattgtgtctctcattttcgacggcaattggaatggagataggtctacttatgggctcagtattattctgcctcaaacggagctctccttttacctacctctgcatcgcgtctgtgtggataggcttacccacatcatcaggaagggacgcatttggatgcacaaggagcgacaggagaacgtgcagaaaataatccttgaaggaacagagcggatggaagatcagggtcagtcaatcattcctatgctgacgggtgaagtcatcccagtaatggagttgctctcatctatgaaatcccacagcgtccccgaagaaatcgacattgctgataccgtcctgaacgatgacgacataggcgatagctgtcacgagggattcttactcaatgctatttcatcgcatttgcagacttgcggatgtagcgttgttgtaggctcctctgccgagaaggtaaacaagatcgtgcgaaccctctgtttattcctcacaccagccgaaaggaagtgcagcagactctgcgaggcagaaagttcgttcaagtacgaaagcggtctgttcgtacaaggcctgctgaaggactctactggctccttcgtactgccctttcgccaggtaatgtacgcgccttaccccaccactcatattgatgtggacgtgaataccgtgaagcagatgcctccatgtcacgagcacatctacaatcagaggcgctatatgcggtccgagctgaccgctttctggagggcgactagtgaggaggacatggcccaagataccatcatttacaccgatgagtcctttaccccagacctgaatatattccaggacgtgctgcacagggatacgctcgtaaaggcttttctggaccaggtatttcagttaaaaccaggcctctccctccgttccaccttcttggcacagttcttactcgtactgcacaggaaggccttgaccctgattaagtacatagaggacgacacacaaaagggtaaaaaaccgtttaagtcccttcggaatctgaaaatcgacctggatctcaccgctgaaggtgatctgaacatcattatggccctggccgagaaaatcaaacccggactgcacagctttatttttggccgtccgttttatacttccgttcaggagcgtgatgtgctgatgactttttag

SEQ ID NO: 218542 - DNA, 168 bp, synthetic construct
  misc_feature 1..168: note = Description of Artificial Sequence: Synthetic coding sequence
  source 1..168: mol_type = other DNA
atgcaaaaccagtcctctactaatcatcctggcgctagcatgctgatgcacatacatctcgacacttccagtctgaaaaccctccatctgggaacactctttttcctgttttatctggccctgacccaaaatgaagaaaacatatgcgatggcaaagtgacgctctag

SEQ ID NO: 218543 - DNA, 225 bp, synthetic construct
  misc_feature 1..225: note = Description of Artificial Sequence: Synthetic coding sequence
  source 1..225: mol_type = other DNA
atgcagaatcaatcgagcacgaaccaccccggagcctccattgccctttctcggccaagcctcaacaaggattttagggaccacgctgagcaacagcacatcgctgcccagcagaaagctgcactgcagcacgcccacgcccatagctccggctactttattacccaggattctgctttcggtaacctgatattaccagtcctccctagactcgaccctgagtag

SEQ ID NO: 218544 - DNA, 168 bp, synthetic construct
  misc_feature 1..168: note = Description of Artificial Sequence: Synthetic coding sequence
  source 1..168: mol_type = other DNA
atgcagaaccagagttccaccaaccacccgggtgccagcatgctgatgcacatccatcttgacacaagcagcctcaaaaccctacatctcggtacgctcttctttctgttctatctggcgctgacacagaatgaggaaaacatttgcgatgggaaagtgaccttatag

SEQ ID NO: 218545 - DNA, 315 bp, synthetic construct
  misc_feature 1..315: note = Description of Artificial Sequence: Synthetic coding sequence
  source 1..315: mol_type = other DNA
atggcggcaaactctagcgggcaggggttccaaaacaagaacagggtggccatacttgccgaattagacaaggaaaagaggaagctcttaatgcagaatcaaagcagcaccaatcaccccggagccagtatcgccctctcccgcccttcactgaacaaagattttcgcgaccacgccgaacaacagcacatcgccgcacagcaaaaagccgcactgcagcacgcccacgctcacagctctggatattttattacccaggatagcgccttcggcaacttgatcctgcccgtgttgcccagactcgacccagaatag

SEQ ID NO: 218546 - DNA, 2190 bp, synthetic construct
  misc_feature 1..2190: note = Description of Artificial Sequence: Synthetic coding sequence
  source 1..2190: mol_type = other DNA
atgttcagcgccctcaagaagctggtcgggtctgaccaagcacctggaagagataagaatatccctgctggtttacaatcgatgaaccaggccctgcaacgcagattcgctaagggtgtgcagtacaatatgaaaatcgttatccgaggcgaccggaacactggcaagacagctctctggcaccgcctgcaaggcaggcccttcgtggaagagtacatacccacccaggagatccaagtgaccagcattcattggagctacaaaactacggatgacatcgtcaaggtcgaagtgtgggatgtggtcgacaagggtaagtgcaagaagaggggcgacggcttgaaaatggaaaatgatccacaggaagccgaatccgaaatggccctcgacgcggagtttctcgatgtgtataagaattgcaacggcgttgtgatgatgttcgatatcacaaaacagtggactttcaactatattctgcgagagctccccaaggtgcctacccatgtgcctgtgtgcgtgctcggcaactatagggacatgggagagcatcgggtgatcctccctgatgatgtgagagattttatcgacaacctggacagacctcctggctcctcctactttcggtatgcagagtcttccatgaaaaactcattcgggctgaaatatctacacaaattcttcaacatccctttcctgcaacttcagagagagaccttactgcgtcagctggagactaaccagctggatatggatgctaccctcgaagagctgagcgtgcaacaagagactgaagaccagaattacgggatcttcctggaaatgatggaagccaggagtcgtggccatgccagccccctagccgctaacggtcagagtccttctcctggtagtcagagccccgtcgtgcccgcaggcgctgtgtctaccggttctagttcacccggaacaccccagccagcaccgcagttaccactgaacgcagcaccgccttcttccgtgcctcctgtgccaccgtctgaggcccttccaccgcctgcctgtccatcagcacccgctcctcggagaagtatcatctccaggctctttggcacgtctccagcaactgaggccgcacccccacctccggaacctgtgcccgcagccgagggtcccgcaacagtgcaatctgtcgaagatttcgtgcctgatgaccggttggacagaagttttttggaggataccacaccagctagagatgaaaaaaaggttggtgccaaggccgctcagcaggacagcgactctgatggggaagccctagggggtaacccaatggtggcgggtttccaggatgatgtggacttagaagatcagcctcgaggcagtccacctctgcctgccggaccagtgccctcacaggacatcaccctgtccagcgaggaggaggctgaagtcgccgctcccacaaagggcccagcgcctgcaccgcagcagtgcagcgaacctgagaccaaatggagctcaatacccgcaagcaaaccaaggcgcggaacggcacccacccgcaccgctgctccgccttggcccggaggtgtcagtgtgcgcacaggacctgagaaaaggagctccacacgaccgccagccgagatggagccgggtaaaggggaacaggcctccagcagcgaatccgatcccgagggcccaatcgctgcccagatgttgtcatttgtcatggatgacccagatttcgagagtgaaggctctgacacccagcggagggccgatgactttcctgttcgtgacgatcccagcgacgtgaccgatgaagatgaaggacccgcagaaccgccaccccctccaaagctacctcttcctgcttttagattaaaaaatgactctgacctttttgggctgggcctagaggaggctggcccaaaggagtcttccgaggaaggcaaagaaggaaagaccccctctaaggagaagaagaaaaaaaaaaaaaaaggaaaagaagaagaagaaaaggccgcaaagaaaaagtcaaagcacaaaaagagcaaagataaggaagaggggaaagaggaaagaaggaggaggcagcagagacctccacgcagcagagagcggacagcagccgacgagttggaggcgtttctaggaggcggagctcccggaggtcgccatcccggtggcggtgactatgaggagctgtag

SEQ ID NO: 218547 - DNA, 1563 bp, synthetic construct
  misc_feature 1..1563: note = Description of Artificial Sequence: Synthetic coding sequence
  source 1..1563: mol_type = other DNA
atgttctccgcgctgaagaaacttgtaggctccgatcaagcccctggtcgggataagaacattccagctggactgcagtcaatgaatcaggctctacagcggaggtttgccaagggcgttcaatacaacatgaagatcgtgattcggggtgacaggaacactggcaaaaccgcactctggcaccggctgcaggggagaccctttgtagaggaatacatccctacacaggagattcaggtgaccagtatccactggtcatacaaaaccaccgatgatatcgtgaaggtggaggtttgggatgtcgtagataagggcaaatgtaaaaaaaggggagatgggctgaagatggagaatgatccccaagaggcagagagtgagatggcgctggatgcggagtttctcgacgtttacaagaattgcaacggtgttgtgatgatgttcgacattactaaacagtggacattcaactatattttaagggagttaccgaaggtaccaacccacgttccagtttgtgtgctgggcaactatagggatatgggagagcatcgggtgattttgcctgacgacgtgcgggatttcattgacaacttggacagacccccaggtagctcctattttaggtacgcagagtctagcatgaaaaactcttttggtctaaaatatttacataagttcttcaatatacccttcctccaattacagagagagacgttacttaggcagctcgagacaaatcagctggacatggacgccaccttagaggagctgagcgtacagcaagagaccgaagatcaaaattacgggatctttttagagatgatggaggctagaagcagggggcacgcctctccactggcagctaatggacagtccccaagccccggttcccagagccccgtggtaccggctggtgcagtttccaccggcagtagctctcctggtaccccccagccggctccacagctgccactaaacgctgccccaccatcgtcagtgccgcctgtcccgccatcagaagctttgcccccacctgcgtgtcctagtgcgcctgcaccacgtagaagtataatatctcgtccgccaccatggggctggaggcttaggggcgctctaggccgaaggggacagtggccaccctggggtggcggacgcgcttgtcactgcctgggaagacacctcccgctgtaccacagactgtgcagatgtcccgtggcggcagtgtgcgcctcggagctcgaagaggccggtcattggtggtcccccggttgggcgttgcaggttctcggtcttcaggcccaatgcgagccggctctacaggagggccgtggacagctggcgagcgctcgcctgggcggacaccccggtccgctgggggcagaaccacccgtgtttttaagggacgtaaccgaggcgcaggagggtccggtgagggtctgtctgcagagacttgggagaggcagattagcagtcggctgcgctctccctcggcatctgttggcattacgcgctcacctgggacctcagcatgcctatgggtccgcgtcagggagagaaccctag

SEQ ID NO: 218548 - DNA, 2193 bp, synthetic construct
  misc_feature 1..2193: note = Description of Artificial Sequence: Synthetic coding sequence
  source 1..2193: mol_type = other DNA
atgttcagcgccctgaagaagttagtgggcagcgaccaggcgcctggacgcgataagaatataccagccggattacagtcaatgaatcaggctctccagcgccgtttcgccaagggtgttcagtataatatgaagattgtgatccggggagacagaaatactggcaagacagctctgtggcacaggctgcagggccgtccatttgtggaggaatacatcccaacccaagagattcaagtcacgagcattcactggtcatacaagaccaccgacgacatcgtcaaggttgaagtgtgggacgtggtggacaaagggaagtgcaagaaacgtggagacggtctgaagatggagaatgatcctcaagaggcagaatctgaaatggcccttgatgcagagttcctggacgtatacaagaattgcaacggtgtcgtcatgatgttcgatataacaaagcagtggacgttcaactatattctccgcgagctacctaaggtgcctacacacgtgcccgtatgcgtgctgggaaactatcgcgatatgggtgagcacagagtgatcctccctgatgatgttcgagattttatcgacaacctggattcaaggcctccaggttccagctactttcggtatgcggagtcttcaatgaaaaatagcttcggcttaaagtacctccacaagttcttcaacatcccattccttcaattacagagggagaccctgctgcgacagctggaaactaaccagttagatatggacgccactctggaagaattatcagtgcagcaggagacagaagatcagaattacggcatcttcttggaaatgatggaagccaggtcccgcggtcatgctagccccctggccgctaatggacagtcgccctcacctggctctcagtctcctgtggtacccgcaggggcagtatctactggttccagctcacccggaaccccccaacccgcacctcagcttcctctgaacgccgctcctcccagctctgtcccccctgtgcctccaagcgaagctctgcctcccccagcttgcccttctgcacccgctccacggaggtcaatcatttccaggttatttggcacttcacccgcaaccgaggccgcaccccctccgccagagcccgtacctgctgcagagggcccagcaaccgtgcaatctgtggaggattttgttccggatgacaggctagatcgtagcttcctggaggacaccacccctgctcgtgacgagaagaaggtgggggctaaagccgctcaacaggactccgactcggatggggaagccctaggcggaaatccgatggtcgcaggcttccaggatgacgttgaccttgaagatcagcctcgtggatccccgcctctgcctgctggcccagtacctagccaggacatcaccctgtccagcgaagaggaagctgaggtggccgctcccacaaaaggccctgcccctgcgcctcagcagtgcagcgaaccagaaaccaaatggagttctatccccgcatcgaagcccagacgaggcacggcaccaactcgcactgctgccccaccatggcccggtggcgtcagcgtccgcaccgggccagaaaaaagatccagtacacgcccaccagcagaaatggagcccggaaaaggggaacaggccagttcgtcggaaagtgatccagaaggcccaattgcagcacagatgctatccttcgtgatggacgaccccgacttcgaatccgaaggctcggatacacagagaagagccgacgattttccagtgagagacgacccgagcgatgttactgacgaagatgaagggccagcggaacctcccccacccccaaagctacccctccctgcgttcaggctgaagaatgacagcgatctgttcggtttgggccttgaggaagccggacccaaggaatcttccgaagaaggaaaggagggaaagaccccttccaaggaaaaaaagaagaagaagaagaaagggaaggaggaagaggagaaagctgctaagaagaaatccaagcataaaaagtccaaggataaagaggaaggaaaggaggagcgcagacggcgtcaacaaaggcccccaagaagcagagaacgcacagccgctgatgagctggaagctttccttggcggaggtgctcccggagggagacatccaggcggtggagactatgaggaactctag

SEQ ID NO: 218549 - DNA, 945 bp, synthetic construct
  misc_feature 1..945: note = Description of Artificial Sequence: Synthetic coding sequence
  source 1..945: mol_type = other DNA
atgttcagtgccctaaaaaagctcgtgggaagtgaccaagcaccaggcagagacaagaatatacctgccggattacaatcaatgaatcaggccttgcagcggcgattcgctaagggcgtccaatacaacatgaaaatagttattcggggtgaccgcaatacaggaaagaccgctctgtggcatagacttcaggggcgaccctttgttgaggagtacatcccaacccaggagatccaggtcacctcaatccactggtcttacaaaacaaccgatgatatcgtgaaggtcgaagtatgggacgtggtcgataaaggcaagtgcaagaaacggggtgacgggctgaagatggaaaatgacccacaggaagccgagagcgagatggcgctcgacgcagagtttctggacgtctataagaactgcaatggggtagtgatgatgttcgacatcactaagcagtggacgttcaattatattctgagagagctgcctaaggtgccaacccatgtgcccgtgtgcgtccttggcaactaccgagacatgggcgagcacagggtgatccttcccgacgacgtgagggattttattgacaatctggaccgtcctcctggctctagctactttcgctacgccgagagttctatgaagaacagctttgggctgaagtatttacacaaatttttcaatatccccttcctccaactgcagaaagatgtgcgtctggcccaggaacggggatgcgccgtggtgctagtctcagaggaagtgcgaatgccagctgggtgggattgttgttggggaaggctgggctggaaagagggcggttcccaaacctgccctgtgcctgcccttctggggaggcctttactccccgcagaaccttctccccaccattgggtggactacagtctcgagtcgagccccctgctgagttgttccataccctag

SEQ ID NO: 218550 - DNA, 1566 bp, synthetic construct
  misc_feature 1..1566: note = Description of Artificial Sequence: Synthetic coding sequence
  source 1..1566: mol_type = other DNA
atgttctctgccctcaagaaactcgtgggttcggatcaagcacctggccgtgacaagaacatccctgccggtctgcagtctatgaaccaggcgctccaacggaggttcgccaagggggtccagtataacatgaaaattgtgattaggggcgaccgcaacacggggaaaactgctctctggcaccgactgcaggggaggccatttgtcgaagagtacattcctacacaggaaattcaggtgaccagtatacattggtcctacaaaaccactgatgatatcgtgaaagtggaagtgtgggacgttgtggacaaaggcaaatgcaagaagcgcggagacggtctgaaaatggaaaatgaccctcaggaagcagagtccgagatggcacttgacgccgagttcctggacgtgtacaaaaactgtaatggcgtagttatgatgttcgatattactaagcaatggaccttcaattatattctccgtgagctgcccaaagtccccacccacgtgcccgtctgcgtgctcggtaattaccgggacatgggtgaacaccgtgttatactgcccgacgatgtgcgtgatttcatcgataatctcgactctcgccctcctggctccagctatttccgttacgccgaaagtagcatgaagaattctttcggcctgaagtacctgcacaaatttttcaatattcctttcctgcaacttcagagggagacacttctgaggcagctggaaacaaaccaactggatatggatgcaacattggaggaattgagtgttcagcaggagaccgaggaccagaactatgggatttttttggaaatgatggaagctcgatcgagggggcacgcttcacccctggcagccaatggacaaagcccgagccctgggtcccagtcaccggtcgtgcctgccggagctgtttcaacaggaagctccagtcctggcacaccacagcctgcccctcagctgcccctcaacgcagctccccctagctccgttcctcctgtcccgccatcggaggccttgccaccgccagcatgtccttctgctcccgctcccaggagatctatcatttctagaccgccaccttggggctggagattgcgtggcgcacttggacggagagggcagtggcccccatgggggggaggcagggcttgccattgtttgggaagacaccttcctctgtatcaccggctgtgccgttgcccagtggcagcagtgtgtgcctccgagctggaagaagccggtcactggtggagtcccggttgggccctccaggtgctcggcctccaggcacagtgtgagcctgctctgcaggaaggacggggacaactcgcctctgcccgtcttggcggacacccaggccctctcggcgcagagcctcccgtttttttacgggatgtgaccgaggctcaagaggggccagtgcgcgtatgcctgcaacggctaggcaggggtcgattagccgtcggctgcgccttgccaagacacctgcttgccctgagggctcacctaggacctcagcatgcctacggtagcgcctccgggagagaaccatag

SEQ ID NO: 218551 - DNA, 1845 bp, synthetic construct
  misc_feature 1..1845: note = Description of Artificial Sequence: Synthetic coding sequence
  source 1..1845: mol_type = other DNA
atggaaaatgatcctcaggaggctgaatctgagatggccctggatgcagagttcctcgatgtttataaaaactgcaacggggtagtgatgatgtttgacataacaaaacagtggacatttaattacatcctccgggaattgccgaaggtgcccacacatgtacctgtttgtgttcttgggaattacagagatatgggcgagcacagagttatactgccagacgatgtacgagacttcattgacaacttggatagaccccctggatcctcctacttcagatatgcggaatcctccatgaagaactcctttgggctcaaatacctgcacaagttcttcaatataccttttctgcaattgcagcgggagacactccttcggcagctggagaccaaccagttggatatggatgctacactggaggaactctcagttcaacaagaaactgaggaccaaaattacgggattttcctggaaatgatggaagcgaggagccgtgggcatgctagtcccctggccgcaaacggacagtccccctctccgggttctcagagccccgtggtccctgccggtgccgtgagtactggctcttctagccccggtactccgcaacctgctccccagctgccccttaatgcggcacccccttcctctgtgccacccgtgccaccctccgaggccctgcccccacctgcctgcccctctgctcccgctccgcgtcgaagcatcatcagcaggttatttggcaccagtcccgcaactgaggccgctccacccccacctgaacctgtgcccgctgccgaaggtccagcaaccgtgcagagcgtggaggattttgtaccagacgatcggctggaccggtctttcctggaggacaccacaccggctagggatgagaagaaagtgggtgccaaggctgcgcagcaggactcagactctgacggcgaagctctcgggggtaacccgatggttgcagggtttcaggatgacgtggatctcgaggaccaaccaagagggtctccacctctacctgcgggacccgtgccatcgcaggacatcaccttatcttcagaggaggaagccgaagttgcagcacctacaaagggcccagcgcctgcccctcagcaatgcagtgaacctgaaactaaatggagcagcatacctgcttctaagcccaggcgtgggacagcaccaacgcgcaccgcagcaccgccttggcccggaggcgtatctgtaagaacaggcccagagaaacggtctagcacaaggcctcccgctgaaatggaacctgggaaaggggaacaggcctctagctctgagagtgatcccgaggggccaatcgcagcacagatgttgagcttcgtaatggatgatccggactttgaatcggaaggttccgatacccaacggagggctgatgacttccccgtgagagacgacccttctgacgtgacggatgaggatgaaggcccagctgaacctccacctcccccaaagctgcctcttcctgcctttaggctgaaaaacgactctgatctttttggtcttggtcttgaggaggcgggtccaaaggagtcatctgaggaagggaaggagggaaaaacaccctcgaaagaaaagaaaaaaaaaaagaagaaaggcaaggaagaggaagagaaagcagcgaagaagaagtctaagcataaaaagagcaaggataaggaggaaggcaaagaagaacgcagaaggagacaacagaggccccctagatctagggagcgaaccgcggctgacgaactggaggccttcctggggggaggcgcacccggaggtagacaccccggtggcggagactacgaggagttgtag

SEQ ID NO: 218552 - DNA, 678 bp, synthetic construct
  misc_feature 1..678: note = Description of Artificial Sequence: Synthetic coding sequence
  source 1..678: mol_type = other DNA
tgagacgatattgtgaaggtcgaggtgtgggatgtggtggataaaggtaaatgcaaaaaacgaggagatggactgaagatggagaacgacccacaggaggcggagtcagagatggccttagatgctgagttcctggacgtctacaagaactgcaacggagtagtcatgatgttcgacattaccaagcagtggacttttaactacattcttagagagttgccgaaggtgccaacacatgttcctgtctgtgtgctcggcaattacagagatatgggagagcaccgggtgatactgcctgacgatgttcgagacttcatcgacaacttagaccgacctccgggaagctcttacttccgttatgctgaaagctcaatgaagaattcctttggactgaagtacctgcacaagttttttaatattcctttcctgcagctgcaaaaagacgtgcggctggctcaggagcggggttgcgcagtcgttctggtcagtgaggaagtcagaatgccggctggctgggattgctgctggggtagactgggctggaaagagggtggcagccagacatgtccagtaccggctctattgggacgtcctctgctccccgctgaaccgtccccccaccactgggtggattactctctggagagttctcctctcctatcctgcagcattccgtag

SEQ ID NO: 218553 - DNA, 1416 bp, synthetic construct
  misc_feature 1..1416: note = Description of Artificial Sequence: Synthetic coding sequence
  source 1..1416: mol_type = other DNA
atgaccgtgggcactgtgaagattgtcataaggggcgaccgaaacacaggcaaaacggcattgtggcatcggcttcagggaaggccgttcgtcgaggagtacataccaacacaggagatacaggtgacctccattcattggtcatataaaacaacagatgacattgtaaaagtcgaggtgtgggacgtagttgacaaaggcaagtgtaagaaacgaggcgacggtctcaagatggaaaacgatccccaagaggccgagtccgagatggctttggacgccgagttcttagacgtatacaagaactgtaacggagtggtcatgatgttcgacatcacaaagcaatggactttcaactatattctgagggaactgccaaaggtcccaacacatgtgcccgtgtgcgtcttgggcaactacagggatatgggcgagcaccgagttattctccccgatgacgtgcgggactttatcgacaacctagaccgtcccccaggaagttcatattttcggtatgcagaaagttccatgaagaactccttcggactaaagtatctccataagttcttcaatataccctttcttcaattgcagcgagaaactttgctccggcagctggagacaaatcaactcgatatggacgcaactctggaggaactgtccgtgcaacaggagactgaagatcaaaactatggaatcttccttgagatgatggaggcgagaagcagggggcatgcctcaccactggccgcaaacggacaatccccgagcccaggatcccagagccccgtcgtacccgcaggcgctgttagcacagggtcctcgtccccaggcacgccacaacccgcaccccagctgccacttaacgctgccccaccctcaagtgttccgcctgtgcctccttccgaggccctgccaccccctgcctgcccttctgctccggcacctcgaagatccatcatctcacggttattcggaacaagcccggctaccgaggctgccccaccccctccagagcccgtgcctgcagcagaggggcctgccaccgtccagtcggtggaggatttcgtgcccgatgacagactcgatagatcctttctcgaggacacaactccagcacgcgacgaaaaaaaagtcggggcaaaggccgctcagcaggattcggatagtgacggcgaggccctaggaggcaacccaatggtggccggtttccaggacgacgtggatctggaagatcagcccagaggcagtcctcctctgcccgctggccctgttccctcacaagatattactctatcatctgaggaggaagcagaagtcgcagcccctaccaaggggcctgctccagcaccccagcaatgcagcgaacctgaaacgaaatggtccggagaagcccaacagcatcaggccccttgttag

SEQ ID NO: 218554 - DNA, 1347 bp, synthetic construct
  misc_feature 1..1347: note = Description of Artificial Sequence: Synthetic coding sequence
  source 1..1347: mol_type = other DNA
atgtctcacagggcatggctggcccttctgccactggaggtggacggcgatgatggactctgtggcgctggcggacccgaacactcaggttcttcccagccacagcagcagcaacagagggccccttgccacttaagggcctccgggagaggccgaggtgcacgccttctcaccagactccttcctttcagttttttagagatgatggaggcccgttcccgtggacatgcctctccgttggctgcaaacggacagtccccatcccccggatctcagtcccctgtggtacccgcaggcgctgtttcaaccggctcctcctctccaggcacccctcagccagccccacagttacccttgaatgccgcaccgcctagttccgtgccccctgtgcctccttcagaagccttgcctccccctgcatgtccatccgccccagcgcctagaagatcaatcatatcacggctctttggaacctcgcctgccacagaagccgctcctcctccccctgagccagtacctgctgccgaaggcccagcaacagtccagtccgtggaggactttgtccccgacgaccgactcgaccgctccttcctcgaagataccacccctgctcgggatgaaaagaaggtcggagccaaggctgctcagcaggattcagatagcgacggcgaggcccttggaggtaatccaatggtggctgggttccaggacgacgttgacctggaggatcagcctcggggatcgccccctttgccggcagggccagtcccaagccaggacatcacgctcagctccgaagaagaagcagaggtggctgctccaacaaagggtccagctcctgctccacagcaatgctctgaaccggagaccaagtggtcctcaataccagcatctaagcctagacgcggtaccgccccaaccaggaccgctgccccaccatggcctggcggagtcagcgttcgcacggggcctgagaaaaggtcttctacgcgtccaccagcagagatggagccagggaaaggcgagcaagcttcttccagcgaatcagatccggaaggcccaattgccgctcagatgctatcattcgtcatggacgaccctgatttcgaatccgaagggtcagacacacaacgaagggccgatgattttccagtcagagatgatccatccgacgtgacagatgaagatgaagggcctgcagagcccccaccacctcccaagttgcccttacctgcgttccgactgaaaaacgactccgacctcttcggactgggactggaggaggccggacctaaggaatcttctgaagaagggaaagaggggaaaaccccctcaaaagaaaagtag

SEQ ID NO: 218555 - DNA, 648 bp, synthetic construct
  misc_feature 1..648: note = Description of Artificial Sequence: Synthetic coding sequence
  source 1..648: mol_type = other DNA
tagaagatcgttattagaggtgatagaaacactggcaaaactgctctttggcatagactgcaaggacgcccattcgtggaggagtacatcccgacacaggaaatccaggtgacttccattcactggtcatataagaccactgatgacatcgtgaaagtcgaggtgtgggacgtcgtagataaggggaagtgtaaaaaaagaggcgatggtctgaagatggagaacgacccccaagaagccgaaagcgagatggcgttggacgccgagtttctcgacgtatacaagaactgtaatggagtggttatgatgttcgatattacaaaacagtggaccttcaactacatcctccgagaactgccaaaagtccctacacacgtgcctgtgtgtgtcctcgggaactatcgcgacatgggcgagcaccgagttatattacccgatgacgtgcgggatttcatcgataacctggactctcgtccaccagggagctcttacttcagatatgccgagtcctccatgaaaaattcctttgggctgaagtaccttcataagttctttaacattccgttcctacagctccaagtgtccacacatcatgtagggtggtctggttgctggtcgctcacctcattccaagtgtcaccggtgtag

SEQ ID NO: 218556 - DNA, 336 bp, synthetic construct
  misc_feature 1..336: note = Description of Artificial Sequence: Synthetic coding sequence
  source 1..336: mol_type = other DNA
atgtattctagactcttctacctcaagtcctcctacattatttatttcgaacccctcttttctaacgcaattatcaacattctatctttcatcaacagcctagctagccctctcactattttttgcttcgccctgtctgcccaagcgctgagcacaattttttactttagaatctttattttcatattccactcctggatcctcctgtttcatttctattttacctgttcgttcaagacctacgaacaccagcacagcaaaatggtgcctgcgtaccgcatgcagtccccacgggcattgccacggacgtacctttacgtctggccatataagtag

SEQ ID NO: 218557 - DNA, 342 bp, synthetic construct
  misc_feature 1..342: note = Description of Artificial Sequence: Synthetic coding sequence
  source 1..342: mol_type = other DNA
atgaatttttacctgctcctggcaagtagtattctatgcgccctgatcgtgttttggaaatatagacgcttccaacggaacacgggcgaaatgagttccaattcaacagcattagcattagtgcgaccgtccagctctgggctgattaactccaataccgacaataatctggccgtgtatgatctgagcagggacatcctgaataactttccccacagcatcgcacgccagaaaagaattcttgtaaatctaagtatggttgagaacaagctggttgaactcgagcacacgctactttccaagggattcaggggcgcttctccacacaggaaatctacatag

SEQ ID NO: 218558 - DNA, 2853 bp, synthetic construct
  misc_feature 1..2853: note = Description of Artificial Sequence: Synthetic coding sequence
  source 1..2853: mol_type = other DNA
atgacctggcgcatgggcccacgctttaccatgctcctcgccatgtggctcgtgtgtgggagcgagccacaccctcacgctactatcagaggttcccatggaggtagaaaggtgccgctcgtgagtcctgatagttctagaccagccaggttcttgcggcataccgggcgttctcgcggtatagaacgatccactttagaggagcctaacctgcaaccactgcagcgaagaaggtccgtacccgtgcttagacttgcaagaccgaccgagccgccagcccgttcagatattaacggcgcagccgtcagacctgagcagaggcctgcagccagaggcagccctagagagatgatacgggacgagggtagctctgccaggtctcggatgttgcgatttccctcgggatcatcctccccaaacattttagctagcttcgccggtaaaaaccgagtctgggtgatatcagcccctcacgcatctgagggatactataggctgatgatgtcactattgaaggacgatgtctattgcgagctcgcggaaagacacatacagcagatcgtgctgtttcatcaggccggagaagagggcggtaaagttagaagaattacctctgagggacaaattctcgagcagccactggatccaagcttgatacccaaactgatgagctttttgaagcttgagaaggggaagttcggcatggtattgctcaagaagactttgcaggtagaagaacgatacccataccccgttcggttggaggcaatgtacgaagtgatcgatcagggcccaataaggaggatcgagaagattcgacagaaaggcttcgtacagaagtgcaaggcgagtggggtcgaggggcaggtggtggcagagggaaacgatgggggaggcggagccggacgaccatcgctgggttctgagaaaaagaaggaagatccacgaagagctcaggttcccccaacaagagaaagtcgtgtcaaagtcttgaggaagttggccgcaaccgctcccgctctacctcaacccccttcaactccccgtgcaactaccctgccgcctgcacctgccactacagtgacccgctctacctcgagagccgtcaccgtggcagccagaccaatgacgacaacagcttttcccacgactcaacggccttggacaccatccccatcccaccgtcctccaactacaaccgaagttattaccgctcgcagacccagcgtatctgagaacctttatccacctagtcgcaaagatcaacatagagagcggcctcagacaacccggaggccatctaaagcaacgtctttggagtccttcaccaacgcccctccaacaaccatctcagaaccaagcacgagggccgctggaccaggcaggtttcgtgacaaccgcatggatcggcgtgaacacggccaccgggatcctaatgtggtgcctggtccccctaagccagccaaagaaaagccacctaaaaagaaggcacaggataagatcttatcaaacgagtatgaggaaaagtacgacctgagtaggcccacagcctcacaactggaggatgagctgcaagtagggaatgtgcccttaaagaaggccaaagaaagtaaaaagcacgaaaagttggaaaagccggagaaagaaaagaagaaaaaaatgaagaatgaaaatgccgacaagctgctcaaatccgaaaagcaaatgaagaaaagcgagaaaaagtcgaagcaggaaaaggaaaaaagcaaaaagaaaaaggggggtaagacggagcaagacggataccaaaaaccgacaaataagcattttacccagtctcctaaaaaaagcgtagccgatctgttaggatctttcgaaggaaaaagacgcctgctcttgattacagctccaaaagctgaaaacaatatgtacgtgcagcagagagatgaatacctagagtccttttgcaaaatggctactcgaaaaatcagcgtgatcaccatttttggtccagtgaataattcaacgatgaagatcgaccactttcagctggacaacgaaaagcctatgagggtggtggacgacgaggatctcgtggatcagaggttgatctcagagctacgcaaggagtatgggatgacatacaacgacttctttatggtgttgacggatgttgatctgcgggttaagcagtattacgaagtgccaataacaatgaaatcagtgttcgacctgatcgacacctttcagtcaaggataaaggatatggagaagcagaaaaaggagggcatcgtgtgcaaagaggataaaaaacagtccctggaaaacttcctcagcagattccggtggcggagaaggctgctggtgatctctgctcccaacgacgaggactgggcttattctcagcagctgtctgcgttgtctggccaggcttgtaacttcgggctgagacacattaccatactgaagctcctaggagttggcgaggaagtcggcggtgtgttggaattgttcccgattaatgggagctccgtggttgaaagggaggatgtgccagcacatttagtgaaagatatccggaattattttcaggttagccctgagtatttctccatgctcctcgtcggcaaggatggcaatgtgaaatcatggtacccctcaccgatgtggtccatggtcatcgtgtacgacctcattgatagtatgcagctacgcaggcaggagatggccatccaacaatcattagggatgcgttgcccagaggatgagtatgcagggtatggataccactcttatcaccaagggtaccaggacgggtaccaggacgactaccggcatcacgaatcctaccaccacggatacccttattag

SEQ ID NO: 218559 - DNA, 744 bp, synthetic construct
  misc_feature 1..744: note = Description of Artificial Sequence: Synthetic coding sequence
  source 1..744: mol_type = other DNA
atgttgctcctcccgctgccattactgctctttctgctgtgcagtagagcggaggcgggagaaatcataggcggaaccgaatgtaagcctcactcacgcccttacatggcatacttggaaatcgtcactagcaatggacctagtaaattctgcggaggattcctaattcgcaggaattttgtcctgaccgcagctcattgcgccggaaggtctatcactgtaaccctcggggctcataatattactgaggaagaggatacctggcagaagttggaggtgattaagcaattcagacaccccaagtataacactagcactttacaccacgatataatgctgctaaagctaaaggaaaaggcatcacttacccttgctgtgggcaccctgccttttcctagccaatttaatttcgtccccccaggaagaatgtgtcgggtggccggatggggtagaacaggtgtcctgaagcctggatctgatacactgcaggaagtgaaacttaggctcatggacccacaggcctgttctcattttcgcgacttcgaccacaatcttcagctgtgcgtgggaaacccgcgtaaaaccaaatcagcctttaagggggacagtgggggtccattgctgtgcgcaggcgtggcccagggtattgtttcctacgggaggagtgacgcgaagcctcccgctgtcttcaccagaatcagccattatcgaccctggatcaaccagatcctccaggctaattag

SEQ ID NO: 218560 - DNA, 210 bp, synthetic construct
  misc_feature 1..210: note = Description of Artificial Sequence: Synthetic coding sequence
  source 1..210: mol_type = other DNA
atgctgggaataaccgtcctggccgctctcttggcctgtgctacaccaggcccaaccgtatggccatgggagcgcaccacatggcgttggaaaaccaagaaggacccatgcttgtgggtgtggactccatccacctcgaccagagacggcatgccttcttgttgtgccatgattttaccttccagcagtctccagagcatgtggagctag

SEQ ID NO: 218561 - DNA, 807 bp, synthetic construct
  misc_feature 1..807: note = Description of Artificial Sequence: Synthetic coding sequence
  source 1..807: mol_type = other DNA
atgttgggcattaccgttttggcggcactgctagcatgcgcctcctcgtgcggcgttccaagcttccccccaaacctgagcgcaagggtggtcgggggtgaagacgctcggcctcactcttggccatggcagattagtcttcagtatctcaagaacgatacatggcgacacacatgcggcggaacattgatcgcctcaaatttcgtcttaactgctgcacattgtatcagtaatactaggacctatcgggtggcagtagggaagaacaacctggaagtggaagatgaagaggggtcccttttcgtgggggtcgacaccatccacgttcacaaaagatggaacgccctcctcctgcggaatgatatcgccctaatcaaactcgctgagcacgtcgagctctctgacaccatccaggtcgcctgtcttcctgagaaagacagcctgctgcctaaagattatccctgttacgtgaccgggtggggtagactctggaccaatggaccaatcgcagacaagcttcagcagggattgcagcccgtggtagatcatgccacatgcagcagaatagattggtggggatttcgggtgaagaagaccatggtttgtgcaggaggagatggcgtgatttcggcctgcaatggcgattccggtggacctctgaattgccaactcgaaaacgggagctgggaggtgttcggcatagttagcttcggatcccgccgtggctgtaacactcggaagaaacctgttgtatacacaagggtgtcggcctacatcgattggatcaatgaaaaaatgcaactatag

SEQ ID NO: 218562 - DNA, 795 bp, synthetic construct
  misc_feature 1..795: note = Description of Artificial Sequence: Synthetic coding sequence
  source 1..795: mol_type = other DNA
atgttacttctgagcctgaccctatcgctggtgctcctggggtcttcgtgggggtgcggtattcccgctattaagcctgcactttcattcagtcaacgcatcgtgaatggggaaaatgccgtcctcggctcatggccttggcaggtgagcctgcaggatagtagcgggtttcatttttgcggcggtagcctgatttcacagagctgggtagtaactgccgctcactgcaacgtgtcgccagggagacatttcgtggtgctgggggagtacgaccgatcaagcaatgccgagcccctccaggtgctcagtgtttcccgcgctattacccacccatcctggaactcaactaccatgaacaacgatgttaccctccttaaattagccagccctgctcagtacacaactcggataagcccggtttgtctggctagctccaacgaagctctgacggaaggcctgacatgcgtgacaacaggttggggtcggctcagcggcgtcggcaacgtcacaccggcacatctgcagcaagtggctctgcccctggtcacagtgaatcagtgcaggcaatactggggctcctccattactgactccatgatatgtgccggtggagctggtgcttcctcctgccagggtgacagcggtggcccattggtttgccagaaaggaaacacttgggtgctgatagggattgtgtcatggggcacaaagaactgcaacgtccgagctcctgcagtgtacactcgcgtttcaaaattttcaacatggattaatcaggttatagcttacaattag

SEQ ID NO: 218563 - DNA, 795 bp, synthetic construct
  misc_feature 1..795: note = Description of Artificial Sequence: Synthetic coding sequence
  source 1..795: mol_type = other DNA
atgcttctcctctccctgacattaagcctggtgctgcttggcagttcctggggctgcggtattcctgccattaagccagctctcagcttttcacagaggatcgttaacggggagaacgctgttttgggctcatggccttggcaggtgtctctccaggactcatccggatttcatttctgtggaggcagcctgatttcccagtcctgggtggtgacagccgctcactgcaacgtgagtccaggcaggcattttgttgtgctgggcgaatacgatcggtcatctaacgccgagccccttcaagtcctatctgtgagtagagcgattacccacccatcttggaattccaccacaatgaacaacgacgtgactctcctgaagcttgctagtcctgcacagtatacaacgcgcataagtccagtttgtctcgcttcatctaatgaggccttgacagagggcctcacatgcgttaccaccgggtgggggcgactgtctggagtgggcaacgtgacgcctgctcatctgcagcaggtggccctcccattggtgactgtgaatcaatgccggcaatattggggcagcagcattaccgacagtatgatctgcgccggaggggctggagcctccagttgccaaggagactctggcggacctcttgtgtgccaaaagggcaacacttgggtcctgatcgggattgtgtcttggggtaccaagaattgcaatgtccgggcacctgccgtttacacgcgcgtgtctaagttttccacctggatcaatcaggtgatcgcctataactag

SEQ ID NO: 218564 - DNA, 792 bp, synthetic construct
  misc_feature 1..792: note = Description of Artificial Sequence: Synthetic coding sequence
  source 1..792: mol_type = other DNA
atggcgagcctgtggttgttgtcatgcttctctttggtgggtgccgcatttggatgtggcgtgcctgctattcaccccgtgctgagtggactctctagaattgttaacggcgaggacgccgtgccagggtcctggccgtggcaggtgtctcttcaagacaagactggattccatttctgcgggggatcactcatctctgaggattgggtggttactgccgctcattgtggtgtgcggacatctgatgtagtagtggcaggggaattcgatcagggttccgacgaggagaatattcaggtcctcaagatcgccaaggtgtttaagaatcccaaattttccatattgacagtgaataatgacattacactgctgaaattagcaacgccggctagattctcccagactgtctctgcggtgtgtcttccatccgctgatgacgacttcccggctggcactctgtgtgctacaaccggttggggcaagaccaaatataacgctaataaaactcccgataagttacagcaggccgcactgcctctcctttctaacgcagaatgtaagaaatcatggggaaggaggatcacggacgtcatgatctgtgccggtgcttcaggtgtaagcagctgtatgggcgacagtggcggacccctggtctgccagaaagacggagcctggacattagtggggattgtgagctggggctctgacacatgtagcacaagttctccaggcgtgtacgctagagtgaccaaactaatcccttgggtccagaagattctcgcagctaactag

SEQ ID NO: 218565 - DNA, 1119 bp, synthetic construct
  misc_feature 1..1119: note = Description of Artificial Sequence: Synthetic coding sequence
  source 1..1119: mol_type = other DNA
atggccgctccagtaccttgggcatgttgcgcagttctggctgcagcagccgcagtggtgtacgctcagcggcactcccctcaggaagccccacacgtgcagtacgagcggctgggatccgatgtcaccctgccgtgcggtaccgccaattgggacgccgcagtgacatggcgcgttaatggaacagacctcgcgcctgacttgttaaatgggtctcagctcgtgctgcatggattagagctaggccattccggcctttacgcctgctttcaccgggacagctggcaccttagacatcaggtgctgttacatgtaggtctccccccaagggaaccggtgctgagctgtcgcagcaacacctatccaaaggggttctattgttcttggcatctgcccaccccaacatatatccccaacacgttcaacgttaccgtcctacatggaagtaagatcatggtctgtgagaaggatccagcactgaagaatcggtgccatatcagatatatgcacctcttctcgactatcaaatacaaggtgagtattagcgtctctaacgctctgggccataatgcaacagccatcactttcgacgagttcaccatagtgaagccagatcccccagagaatgtcgttgcacgcccagtgccgagcaatccaaggcggctagaggtgacctggcagacaccctcaacatggccggacccagagtccttccctcttaaattctttctacgttatcggccactgatcctggaccagtggcagcacgtggaactatccgatgggaccgcccacaccatcactgatgcttatgcgggaaaggagtacattattcaggtggcggcaaaggataacgagatcggtacgtggtctgactggtcggtggccgctcatgccactccttggacggaggaaccaagacatctgaccaccgaggcgcaagctgccgaaactacaacatccaccaccagcagtttggcaccaccgccaactactaagatctgcgaccccggagagttaggctccggcggaggcccaagcgccccatttctggtctcagtcccaatcactttagccctggccgcagctgcggctaccgcgagcagtttattgatttag

SEQ ID NO: 218566 - DNA, 1119 bp, synthetic construct
  misc_feature 1..1119: note = Description of Artificial Sequence: Synthetic coding sequence
  source 1..1119: mol_type = other DNA
atggcagcccctgtcccttgggcgtgctgcgcagtgttagctgctgctgcggctgtggtttacgcccagcgccactcaccccaggaggcccctcatgtacagtacgagcgactcggaagcgacgtcacactgccctgtggcactgccaattgggatgcagccgtcacatggagggtgaacgggaccgatctggccccagatctcctgaatggatcccagttagtcctgcatggcctcgaattagggcactccgggctttacgcctgcttccatcgcgactcctggcatctaaggcaccaagtcctgctgcacgtagggctgcccccacgggaacctgtgctttcctgcaggtctaacacataccctaaaggcttctactgttcctggcacttgcccacgccaacctatatccccaacacctttaacgtcaccgtcctgcacggcagcaaaatcatggtttgcgaaaaagatcccgctctcaagaacaggtgtcacatcagatatatgcatctgttttccactataaagtacaaggtgagtatctctgtatccaacgccttggggcataatgccacagccatcacttttgacgaatttactatcgttaagccagacccacccgaaaatgtggtggcaagacccgtaccttctaaccctaggagactggaggtgacctggcagacccccagcacttggcccgacccagagtctttccccttaaagttcttccttcgctacaggccactgattctcgaccagtggcagcatgtagaactttctgacgggactgctcacaccataacagatgcgtatgctggcaaggagtacatcatccaagtagctgcaaaagacaacgagatcggcacctggagtgactggagcgtggcagcccacgccaccccctggaccgaggaacccagacatctcacgacggaggcacaggcggctgaaaccaccacctcgactacctcctctctggcaccaccaccaacgactaagatatgcgacccaggagaattagggtctggcggaggcccatcagccccattcctagtatcagtccctatcacactggccttagccgcagctgccgctacagcctcttcactgttgatctag

SEQ ID NO: 218567 - DNA, 771 bp, synthetic construct
  misc_feature 1..771: note = Description of Artificial Sequence: Synthetic coding sequence
  source 1..771: mol_type = other DNA
atggccgctcctgttccctgggcctgttgcgctgttctagcagcggcagctgctgtggtgtacgcgcagcgccattcacctcaggaagctccacatgtacagtacgagcgactggggagtgatgtcaccctcccttgtgggactgcaaattgggacgccgcagtgacgtggcgggtcaatggaactgacctagcgccagacctgctaaacgggagtcagctggtattacatggccttgaactcgggcacagcgggctgtatgcctgtttccacagagatagctggcacctgcggcaccaggtgctcctgcatgtcggattgccaccacgcgaacccgttctgtcttgccgttccaacacgtacccgaaaggcttttactgctcctggcatctgcctacacccacatacatccctaataccttcaacgtgactgttctgcacggtagcaaaatcatggtgtgcgaaaaagaccccgcactcaagaatcgctgccacatcagatacatgcatctattctctacgatcaagtacaaggtgtctatttcggtgtccaacgccttaggacataatgcaacagccatcacctttgacgaatttactatcgtcaaaccagacccacccgaaaacgtggtggcaaggcctgttcctagcaaccctcgcaggcttgaggtgacttggcagaccccctctacctggcccgatcctgaaagctttccactcaaattcttcctgcgataccgacctctcatcctggatcagtggcagcattag

SEQ ID NO: 218568 - DNA, 3909 bp, synthetic construct
  misc_feature 1..3909: note = Description of Artificial Sequence: Synthetic coding sequence
  source 1..3909: mol_type = other DNA
atggagttgtacttcggggaatatcagcatgtgcagcaggaatatggagtgcatctcagactggcttctgacgacacgcagaagagccggagcagccagaactctaaagcaggctcctatggggtatcgatcagagtccaggggattgatggtcatccctacatcgtgctgaacaacaccgagaggtgccttgctggtaccagcttttcggagaatgggcctccctttccccctccagtaattaataacctaccactccattcctccaacggtagcgtccctaaggaaaactcagaggagctccagctgccggaaaacccttatgcccagccatccccaatccgtaacctgaaacagccactgcttcacgagggcaaaaatggagtcctcgaccggaaggacggcagcgttaaacccagccatctcctgaatttccagaggcatccagaactgctgcagccctatgaccctgagaagaatgagctcaacctccaaaaccaccagccgagcgaaagtaattggcttaaaactctgaccgaggagggcattaataataagaagccatggacgtgtttccccaaacccagcaacagccagcccacatcaccctcacttgaagatcccgctaagtctggggtgactgcgatccggctatgtagttcggtggtgatcgaggatcctaagaagcagacctccgtttgcgtaaatgtgcagtcttgcactaaggagcgagtgggcgaagaagccctgttcacctccggcaggcctctgaccgctcatagccctcacgcccatcccgaaacaaaaaaaacccggcctgacgtgctaccttttcggaggcaggactcagctggcccagttctggatggggctcggagccgcagatcctcgagcagcagtacaactccaacatccgccaattcactgtaccgcttcctgcttgacgatcaggagtgtgcgatccacgccgacaacgtgaacagacatgaaaacaggagatacattcccttcctcccaggaaccggaagagacatagataccggctccattcccggtgtggaccagcttatcgaaaagtttgaccaaaaaccaggattgcaaaggagagggagatccggcaaaagaaaccgaattaacactgatgatagaaagcgcagcagatcggtggactcggcgtttcccttcggactgcagggcaacagcgagtatctcatcgagtttagccggaatctaggaaaatcctcagaacacctgttgcgaccttctcaggtgtgtccgcaacggccacttagccaggagagacgtggcaagcagtccgtgggaagaacatttgccaagctgcagggcgctgcccacggcgctagctgcgcacattccaggccaccgcagcccaacatcgatggcaaggtcctggagaccgaaggatcacaggaaagtacagtcattagagctccttcgctgggtgcacagtctaaaaaggaggaagaagttaaaactgcgacagctaccctgatgcttcagaacagggcaaccgccacctcaccagactccggcgctaagaagattagcgttaaaacctttcctagtgcgtctaacacacaggccacacccgacctcttgaagggccagcaagagctgacacagcagacaaatgaggaaacagctaagcaaattttatacaattaccttaaggaagggtccacagataatgacgacgctaccaaaagaaaggtaaatctggtgtttgagaaaatacagacacttaagtctcgtgccgctggctctgcccaaggcaataaccaggcatgtaactctacctccgaggtgaaagatctgctcgaacagaagagtaagttgacgatagaggttgcggaattacagcgccaattacagctggaggtcaagaatcagcagaatatcaaggaggagagagagcgcatgcgggctaatctagaagagctgcgaagtcagcataatgaaaaagtggaagagaatagcactctccaacagcgccttgaggagtctgagggggagctgagaaaaaacctcgaggagctatttcaagtgaagatggaacgtgagcaacatcaaaccgaaatcagggacctgcaagaccagctatcagagatgcatgacgagttagacagcgcgaaaagatccgaggacagggagaaaggtgccctcatcgaggagctgctgcaggccaagcaggacctgcaagacctgctaatcgcaaaagaggagcaggaagacctgcttcgcaaaagagagagggaacttactgctctgaagggcgcattgaaggaagaagtctcaagtcatgaccaggagatggacaagctgaaagagcaatacgatgctgagctgcaggccctccgtgaaagcgttgaagaagctaccaagaatgttgaggtgttggcgtcccgcagcaatacctcagagcaggatcaggccggtactgagatgagagtgaaattgctgcaggaagaaaatgagaaattacagggacgatctgaggagctggagcgacgagtagcgcaactgcagcggcagatagaggatttaaagggcgatgaagctaaagcaaaagagactctaaaaaagtacgagggtgagattcgtcagctcgaagaggccctcgtccatgcaaggaaagaggagaaagaggctgtaagtgctcgcagggctctcgagaatgaattggaggcagcccagggaaacttgtctcaaaccacacaggagcaaaagcaactcagcgaaaaactgaaagaggaaagcgagcaaaaagagcagctcaggaggctaaagaacgagatggagaacgagagatggcacctaggtaagacgattgagaagctgcaaaaggagatggccgacatcgtggaggctagcagaacgagtacactagaactgcagaatcagctggacgagtacaaggagaagaaccggagagagttggccgagatgcagcgccagctaaaggagaagactctagaggctgagaaaagccgccttaccgccatgaagatgcaggacgagatgagactaatggaagaggagctgcgcgattaccagcgggcacaggacgaagcactgacaaagcggcagcttcttgagcaaaccctcaaagatttggagtacgaactcgaggccaaatcccacttgaaggacgatcgaagccggctcgtcaaacaaatggaagataaagtcagtcagctcgagatggaactggaggaggaacgtaataactccgatcttctgagcgagcggatctcacgcagtagagaacaaatggaacagctgcgcaatgagctgctccaggagcgagccgcacgccaggatctcgaatgtgataaaataagcctcgaacggcaaaacaaagatctgaagagtcgcattatccacctcgaggggtcttacagatcgagtaaggaagggctcgtagtgcaaatggaagctaggatcgcagaactcgaggataggttagagtccgaggagagagacagagccaacctgcagctttccaatcgcaggctggagagaaaagtaaaggaattggtcatgcaagttgacgacgagcatttatctcttactgaccaaaaagatcagttgagccttaggctgaaagctatgaagaggcaggtggaggaggccgaggaagaaatcgatagactcgagagttcaaagaaaaaactacaacgagagctcgaagagcagatggatatgaacgagcacctacagggccaacttaacagcatgaagaaggacctccgcctcaaaaaactgccttcgaaggtcctggacgatatggatgatgatgacgatctgtcaacagacgggggttctctgtatgaggcgcctgtctcttacacgttcagcaaggacagtaccgtcgctagccagatttag

SEQ ID NO: 218569 - DNA, 2061 bp, synthetic construct
  misc_feature 1..2061: note = Description of Artificial Sequence: Synthetic coding sequence
  source 1..2061: mol_type = other DNA
atgggagagttcaaggttcacagagtgcgcttcttcaattacgtgcctagcgggatccggtgtgttgcctataacaaccagtctaatcgtttagccgtgtctcgcacggacggtaccgtcgagatatataatctgagcgcgaattacttccaggagaaattttttcccggtcacgagtcacgcgctacggaagctctgtgctgggccgagggacagcgccttttttcggccggtctaaacggggaaatcatggagtacgatctccaggccttgaacattaaatatgcgatggatgcattcggaggccctatttggtcgatggccgcaagtccctctggcagtcagctccttgttggctgcgaggatggctctgtgaagctgttccaaattactcccgacaaaatccagttcgagcgcaacttcgatagacaaaagagtcgaatcctgtccctgagttggcatcccagtggcacacatattgccgcaggtagtatagattacatcagtgtctttgatgtgaaaagcggttccgccgtgcacaaaatgattgtagatcgccagtatatgggcgttagcaagcgcaaatgcatagtgtggggcgtcgccttcttgtccgatggtaccataattagcgtggattccgccggtaaggtgcaattttgggatagcgccactgggactttagtgaagagccacctgatcgccaacgccgacgtgcagagcatcgctgtggccgaccaggaggatagcttcgtggtcggtaccgccgagggcacggtgtttcactttcaactggtacccgtgaccagtaactcttctgaaaagcagtgggtccggacgaagccgtttcaacaccacacccatgatgtcagaacggtggctcatagccccacagccctgatctccggcggaaccgacacccatctggtgttccgcccattgatggaaaaggtggaggtgaagaactacgacgcagctctgcgaaagatcactttcccgcaccgctgcctgattagttgcagcaaaaagaggcaactgcttctgtttcaattcgcccaccacctggagctatggaggctcgggagcaccgttgctaccggcaagaacggcgatactctgccactgtcaaagaatgccgaccatctgttgcatttaaaaaccaaaggtccagagaacatcatctgctcctgcatttcaccgtgtggcagttggatcgcgtatagcacagtctcccggttcttcctgtatcgcctgaactacgagcatgataatataagtctgaagcgggtttcgaagatgccagcctttctgcgctcagccctgcagatactattttctgaagatagtaccaagttattcgttgcctcgaaccagggcgctttacacattgtgcaactgagcggaggctcctttaaacatctccatgcatttcagccccagtcaggtacagtggaggccatgtgtttattggccgtgtctcctgacgggaactggctggcggcttccggcactagcgcaggcgtgcatgtgtataacgttaagcaattgaaactccactgtactgtgcctgcttataactttcctgtgacggctatggcgatagccccaaacactaacaacttagtaattgcgcactctgatcaacaggtgttcgagtactcgattcccgacaagcagtacactgattggtctcggacggtgcagaaacaaggctttcatcacttgtggctacagagggacaccccaattacgcatatcagcttccatcccaaaaggcccatgcatatactactgcacgacgcttatatgttctgcataattgacaaatcactgcctttaccaaatgataaaacactcctgtacaaccctttccctcccaccaacgaatccgatgttatccgtaggagaacagcgcacgcatttaagatatcaaaaatctacaaacccttgctcttcatggatctcctggacgaaaggacactagtggcagttgagaggccgctggatgacattattgctcagctgcctccgccaatcaaaaagaaaaaattcggaacctag

SEQ ID NO: 218570 - DNA, 1716 bp, synthetic construct
  misc_feature 1..1716: note = Description of Artificial Sequence: Synthetic coding sequence
  source 1..1716: mol_type = other DNA
atgggtgaatttaaagtccaccgggtcagattcttcaattacgtgcctagcggaataaggtgcgtagcttacaataatcagtcgaacaggttggctgtatcaagaacggacgggacggtcgaaatatacaatctgagcgcaaactacttccaggagaaattttttcctggccacgagtccagggccacagaggcactgtgttgggccgaaggccagcgactatttagcgcgggactgaatggcgaaattatggagtacgacctgcaggccctgaacattaagtacgctatggacgccttcgggggacctatctggtcaatggccgcatcaccaagcggttcacaattgctcgtgggctgcgaggacgggtccgtgaagttgttccaaattaccccagacaagatccagtttgagaggaatttcgacaggcagaagagccgcatacttagtttaagttggcaccctagtggaactcatatcgccgcaggctcaatagactatattagcgtgttcgacgtaaaatccggcagcgccgtccacaagatgattgttgatcggcaatatatgggggtgtccaaaaggaagtgtattgtgtggggcgtggctttcctgtccgatggtactataatttccgtagactcagccggtaaagtacagttttgggattccgccaccggtactctcgtcaagtcccacttaattgccaacgctgacgtgcagtcaattgctgtggccgatcaagaggacagcttcgttgtcggaacggcagaagggacagtttttcatttccagttggtccctgtgactagtaatagttctgaaaaacagtgggtgcggaccaagccattccagcaccacacgcatgacgttcggacggtggcccactcacctacggcgctgatttccggagggactgatacgcacctcgttttccggcctttaatggagaaggttgaagtaaaaaattacgacgctgccttacggaagattacattcccccatcggtgcctgatttcctgctcaaagaaacgccaactgctgctcttccagtttgcccaccatttagagctgtggcggctcgggtcaactgtagccaccggaaccgttgaggccatgtgcctgttagccgtcagtccagacggaaattggctggcagccagcgggacatcggccggtgtgcatgtatataacgtgaaacagctgaagctccattgcaccgtcccagcttataactttccagtgacagcaatggccatcgccccaaacaccaacaatctggtaatcgctcactctgatcaacaggtatttgagtactccatcccagacaagcaatacactgattggtcccgcaccgtccagaagcaaggttttcaccatctttggctgcaaagggacacccccattacacacatctctttccatcctaagcggccaatgcatattctgctacacgacgcctacatgttttgcataatcgataaatctctgcccttgcctaacgataagacactactgtataaccccttcccaccaacgaatgaatccgatgtgatccggagacggaccgcccatgctttcaaaatttcaaaaatttacaagcctttgctgttcatggacttgctggatgagcggaccctcgtggccgtcgagaggccattagatgacatcattgcccaactcccacctccgatcaagaagaagaagtttggcacttag

SEQ ID NO: 218571 - DNA, 1023 bp, synthetic construct
  misc_feature 1..1023: note = Description of Artificial Sequence: Synthetic coding sequence
  source 1..1023: mol_type = other DNA
atggccctcaggttgctgaggagagcagcgagaggagctgctgccgctgcattactcagacttaaggccagtctggccgcagatatccctcggctagggtatagttcaagctcacatcataagtatatccccaggcgcgctgtgctttatgtacctggaaacgatgagaagaagattaagaaaatccctagcctcaatgttgattgtgccgtattggattgcgaagatggagttgccgctaataagaagaacgaagcgcgacttagaatcgtgaaaaccctggaagatatcgacctgggtccaaccgaaaagtgcgtacgggtaaactcagtgtcatcggggcttgctgaggaagatttagagaccctgcttcaatcccgcgttctccccagcagtctcatgctgccaaaggtggagtcccccgaggaaatccagtggttcgctgacaaattttcctttcatttgaaaggtcgcaagcttgagcagccaatgaatttaattcccttcgttgaaactgccatgggactccttaatttcaaggctgtctgtgaggaaactctgaaggtgggcccacaggttggcctcttcctggatgctgtggtatttggaggagaagatttcagggccagcataggagcaacctcctctaaagagaccctggacatcctctacgctcgacagaagatcgtggtgatcgcaaaagcctttggactgcaagccatcgacctggtgtacatcgacttcagggacggggctggcctcctgcggcagagccgcgagggcgctgccatggggtttaccgggaagcaagttatccaccccaaccagattgctgtcgtgcaggaacagttctccccttccccagaaaagatcaagtgggcggaggagttaatcgccgctttcaaagagcatcagcagttgggaaagggcgctttcactttccagggcagtatgatcgacatgcccctgctgaaacaggctcagaacaccgtcaccctcgcgaccagcataaaagaaaagtag

SEQ ID NO: 218572 - DNA, 921 bp, synthetic construct
  misc_feature 1..921: note = Description of Artificial Sequence: Synthetic coding sequence
  source 1..921: mol_type = other DNA
atggcactgcggctattgcgaagagccgctcgcggagctgccgcagctgctctgttaagactgaaagcttctcttgccgcagatattccacgactgggctactcatcgtccagtcatcacaaatacattcctagacgagcagtgctgtacgtccccggaaacgacgagaagaagattaagaaaatcccctccctgaacgtcgactgcgccgtcttggactgtgaggacggggtggccgctaataaaaaaaacgaggcaaggcttcgtattgtaaaaaccctggaagacatcgatcttgggccaactgaaaagtgtgtccgggtcaattccgtgtcctccggattagctgaggaggacctggaaactcttctccagtcacgagtgctgccctctagtctcatgctccccaaggttgagagccccgaggagatccagtgggccgtctgtgaagagacattgaaagtcgggcctcaggtgggactgttcctggatgcggtggtatttggaggagaagacttccgcgcatctattggagccacctcttcgaaagagacgttagacatcctttatgctcggcagaagattgtggttatagcgaaggcattcggattgcaggccatagatctcgtgtacatcgacttccgggacggcgctggtctgctgaggcagtcccgggagggagctgcaatggggttcacaggaaaacaggtgattcacccgaaccaaatagccgtggtccaggagcagtttagcccaagcccagagaaaataaaatgggcggaagaactgatagccgctttcaaggagcaccaacagcttgggaaaggcgcattcacatttcagggaagtatgattgacatgccactgctgaagcaggcacagaacacggtgaccctggccacctctatcaaagaaaagtag

SEQ ID NO: 218573 - DNA, 921 bp, synthetic construct
  misc_feature 1..921: note = Description of Artificial Sequence: Synthetic coding sequence
  source 1..921: mol_type = other DNA
atggctctgaggttgttgcgcagggccgctcggggtgccgctgctgccgcacttttaaggctaaaggctagtcttgccgcagatattcctcggctgggttatagttcatctagccaccacaagtacatacccagacgtgccgtgttgtacgtgcccggaaacgacgagaagaagataaaaaagatccccagtctgaacgtggactgcgcagtgctagattgtgaagatggcgttgcagccaacaaaaagaacgaggcaagactgcggatcgtcaaaaccctagaggacatcgaccttggacctactgagaaatgcgtccgcgttaacagcgtgtcgagcggcctcgccgaggaggacctggaaaccctcctacagagtagggtgttgccaagctcactgatgctgcccaaggtcgagagccctgaagagatccagtgggccgtgtgcgaggagactctgaaagtgggccctcaggtgggtctatttctcgacgccgtggtattcggaggagaggactttcgcgcttcaattggggcaacatcgagcaaggagactcttgatattctttacgctagacagaaaatcgtggttattgctaaggcattcggtcttcaggccatcgatctggtgtatattgattttcgggatggagctggactgctgcgtcagtccagggaaggagcagcgatgggattcacaggaaagcaggtgatacaccctaaccagattgctgtcgtccaggaacagtttagtcctagcccggagaaaattaagtgggcagaggagctaatcgccgcatttaaggaacaccagcagctgggtaagggtgcctttacgtttcaaggctcgatgattgatatgcccctgctaaaacaggcccaaaacactgtcactcttgcaacttcaatcaaggaaaaatag

SEQ ID NO: 218574 - DNA, 1023 bp, synthetic construct
  misc_feature 1..1023: note = Description of Artificial Sequence: Synthetic coding sequence
  source 1..1023: mol_type = other DNA
atggccctaaggctcttgagacgggctgctagaggggctgcagctgccgcactactgcgcctcaaggcttctttagccgcagacattccgcgattaggttactcttcttctagtcaccataaatatatcccccgacgggcagtactttatgtacccggaaatgacgagaagaagataaaaaaaattcctagccttaatgtggattgcgctgttctggactgtgaggatggggttgcggcaaacaagaagaacgaagcccgactccgcatcgtgaagactctagaagatatcgatctgggaccaacagaaaagtgtgtgagggttaatagcgtgtcctccgggctggccgaagaggacctggagaccctgttacagtctcgggtgttacccagcagtctaatgcttcccaaagtagagtcccctgaggaaatccaatggtttgcggacaagttttcattccacctcaaaggcagaaagctggagcagcccatgaacctcattccctttgtcgaaactgctatgggcttactgaatttcaaggctgtatgtgaggagacactgaaggtagggccacaggtcggactcttcctggacgcagtcgtcttcgggggagaagacttccgcgcttccatcggggcaacatcctcaaaggaaacgttagatatcctgtacgcccgacagaagatagtggtgatcgccaaggcattcgggcttcaggcgatcgatctggtgtacattgactttagagatggggctggcctgttgagacagagtcgcgaaggagccgcaatggggttcacaggaaagcaagtaatccaccccaatcagattgccgttgttcaggagcaattttcgccatcacctgagaaaataaagtgggccgaagagttgatagccgctttcaaggaacaccagcagctcggcaagggcgcatttaccttccagggaagcatgattgacatgcccttactcaagcaggcccagaatacggtgaccttggcgacctcaatcaaggagaagtag

SEQ ID NO: 218575 - DNA, 546 bp, synthetic construct
  misc_feature 1..546: note = Description of Artificial Sequence: Synthetic coding sequence
  source 1..546: mol_type = other DNA
aacgaggcgagactgcgcatcgtgaagaccctcgaggacatagatttaggtccgaccgaaaagtgcgtgagagtaaatagcgtgagtagtgggctggcggaggaagacctagagaccctcctgcagtcccgggtcctcccttcatccctgatgctgccaaaagtggagtcacccgaggagatccaatggttcgccgacaaattttcttttcatctgaaaggaagaaaactggagcagccaatgaatctaattcccttcgtcgagacagccatgggcctactgaatttcaaagccgtgtgtgaagaaacgttaaaggtcgggcctcaggtcggcctgtttctcgatgccgtggtgttcggtggggaagatttccgggcatccatcggggtgaaggatatcagtctcagcctgttcctgtgtgtttgcgtttatatgtgcgtatacatctttagtttaccattaaaggatggccatctacacaacaacgtgtatctccccactatgaccatggtgttccatgataacggaatggatacaacttcctag

SEQ ID NO: 218576 - DNA, 312 bp, synthetic construct
  misc_feature 1..312: note = Description of Artificial Sequence: Synthetic coding sequence
  source 1..312: mol_type = other DNA
ctgcaggccattgacctggtctacatcgatttcagggatggggcaggactgctgcgccagagtcgcgaaggggctgccatggggtttacaggaaaacaggtgatacaccctaatcagatcgcggttgttcaagaacaattttcccctagccctgaaaaaataaagtgggcagaagagcttattgcggcttttaaggaacaccagcagctgggtaaaggcgcatttacttttcagggttcaatgatcgacatgccactattgaaacaggcacaaaatacggtaacactcgccacctcgatcaaggagaaatag

SEQ ID NO: 218577 - DNA, 270 bp, synthetic construct
  misc_feature 1..270: note = Description of Artificial Sequence: Synthetic coding sequence
  source 1..270: mol_type = other DNA
gaggaactgatcgcggctttcaaggagcaccagcaactgggaaaagtggggcgatattgctgcagctggctgtgtattcagcctttcccaagcagcccaggccaaagatctcagagcatttccagggtgcccggtcgctactgggtccttggggctaggtcctgggagtccaagggagcctttacctttcagggatccatgatcgacatgcctctgttgaagcaggctcagaatactgtgactctggccactagcatcaaggagaagtag

SEQ ID NO: 218578 - DNA, 444 bp, synthetic construct
  misc_feature 1..444: note = Description of Artificial Sequence: Synthetic coding sequence
  source 1..444: mol_type = other DNA
aatgaggcacggctccggatcgttaagacgctcgaggacatagatctcggcccaaccgagaaatgtgtgagagtaaattcggtgagttctggcctggccgaagaggacttagaaacgttgctgcaatctagggtgcttccgtcgtctctgatgttgcctaaggtggagtcgccggaggagatacagtgggcagtctgcgaggaaacgctgaaagtcgggccacaggtgggtctgttcctggacgctgttgtgtttggaggtgaggactttagggcttccattggggtaaaggacatttcattaagtctgttcctgtgcgtttgcgtgtacatgtgcgtgtatattttttcacttcctttgaaggacggccacttgcataacaatgtgtatcttcctacaatgacaatggtgtttcacgataatgggatggacaccacgtcgtag

SEQ ID NO: 218579 - DNA, 909 bp, synthetic construct
  misc_feature 1..909: note = Description of Artificial Sequence: Synthetic coding sequence
  source 1..909: mol_type = other DNA
atggcgctgcgactgctcaggagagctgccagaggcgctgccgcagccgctctgttgaggctcaaggcgtccttagcagctgatattccaagactgggctattccagctctagtcaccacaaatacattcctcgccgagctgtattatacgtgccaggcaacgacgagaaaaagattaagaagatcccgagcctgaacgtggactgtgccgttctggattgcgaagacggcgttgccgcaaacaaaaagaacgaagcacgccttagaattgtcaaaaccctcgaagatattgacttgggaccaacagagaaatgtgtgcgtgttaactccgtgagctcaggactcgctgaggaagatttagagactttactgcagtcgagggtcctgcccagttcccttatgctgccgaaagtggagtcacctgaagagattcagtgggccgtgtgcgaggagaccctcaaggtgggaccacaggtgggtcttttcttggacgccgtcgtattcgggggagaagattttagggccagcattggggcaactagttccaaggaaactcttgatatactatatgcccgacaaaaaatcgtggtgatagccaaggccttcggtctgcaggctattgatcttgtttatattgatttccgggatggggctggtctcttgcgccaatcgcgggaaggggctgctatgggattcacgggaaaacaagttattcacccaaatcagatcgccgtggtccaggagcagttttccccttcccccgaaaaaattaaatgggccgaggaattaattgccgctttcaaagagcaccagcagttgggaaagacagtttcttgctccgcgtcccaagctggggtgcagtggagagacctcggaagtcttcagcccccaccaccgggattcaaatag

SEQ ID NO: 218580 - DNA, 1401 bp, synthetic construct
  misc_feature 1..1401: note = Description of Artificial Sequence: Synthetic coding sequence
  source 1..1401: mol_type = other DNA
atggcgctgctcaccgctgctgcgaggctgctaggaactaaaaacgctagttgcctggtcctcgctgcacggcatgcctctgctagttctaccaacctgaaggatatcctggccgacctcataccaaaagaacaagccagaatcaaaacctttagacagcagcatgggaaaacggtggtagggcaaattacggtggatatgatgtatggcggaatgaggggcatgaaaggtctggtatatgaaacttctgtgcttgaccctgatgagggaatacgcttccggggattcagcatacccgagtgtcagaagcttttgccaaaggctaaaggcggtgaggaacctctccccgagggattgttttggctgcttgttacaggtcacattcctactgaagaacaggtgtcctggctctcaaaggagtgggccaagagagccgctctcccaagccatgttgtgaccatgctggacaacttccctaccaatttgcacccaatgtcacagctgagcgccgctgtgaccgcccttaatagtgagtcaaattttgcaagagcctatgcacagggtatatcccggacaaagtattgggagcttatttacgaagattctatggatctcattgctaaattaccttgcgtggcagccaagatctacagaaacctgtatagagagggcagtgggattggcgctatcgactcaaatctcgactggtcccataattttaccaatatgcttggctacaccgatcatcagtttacagaacttacaaggctatatctgactatccactcagatcacgaagggggaaacgtctcagctcatacatcccaccttgtaggcagtgccctcagcgacccgtacctgtcattcgccgcagcgatgaacggattggcgggacccttacacggtctcgcaaaccaggaggtcctggtctggctgacccaactgcagaaagaggtggggaaggatgtttcagacgagaaactgagagattatatttggaatacccttaactctggacgtgttgtgccaggatatggacacgcagtgttaaggaaaactgatcccagatacacgtgccagagggagtttgctctcaaacacctgccgaacgaccctatgttcaagctcgttgcgcagctctataagatcgtgcccaacgtcctcctggagcaggggaaagccaaaaatccgtggcccaatgtcgatgcccactctggggtgctgttgcagtattacgggatgacagagatgaactactatactgtgctcttcggcgtgagtcgggcactgggtgtgctggcccagctgatttggagtcgcgcactgggctttccattagagcggccaaaatcgatgtcaaccgagggcctgatgaagttcgtcgacagcaagtccggctag

SEQ ID NO: 218581 - DNA, 537 bp, synthetic construct
  misc_feature 1..537: note = Description of Artificial Sequence: Synthetic coding sequence
  source 1..537: mol_type = other DNA
atggcactgctcaccgctgcagcgcgacttctcgggactaagaacgctagctgtcttgtgctggcagcgcgtcatgcctcagcttctagtacaaatcttaaagatatcttggcagatctcatccctaaagaacaagcccgaatcaaaacatttagacagcagcatggtaagacagtggtggggcagattacagtggatatgatgtacggtggtatgaggggtatgaagggcctcgtgtacgaaacctctgtcttggatcccgacgagggcatccggtttaggggattttctattcccgagtgccagaaacttctgccgaaggcaaaaggaggtgaggagccactgcccgagggacttttctggttactggtcacaggccacataccgacagaagaacaggtaagctggctgtccaaggagtgggccaagcgtgctgcactccccagtcacgtcgtgaccatgctcgacaacttccccactaacctgcacccgatgtcacagctttccgccgctgttaccgccttgaactccgaatag

SEQ ID NO: 218582 - DNA, 6084 bp, synthetic construct
  misc_feature 1..6084: note = Description of Artificial Sequence: Synthetic coding sequence
  source 1..6084: mol_type = other DNA
atgctgaaattcaagtacggagctcggaatccactggatgcaggtgcagcagaaccgattgccagtagggcatctcgcctgaatctgttttttcaggggaagcccccatttatgacccagcagcagatgtcgccactgtctagggagggaatactcgatgctctgtttgtactattcgaggagtgcagccagcccgctctgatgaagattaaacacgttagtaatttcgtgcgaaagtactccgatacaattgccgagctccaggaactgcaaccgtctgcgaaagactttgaagtgagatctctggtaggatgtgggcattttgcagaagtccaggttgtaagggaaaaggctaccggtgacatctacgcgatgaaggtgatgaaaaaaaaagcgctgctcgcacaggaacaggtcagtttcttcgaggaggagagaaacattctgagccggtctacttccccttggatcccccagctacagtatgctttccaggacaagaaccatctatacctagtgatggagtatcagcctggtggggatctcctgtcgctgttaaacaggtacgaggatcagctagacgaaaacctgattcagttctacttggcagagttaattctggccgtgcattcagtccatctgatgggttatgtacatcgagatataaagcctgaaaacattcttgtggatcgcacaggtcacataaaactggtggatttcgggtcagcagccaaaatgaattctaacaaaatggtgaacgcgaagcttcctatcggcacccctgattatatggcacccgaggtcctgactgttatgaacggagacggcaaggggacgtatggtctcgactgtgactggtggtcggtgggagtaatcgcctacgagatgatctacgggagatctcccttcgctgaggggacttccgcacgcaccttcaataacatcatgaattttcagcggttcttgaaattccccgatgaccccaaggtttcctctgatttcctggacctcattcagtccctgctgtgcgggcagaaagaaaggctcaagttcgaaggcttatgttgccacccgtttttctctaaaatcgactggaacaacattcgaaactctccccctccattcgtgcctacactaaaatctgacgatgatacttctaacttcgatgagccggaaaaaaactcttgggtctcctccagcccctgccagctttccccttccgggttctccggggaggagctgccttttgttgggttctcttatagtaaagccctggggattcttgggaggtccgaatctgtggtatccggattggactctccagcaaagaccagttccatggagaaaaaactgctgatcaaatctaaagagctgcaggactctcaggacaagtgccataagatggaacaggaaatgacgcggctgcaccggagagttagcgaagtcgaagccgtgctgtcacagaaggaggtcgagctgaaggctagcgaaacacagaggagcctgcttgagcaggacctggctacatacattacagagtgctcatcacttaaacggtcactggagcaggcgagaatggaggtttcgcaagaggatgataaggccctgcagttattgcacgacattcgagagcagtctcgcaagttacaggaaattaaagaacaggagtatcaggcacaggtggaggagatgagacttatgatgaaccagctggaagaggatcttgtgtctgcacgtaggcggagtgatctctatgaatccgagcttagagagagcaggctggccgcagaggagtttaagcgcaaggcaacagaatgccagcacaaacttctcaaagcaaaagatcagggcaagcctgaagtaggagagtatgcaaagctggagaagatcaatgctgagcagcagctcaaaatccaggagttgcaagagaaattggagaaagcagttaaggcctccacggaggcaacagaactcttgcagaatataaggcaggctaaggagcgggctgagcgcgagctggagaagttgcaaaatcgtgaggattcgtcagaagggataagaaagaagctagtcgaagcagaggagttggaagagaaacaccgggaggcccaggttagcgctcagcatcttgaggtgcacctcaaacagaaagagcagcactacgaagagaaaatcaaagtgctggataaccagattaagaaggacctggccgataaggaaacgctggagaacatgatgcagcggcacgaagaagaggctcacgagaagggaaagattctgagtgaacagaaggcgatgattaatgcaatggattccaaaattagatccctggagcagcgcatcgtggagttgtcagaagcaaataagctcgcagctaatagcagcctgttcacccagcgtaatatgaaggcccaggaagagatgatttctgaactcagacagcagaaattttatctggaaacccaagcaggtaaactggaggctcaaaatcgaaaattggaggaacaactagagaagattagccaccaagatcactcagataaaaacagactgctcgaactggaaacacgtttacgcgaagtgtcactcgaacacgaagagcagaaactggagcttaaaagacagctgacggagctgcagctgagtctccaggagagggaatcacagcttaccgctcttcaggccgcacgcgctgctctggaatctcagctgagacaggcgaaaaccgaacttgaagagactacagccgaggctgaggaggagatccaggccctcaccgcgcacagggatgaaatccaacggaagtttgacgccctcaggaattcctgtactgtgatcacagacctcgaggaacaacttaatcaactgactgaagacaatgcagagcttaataatcaaaatttctacctttctaagcagcttgatgaggcctccggtgccaatgatgagatcgtacagcttcgatctgaggtggaccatttgaggagagaaatcaccgagagggagatgcagctgacctctcagaaacagacaatggaggctctgaaaacgacatgtacaatgcttgaagaacaggtgatggacctcgaagcactgaacgacgagctgctagagaaagagcgtcagtgggaagcctggcgatcagtcttaggagacgaaaaatcccagttcgaatgccgtgtcagagaattgcagcgcatgttagatactgagaagcagtcccgagcccgagccgatcagcgaattactgagtcacggcaagtcgtcgaactggccgtaaaggaacataaagccgagattttagccctacagcaggccctgaaagagcagaaactgaaggcagaatctctgtctgataaactgaatgacctggaaaagaagcatgccatgctagagatgaacgcaagaagcctgcaacagaaactggagaccgagagagagctgaagcagagactgttggaagagcaggcaaagttgcagcagcagatggacctccagaaaaatcacatcttccgactgactcagggcctgcaggaagccctcgatcgggcagatctgctgaagacagagcggtccgatctggagtaccagctcgaaaatatacaagttctgtactcccacgaaaaggttaaaatggagggaacaatcagtcagcaaaccaaactgatcgattttctgcaggcaaaaatggaccaacctgccaaaaagaagaagggcctgttttctaggcgcaaggaagacccggcattaccaacccaggtgccactgcagtataatgaactgaagctggccctggaaaaagagaaggcccgatgtgctgagctagaggaagcgctccagaagactcgaatcgagctacgctccgcccgtgaagaggctgcccatagaaaggcgactgatcacccacacccatcgacacctgccactgccaggcaacaaattgcaatgagcgctatcgtgcggtcgcccgagcaccagccctcagccatgtccctcctggctcccccttcatccaggcggaaggaatcctctacccctgaggagttcagcaggcgactcaaggaacgcatgcaccacaatatccctcaccgtttcaatgtgggtctgaatatgagagccactaagtgcgccgtttgcctcgacaccgttcatttcgggagacaggcctctaaatgccttgagtgccaggtgatgtgtcatcccaaatgctctacatgtctgcccgcaacctgcggactgcccgcagagtatgctactcattttaccgaggcgttctgtagagataaaatgaactcccctggcctgcagacaaaagagccatcttcttcactacacttagagggatggatgaaagtcccgaggaataacaaaagaggccagcaagggtgggatagaaaatatattgtcttggagggtagtaaagtattgatctacgacaatgaggcccgagaggccggacaacggccagtggaggaatttgagctctgtctgccagacggtgatgtatcaatccacggggctgtaggcgcaagcgaactcgccaataccgcaaaagccgatgtgccctacatactgaaaatggaaagtcatcctcacaccacatgctggccaggtcggacactctatcttctggcaccctcattcccagataaacagaggtgggtgaccgctctagagtcggtggtggccggaggaagagtgtcgagggaaaaagcagaggccgatgctaagcttttggggaattcactcctgaagctggagggtgacgataggctggatatgaactgtactctaccattcagtgaccaggtggtactggtgggtacggaagaaggcctatacgctctgaatgttctgaaaaatagtcttacacatgtccccggtataggtgcggtgttccagatctacatcatcaaagatttagaaaaattgcttatgatcgctggcgaggagagggccctctgtctggtggacgttaaaaaggtgaaacagtccctggcacaatcacatctgcctgcccagccagatatctctccgaacatcttcgaagctgtgaagggctgtcacctgtttggcgcagggaaaattgagaacggcctgtgtatctgcgcagccatgccaagcaaagtggtaatcctcaggtataacgagaacctgtccaaatattgcatccgaaaggaaatcgaaacgtctgagccctgttcttgtattcacttcaccaattacagcattttgattggcacgaataaattctatgagatcgacatgaagcagtacaccttagaggagttcctcgacaaaaatgaccactctcttgccccagcagtgttcgccgcaagcagtaatagcttccctgtttccattgtacaagttaacagcgctggccagcgtgaagaatacctactctgtttccacgagttcggagtctttgtggattcctatggtcgcaggtcccgtactgacgaccttaaatggagcaggctgcctctagctttcgcttacagggagccttacctttttgtaacacattttaattctctcgaggtgattgaaatccaggccaggtcaagtgcgggtacgcctgcccgagcatacctggatatcccaaaccctagatacctcggcccagctatcagctcaggagctatctacctcgcatccagctatcaagacaaactccgcgtgatttgttgcaagggcaatttggtaaaagaaagtggaaccgaacaccacaggggaccttccacatcgaggagttcccctaataaacggggtcccccaacatacaacgagcatatcacaaaacgcgtcgctagcagtcctgccccaccagagggtccaagccatcccagagaaccgagcactcctcacaggtatagggagggccgaacagaactgcgcagagacaagagtccaggtcggccactggagcgcgaaaagagccctggcaggatgctgagtaccagacgagagagaagtccaggacggctgtttgaagactcctcacggggacgcctgcctgcaggtgctgtccggaccccacttagtcaagtcaacaaagtgtgggaccagtccagtgtttaa

SEQ ID NO: 218583 - DNA, 6209 bp, synthetic construct
  misc_feature 1..6209: note = Description of Artificial Sequence: Synthetic coding sequence
  source 1..6209: mol_type = other DNA
atgctgaagtttaaatatggggctcgaaatcccctggatgccggtgcggcagagccaatcgcaagcagagcatcacggctgaatctgttcttccagggaaaaccaccctttatgacacaacagcagatgagtcccctgtcccgcgaaggtatacttgatgcactgtttgtgctgtttgaggagtgtagccagccagctctgatgaaaattaaacacgtcagcaactttgtgcgaaaatactccgacactatcgcagagctacaggagctgcagccttccgcgaaagactttgaagtccgcagtctggtcgggtgcggacactttgcagaggtgcaggttgtacgcgaaaaggcaactggtgacatttatgccatgaaggtgatgaaaaagaaggcgctcctggctcaggaacaagtgagtttttttgaggaggaacgaaacattctgagccgctctacctccccctggattccccagttgcagtacgcctttcaagataagaatcacctatacttggttatggaatatcagccaggaggtgacctgctgtcactcctgaatcgctatgaggaccagcttgatgagaacctgattcaattctatctcgccgaactgattctggcagtccattctgtgcatttgatgggatacgttcacagggatatcaaacccgagaatattctggtggatcgcacggggcacatcaagcttgtcgactttgggtctgcagccaagatgaactctaacaaaatggtaaatgccaagctaccgatcggcacccccgactatatggccccagaggtccttacggtcatgaacggcgacgggaaggggacgtatggtctggattgcgactggtggtctgtgggggtaattgcctacgagatgatctatggacgatcaccttttgccgaaggaacatccgccagaacgttcaacaatattatgaatttccagcggttcttgaagtttcctgatgacccgaaggtcagttccgatttcctagacctgatccaatctctcttgtgtgggcagaaggaaagactgaaattcgagggcttatgttgtcaccccttcttcagcaagatcgactggaacaatatccgcaacagccccccacctttcgtgccaacgctcaaaagtgacgatgatacttctaattttgatgagcccgaaaaaaacagttgggtgagttcttcaccgtgccaacttagtccgtctggcttttccggcgaagagctcccttttgtggggttttcctatagtaaggcactgggaatccttggcaggtccgagtccgtagtgtccgggctggactcacctgccaagactagctccatggagaagaagttactgatcaaatccaaggagctgcaagacagccaggataaatgtcataaaatggagcaggagatgacacggctgcacaggagggtttcagaagtggaagctgtgctgagccaaaaagaggtcgaactgaaagcctctgagactcaaaggagcctcctggagcaggatctagccacatatattactgagtgctctagtctgaagcgcagtctcgaacaggcacgaatggaggtgtcacaggaagacgataaggccttgcagctgctacacgatatccgggagcagagtaggaagctgcaggaaattaaggagcaggaatatcaggcgcaggtggaagaaatgagacttatgatgaatcagcttgaggaggatctcgtgtccgcaaggagaagaagtgatctatacgagtctgagctgcgggaatcccgactggcagccgaggagtttaaaagaaaagcgaccgaatgccagcacaaactgctcaaagctaaggaccaagggaagccggaagtgggcgaatatgccaagcttgaaaaaattaatgccgaacaacagctcaaaatccaggaattgcaagagaagctagaaaaggccgtgaaggcttcaaccgaggccacagagctgctccagaatattcgccaagccaaggaacgcgcagagcgggagcttgaaaaactccagaaccgggaagactcgtctgaggggatcaggaagaaactcgtggaggctgaggaacgaagacattccctggagaacaaggtcaagaggctcgagacaatggagagacgcgaaaaccgccttaaagacgatatacaaaccaaatcccagcagatacaacaaatggctgacaaaatcctggagctagaggaaaaacacagagaggctcaggtctccgcacagcacctcgaagtccacttgaaacaaaaggagcagcattacgaagagaaaattaaagtgcttgacaaccaaatcaagaaggatttggccgataaggaaaccttagagaacatgatgcagcgtcatgaggaagaagctcacgaaaaaggaaagattcttagtgagcagaaagccatgatcaatgccatggactccaaaatcagatctttggaacagaggatagtggaactatctgaggcgaacaaactggctgcaaactcctccctattcacacagcggaacatgaaagcccaggaggagatgatcagcgaactccgccagcagaaattctatctcgaaactcaggccggaaaactggaagctcagaaccgcaagttggaagaacaactggagaaaatctcccatcaagaccattcggacaagaaccgactccttgaacttgaaacccggctgagggaagttagtctggagcacgaggaacagaaattagagttaaagaggcagttgactgaactccagttaagcctgcaggaaagagaaagccaattaacagcactgcaggctgctcgtgcagctctggagagccagttgcgccaggccaaaactgagctggaagaaactacagccgaggctgaggaagagattcaagctctgaccgcgcacagagacgagatccagagaaaatttgacgctctaaggaactcctgtacagttattaccgacctggaagagcagctgaaccaactgaccgaagataacgctgaactgaataatcagaacttctacttgtcaaaacagcttgatgaggcctctggcgcaaatgatgaaatcgtgcagcttagaagtgaagtggaccacctgcgacgagaaatcactgagcgagaaatgcaacttaccagccagaagcagacaatggaggctctcaagacaacttgcaccatgcttgaggagcaggttatggacctggaggccctaaatgacgagttactggaaaaagagaggcagtgggaggcttggagaagtgtccttggcgacgaaaagtcccagttcgagtgcagagttcgcgaattgcagcgtatgctggacaccgagaagcagagtagggccagggccgatcaacggatcactgagagtcgacaggttgtggagctggccgtgaaagagcacaaggccgagattcttgcactgcaacaggctttaaaagaacaaaagctaaaggcagaatcattgtcggataagctgaatgacctggagaagaaacatgccatgctcgagatgaacgctcggagtctccagcagaagcttgagaccgagagagaactgaaacagcgtttactggaggagcaggctaagttgcagcagcagatggacctccaaaagaaccacatcttccgcctgacacagggccttcaggaagctctggacagggccgatttactcaaaaccgagcggtcagatctggagtatcaactagagaacatccaggtactgtattcccatgaaaaggttaaaatggaggggaccatctcacagcagactaagctgattgactttttacaggccaagatggaccagccggcaaagaaaaagaaagggttgttctcacggagaaaagaggatcccgctttaccaacccaggttcctctgcaatataacgaattgaaactggcactagaaaaagagaaagccaggtgcgcagagctggaggaggctcttcaaaagactcgtatagaactgcggagtgctagagaagaagcagcccacagaaaggctaccgaccacccacatcctagtacgcctgctacagcgaggcagcagatcgccatgtcggccatcgtgagaagcccagaacaccagcctagcgccatgtccttgctggcaccaccaagcagccgcagaaaggaaagctctacgccagaggaatttagcaggagactcaaagagagaatgcaccacaacattccacaccggtttaatgtgggcctgaatatgcgagctaccaaatgcgcagtgtgtttggacacggtccacttcgggagacaggcgtcaaagtgtctggaatgccaggttatgtgtcatcctaaatgttctacctgccttccagccacgtgtgggttaccagcagagtatgccacacacttcaccgaggcgttctgtagagataagatgaattctcctggccttcagactaaagagccgagctcgagtctgcacctcgaaggctggatgaaagtgcccaggaataataaacgcggtcagcagggctgggaccgcaaatatatcgtgcttgagggctcaaaagtcctaatttacgataatgaggcacgggaggctggccaaagacctgttgaagaatttgagctgtgcttgcccgacggcgacgtgagcattcacggcgctgtgggcgctagcgagttggctaataccgcaaaggccgacgtgccatatatactgaagatggagagtcatccacatacaacgtgttggcctgggaggactctgtatcttctagctcctagtttcccagataagcagcggtgggtgaccgcactggaatctgttgttgccggtggccgtgtgtccagggagaaagcggaggccgatgccaagttacttgggaacagtttactgaagctggaaggcgatgacagactggacatgaactgcacgctcccatttagcgaccaggtggtgctggttggcaccgaggagggactctacgctctgaacgtgctgaaaaactcacttacacacgtcccaggaattggggcagtctttcagatctatatcataaaggacctagagaaattacttatgattgcaggagaagaaagagccctatgcctagttgacgttaaaaaggttaaacaaagccttgctcagtcgcacctgcccgcacagcccgatatatctccaaacattttcgaggcagttaaaggctgccacctattcggcgctggcaagattgagaatggtctatgcatctgtgccgctatgccctccaaggtggttattctgaggtataatgagaatttgagcaagtactgcatccgtaaggagatcgaaaccagcgaaccctgttcatgcattcatttcaccaactactcgattctgatcgggaccaataagttttatgaaattgatatgaagcaatacacgctggaagaatttctagataagaatgatcactctctcgcgccagctgttttcgctgcctcttcaaattcgttcccagtgagtattgtgcaggtgaacagtgcaggacagagagaagaatatttgctctgcttccatgaatttggggtgttcgttgattcttatgggcgaaggagtagaaccgatgacctcaaatggagccggctccccctggcgtttgcttaccgcgagccatacctcttcgtcacccacttcaacagccttgaggtgatcgagatccaggctagaagctctgccggaacgccagctagagcctacctcgacatcccaaatccccgatacttaggacccgcaatctcgtcgggagctatctatctggctagtagttaccaagataagcttagggtcatctgctgcaaggggaatttggtcaaggaaagcggcacagagcatcaccggggtccgagcaccagtcggtcgagccccaataaaaggggccctcccacatacaatgagcatattaccaaacgagtggcatccagccccgcacctccagagggaccctcacatcctcgggaaccctccacaccccaccgttatagagaagggagaacagagctgcgcagggataaaagcccagggaggcctttagaaagagaaaaatctccaggacgaatgctgtccactagacgggagcgatctccagggcgactgttcgaggatagtagcaggggccgattgcctgccggagcggtgagaacacccctaagtcaggtgaacaaggtgtgggatcagagctccgtcta

SEQ ID NO: 218584 - DNA, 696 bp, synthetic construct
  misc_feature 1..696: note = Description of Artificial Sequence: Synthetic coding sequence
  source 1..696: mol_type = other DNA
atggacccagaacatgcgaaaccagagtcctcagaggctccctccggaaatttgaagcagccagagaccgcagccgctctggcttcttcgggttctgtggttagttctgtgccaaaggcgcagcgcaacatttctgctaagacagcgcctagaaaacacccggctgtaagcattagatctgctcaatctgcagccgctgcaagaccccagggtagtgagggtactgcaccttcacggaaggctacaaccaggcccccaccaaaaccgacgctgccaccacccacccctagcgctcataccgagtctaaactgctgaacgagatggccattaaagagagggttgaaggaagggccaaggtgccatacaagtttcgggacagcctcaagcggttttctttttcccctaccggcatgttgaagatcctccggctgagcttaattctgggggcactggcctgcttcattattacccaggcgaacgagtcctttatcacaatcaccagtctggagatctgtatcgttgttttttttattctcatttacgtattaacactacatcacctgcttacctatctccattggcccctattggatctaaccaactctatcatcacagccgtttttctgagcgtggtagcgatacttgctatgcaggaaaagaagcgacggcatttactctacgtaggcggacgttag

SEQ ID NO: 218585 - DNA, 369 bp, synthetic construct
  misc_feature 1..369: note = Description of Artificial Sequence: Synthetic coding sequence
  source 1..369: mol_type = other DNA
atggatccggagcacgccaagccagaatcatcagaagcacccagtgggaacctgaagcagccagagacagccgctgccttagcctctagcgggagtgtggatctcactaattccattatcaccgcggtctttttgtcggttgtggctattctcgccatgcaggaaaagaaacgcaggcacctcttgtacgtggggggtagtctctgcctgaccgcggtaatcgtctgctgcattgacgcgtttgttgtgacaaccaagatgcggactaacttaaagagattcttaggtgtggaggtggagcggaagctgtcccccgcaaaggatgcctatccagaaacaggacctgacgcccctcagcgtccagcctag

SEQ ID NO: 218586 - DNA, 351 bp, synthetic construct
  misc_feature 1..351: note = Description of Artificial Sequence: Synthetic coding sequence
  source 1..351: mol_type = other DNA
atggatcctgagcacgcaaagcccgaaagtagtgaggccccatcaggcaacttgaagcagcccgagacagcagccgctcttgatcttacaaattccattataactgcagtgtttttgtcagtcgtcgccatcctggccatgcaagaaaaaaagagaaggcaccttctgtatgtgggcggatctctctgcctgacagcagtcattgtctgctgtatagatgccttcgtggtgacaaccaagatgcggaccaatctcaagcgtttcctgggagtcgaggtagagagaaaactcagtccagccaaggacgcttacccagagactggcccagacgcaccccagagacccgcttag

SEQ ID NO: 218587 - DNA, 279 bp, synthetic construct
  misc_feature 1..279: note = Description of Artificial Sequence: Synthetic coding sequence
  source 1..279: mol_type = other DNA
atggatcctgagcatgccaaaccagagtcctcagaggctccttcaggaaacctgaaacaacctgagaccgccgctgctctcgcatccagtggctccgtcgtttcatccgtgccaaaagctcagcgcaatattagcgctaagaccgccccaaggaaacacccagccgtgtcgataaggtctgcccaaagtgctgccgctgcgcgaccccagggttctgaggggaccgcaccatccaggatacttcccacagtttctctccagctatgctcgtttcaatag

SEQ ID NO: 218588 - DNA, 861 bp, synthetic construct
  misc_feature 1..861: note = Description of Artificial Sequence: Synthetic coding sequence
  source 1..861: mol_type = other DNA
atggaccccgaacacgctaaacctgaaagttcggaagcgcctagcgggaacttgaagcagcccgaaaccgccgctgcactagcttcaagtgggagcgtggttagtagcgtgcctaaggcgcagagaaatattagcgcaaaaaccgctccaaggaaacatcccgcagtgagtatcagaagtgcacagtctgccgcagccgcacgcccacaaggtagtgagggaacagcgccatcacggaaagcaaccacacggccaccaccaaaaccgactctgcccccaccaacccccagtgcccacaccgagtccaaactcttaaatgaaatggctattaaggagcgggtggaggggcgagccaaggtgccgtacaagtttcgggactctttaaaacggtttagtttttcacctaccgggatgctgaagattttgcggctaagcttgattctgggagctctggcctgcttcatcatcacacaggccaatgagagctttatcacaataaccagcctcgaaatttgcatcgtggtgttcttcattctcatttatgtgctgaccctgcaccatctgctgacatacctccattggcccctactagatcttacgaattctattatcaccgccgtttttctgtctgtggtcgccatcctggccatgcaggagaaaaagaggcggcacctactttatgtgggaggttctttgtgcttaacagcagtgatcgtgtgttgtatagacgcattcgtggtgacgacgaagatgaggacaaacctgaaaagattcctcggtgttgaggtggagaggaagctttctcctgcgaaagacgcatacccagaaacggggcctgacgcccctcaaagaccagcttag

SEQ ID NO: 218589 - DNA, 510 bp, synthetic construct
  misc_feature 1..510: note = Description of Artificial Sequence: Synthetic coding sequence
  source 1..510: mol_type = other DNA
atggatccagagcacgcaaaaccagaatcctcagaggcaccaagcggtaatctcaagcagccagagactgcggctgccctgtctttgatcctcggcgctctggcttgcttcataatcacacaagccaacgagtcgttcatcactattactagtctagagatctgcatcgtggtctttttcatactgatctatgtgctgaccctccaccatcttttgacctacctgcactggccccttctggatctcacaaacagcatcatcactgctgtgttcctttctgtggtcgctattctggccatgcaggagaagaagaggaggcatctgttgtatgtgggcggttccttgtgccttacagcagtgattgtttgctgtatcgacgcctttgtggtgactaccaaaatgcgcactaacctaaagagattcttaggggtggaggtggagcggaagctgtctccagctaaagacgcttatcctgaaacgggtcctgacgcccctcagagacctgcttag

SEQ ID NO: 218590 - DNA, 345 bp, synthetic construct
  misc_feature 1..345: note = Description of Artificial Sequence: Synthetic coding sequence
  source 1..345: mol_type = other DNA
atggatccagaacatgctaaaccagagagctccgaggcgccatccgggaatctcaagcagccagaaacagccgcagctctgagtttgatcttaggcgctctggcatgctttattattacccaggccaatgagtccttcattaccataacatccttagaaatctgtattgtggtgttttttatcttaatctatgtgcttaccctgcatcatctgttgacttacctgcactggccccttttggatctaaccaactctatcatcactgcggtcttcttgtcagtggtggcaatcttggctatgcaggaaaagaagcgcaggcatctactgtacgtggggggtcgttag

SEQ ID NO: 218591 - DNA, 117 bp, synthetic construct
  misc_feature 1..117: note = Description of Artificial Sequence: Synthetic coding sequence
  source 1..117: mol_type = other DNA
atggaccccgaacatgctaaaccagaatccagcgaagcccctagcggaaacctgaagcagccagagaccgctgccgctctcgaggcagacaaagccaacatgtcaaatttcaactag

SEQ ID NO: 218592 - DNA, 87 bp, synthetic construct
  misc_feature 1..87: note = Description of Artificial Sequence: Synthetic coding sequence
  source 1..87: mol_type = other DNA
atggatcccgaacacgccaagccagagtcatctgaggcacccagtggcaatcttaagcagccggaaactgcagccgcactcagatag

SEQ ID NO: 218593 - DNA, 747 bp, synthetic construct
  misc_feature 1..747: note = Description of Artificial Sequence: Synthetic coding sequence
  source 1..747: mol_type = other DNA
atggcacccaaggccgctaagggcgcaaagcccgagcccgctcccgctcctccgccacctggtgccaagccagaggaggataaaaaagacggcaaagaacctagtgataaaccacaaaaagcagttcaggaccacaaggaaccgtcagacaaacctcagaaggccgttcagccaaaacatgaggtgggtactagacgaggctgccggagataccgctgggagttgaaagacagcaataaggaattttggctgctggggcatgccgaaataaagatccggtctttagggtgcctcattgctgcaatgattttgctgagcagcttaactgtccatcccatcctccgcctgattatcacaatggagataagtttttttagcttctttatcctactgtatagctttgccattcaccgctatatcccttttatactgtggcccatttcagatctgtttaacgatctcatcgcatgtgcctttctggtgggagcagtcgtgtttgcagtacgaagccgcagaagtatgaatctgcactacctcctggcagtgatcctgatcggcgctgccggtgtgtttgccttcattgatgtatgccttcagcgtaatcactttaggggcaaaaaggcgaagaagcacatgctcgtgccaccccctgggaaggaaaagggtccccagcagggcaagggacctgagcccgcaaagcctcctgaaccaggaaagccccctgggccagccaagggtaagaaatag

SEQ ID NO: 218594 - DNA, 588 bp, synthetic construct
  misc_feature 1..588: note = Description of Artificial Sequence: Synthetic coding sequence
  source 1..588: mol_type = other DNA
atggctccaaaggccgctaaaggcgctaagcccgaaccagcgccagcaccacccccaccaggcgcaaagcctgaggaggacaagaaggacggcaaggaaccgtcggacaaaccccagaaggccgtgcaggaccataaggagcccagcgacaagcctcagaaggcagtgcagccaaagcacgaggtgggaacacggagaggctgccgcagatatcgctgggagctcaaagacagcaataaagagttttggctcctcggacatgctgaaatcaaaatacggagtctcgacctgtttaacgatctcattgcctgcgctttcctcgtgggtgcagtcgtcttcgcagtcagaagcagaagatctatgaacctgcattatctgctggcagtgatactgatcggagcagccggtgtcttcgcttttatcgacgtgtgcctgcagcgcaatcactttcgtggaaagaaggcaaagaagcacatgctcgttccccctcctgggaaggaaaaggggccacagcagggtaaaggcccagaacctgcaaagccacctgaaccaggcaagcctccagggcctgccaaaggtaagaagtag

SEQ ID NO: 218595 - DNA, 180 bp, synthetic construct
  misc_feature 1..180: note = Description of Artificial Sequence: Synthetic coding sequence
  source 1..180: mol_type = other DNA
atgtggcccccagacccagaccccgatcctgatcctgagccagccggaggatcgcgacccggtcctgccgtgcctggcctcagggccctcctgccagccagggcatttctgtgctcactcaagggacccggaggctttgtgtgcacctggtgcagttgcccacatcagcctctctggtag

SEQ ID NO: 218596 - DNA, 549 bp, synthetic construct
  misc_feature 1..549: note = Description of Artificial Sequence: Synthetic coding sequence
  source 1..549: mol_type = other DNA
atgtggcctcctgaccccgatcccgaccccgatcctgaacctgctggcggatccagacctggccctgccgtgcccggactgcgcgcactgttgcccgcacgcgctttcctgtgttctctgaaaggtagactgctgttggctgaatcaggcctctcctttatcacattcatttgttacgtggcgagcagtgcctctgctttcctaaccgcaccgctcctagagttcctgctggcactgtactttctcttcgccgacgctatgcaactgaatgacaagtggcagggcctctgctggcctatgatggacttcctccgatgcgtgacagctgctctaatctactttgctatttccataaccgccattgccaaatatagtgacggcgcatcaaaagctgctggtgtgttcgggttttttgccactattgtattcgctactgatttctatctgatttttaacgatgttgccaagtttctcaagcagggggattctgccgacgagacgactgcacacaaaacggaggaagagaatagtgattccgactccgattag

SEQ ID NO: 218597 - DNA, 549 bp, synthetic construct
  misc_feature 1..549: note = Description of Artificial Sequence: Synthetic coding sequence
  source 1..549: mol_type = other DNA
atgtggcccccagaccccgaccccgacccagatcctgaacccgctgggggtagccgaccaggccctgccgttcctggcctgcgggctctcttgccggctagggcattcctctgtagcttgaaaggacgactgctcttggcagaatcagggttaagctttatcacctttatttgttacgttgcatcttctgcctcagccttcctgacagctcctctgctcgagttcctactcgctctgtacttcctgtttgccgatgcaatgcaactcaacgacaagtggcagggcctttgttggccaatgatggactttcttaggtgtgtcaccgccgctttgatctactttgccatctccattacagcgatcgccaaatattctgacggagctagcaaagccgctggagtattcgggttcttcgccaccattgtgttcgcgacagacttttatctgatcttcaacgatgtggcaaagttcctcaagcaaggcgactctgccgatgaaaccacggctcacaaaacagaagaggagaatagtgatagcgatagcgactag

SEQ ID NO: 218598 - DNA, 549 bp, synthetic construct
  misc_feature 1..549: note = Description of Artificial Sequence: Synthetic coding sequence
  source 1..549: mol_type = other DNA
atgtggccccctgacccagatccagatccggatcctgagccagctggtggatcccgccctggaccagccgtgcccggtctgagggcccttctgcccgctcgcgcatttctgtgcagcctgaagggacggctcctgcttgctgagagcggactgagctttatcaccttcatttgttacgtcgcgtcaagtgccagcgcatttctgaccgctccgctgctggagttcctgttggctctctatttcttatttgcagatgcgatgcaattaaacgataagtggcaggggctgtgttggcccatgatggatttcctgcgctgtgtaaccgccgcattaatctacttcgccatatctattacagccattgctaagtacagcgatggtgcctccaaagccgcaggtgtttttggttttttcgctaccatagtgtttgccacagacttctaccttatttttaacgatgtggccaagttccttaagcagggagactcagctgatgaaacaaccgcccataagaccgaggaggagaactctgactcagactctgactag

SEQ ID NO: 218599 - DNA, 705 bp, synthetic construct
  misc_feature 1..705: note = Description of Artificial Sequence: Synthetic coding sequence
  source 1..705: mol_type = other DNA
atgcggtccggggaggagctggatgggttcgaaggcgaggcctcaagtacaagcatgattagtggcgcttcatcaccttaccagcctactacagaacctgtatcccaacggagaggcctggcaggactccgctgtgatcctgattatctgagaggagctctcggcagactgaaagtagcccaggtcatcttggccttgatcgcattcatctgtatcgagaccatcatggcttgttccccttgtgagggactgtacttctttgagtttgtgagttgctcagcattcgtggtgaccggtgtgctgctgataatgttttctctgaatctccacatgcgtatcccacagattaattggaatttgaccgaccttgtgaatacaggcctgagcgccttcctcttcttcatcgctagtatcgtgctggccgctcttaaccatagagctggcgctgaaattgctgcggtcatcttcggcttccttgctactgctgcatacgcagtcaacacctttctcgccgtccagaaatggagagtctcagtaaggcagcaatccaccaatgattatatccgcgctagaacagagtcacgtgacgtcgacagtcgccctgagatccagagacttgacactttctcttatagcaccaatgtaaccgtgcgcaaaaagtctcctactaaccttctctccttaaaccattggcaattagcgtag

SEQ ID NO: 218600 - DNA, 627 bp, synthetic construct
  misc_feature 1..627: note = Description of Artificial Sequence: Synthetic coding sequence
  source 1..627: mol_type = other DNA
atgagatcgggcgaagaactggacggctttgagggcgaggcctcctcaaccagcatgatcagcggggcttcctctccttatcaacccaccactgagcctgtatcccagcgcagggggcttgctggcttgcgttgcgatcctgactatttgcgaggtgccctggggagattaaaagtagcgcaagtgatcctggccctgatcgcatttatctgtattgaaacaattatggcctgttcaccctgtgaaggactatactttttcgagtttgtgtcctgttcggcctttgtagtgactggggttctgctaattatgtttagcctgaacctgcacatgaggattccccagatcaattggaatctgacagacctggtcaacaccgggctgtcagctttcttgtttttcattgcttcaattgtgctcgccgcactcaatcaccgcgctggagcagaaattgccgctgtcatcttcggcttcttagcgacggctgcctatgcagtcaacacctttttggccgtccagaaatggcgcgtctccgtcaggcagcagtccaccaacgactacatccgtgcccgtacagagtcacgcgacgtggatagccggcctgaaatccagaggcttgatacctag

SEQ ID NO: 218601 - DNA, 672 bp, synthetic construct
  misc_feature 1..672: note = Description of Artificial Sequence: Synthetic coding sequence
  source 1..672: mol_type = other DNA
atgctgtcggcacgtgataggcgcgatcggcaccccgaagagggggtggttgcggagttacagggatttgcggtggacaaggcttttctgactagtcataagggcattctgctggaaaccgagctggccttgacactgattatcttcatctgcttcacagcaagtatatctgcctacatggcagctgccctgttggagttttttattactctggccttcttattcctctacgccactcagtattaccagcgcttcgacagaatcaattggccctgtcttctgcagggacatggccaaagtggagggccacaccctctggatctgttgtctcactccgccaaggtgcagccccaaccctggccgggactgacccccccagggtggcatacccccgcagcagtgccctgggtacccgctcctgcaccaggattttggtcctggctgctctggttcatttgcttccattcactgggttcatcagacttccttcggtgcgttagtgctataatcattttcctcgtggtgtcattcgccgctgtgaccagtcgggacggggctgctattgccgctttcgtcttcggtattatcctcgtcagcatctttgcctatgacgctttcaaaatataccggaccgagatggctccgggagccagccagggtgaccaacaatag

SEQ ID NO: 218602 - DNA, 225 bp, synthetic construct
  misc_feature 1..225: note = Description of Artificial Sequence: Synthetic coding sequence
  source 1..225: mol_type = other DNA
atgttatcagcccgtgacaggcgggacagacatccagaagaaggcgtggtcgccgaacttcaaggttttgcagtcgataaagcattcctgacatcacataaggggatccttctggagacagagcttgtgttcggtattattctggtgagtatatttgcttacgatgcgtttaaaatttacaggaccgagatggcacccggagcctcacagggagatcagcaatag

SEQ ID NO: 218603 - DNA, 471 bp, synthetic construct
  misc_feature 1..471: note = Description of Artificial Sequence: Synthetic coding sequence
  source 1..471: mol_type = other DNA
atgctgagtgctcgcgacaggcgagatcgacacccagaagagggagtggtcgcggaacttcaggggtttgcagtggacaaagcctttttaacttcacacaagggaattctcttagagaccgagctagcactcacgttaatcatatttatatgttttacagcaagcatcagcgcctacatggccgctgcgctgctggaattctttatcactttggctttcctcttcctgtatgccactcagtactaccagagatttgacagaattaattggccatgccttgatttcctgcgctgcgtgtcggctatcattattttcctcgtggtgtcctttgcggcagtaactagtcgagatggcgcagccatcgccgcattcgtcttcggcatcattctggtatctattttcgcatacgacgcattcaaaatttaccggactgaaatggcacctggcgcatcccagggggaccagcagtag

SEQ ID NO: 218604 - DNA, 378 bp, synthetic construct
  misc_feature 1..378: note = Description of Artificial Sequence: Synthetic coding sequence
  source 1..378: mol_type = other DNA
atgttaagcgcacgggatagaagagaccggcatcctgaagagggcgttgtcgccgagttacaggggtttgcggtagacaaggccttcttaacgtcccataagggcattctgctcgagaccgagcttgcactgacattaattatcttcatctgttttaccgcctccatatccgcctacatggccgctgccttgctggaattttttattaccttagctttcttgtttttatacgccactcaatactaccagaggttcgatcggattaactggccctgcctggtgttcggcatcattctcgtctctatttttgcctatgacgcctttaagatttacaggacagaaatggctcccggagctagccagggggaccagcagtag

SEQ ID NO: 218605 - DNA, 318 bp, synthetic construct
  misc_feature 1..318: note = Description of Artificial Sequence: Synthetic coding sequence
  source 1..318: mol_type = other DNA
atgctgtctgcacgggaccggcgagatcgtcatccagaggagggagttgtggcagagctgcagggatttgctgttgacaaggcttttctgacttcacacaagggaatcctgcttgagactgagcttgatttcttacggtgcgtgtctgctattataatcttccttgtggtctccttcgctgccgtgactagtagggatggggcagccattgcagctttcgtttttgggattatcctcgtgtcgattttcgcttacgatgcatttaaaatttataggaccgaaatggcccctggcgcttctcaaggggatcagcagtag

SEQ ID NO: 218606 - DNA, 1326 bp, synthetic construct
  misc_feature 1..1326: note = Description of Artificial Sequence: Synthetic coding sequence
  source 1..1326: mol_type = other DNA
cctagtcctgctatcggcttgtttgcctctatggctgccgtcctgttaggcggtgccagagcctcccggctcctgtttcagagactgctctgggacgtcgtccgctccccgattagcttcttcgagcgcacaccaatcggccatctgctcaatcggttttccaaagagacggatacagtagatgtagatatccctgacaagctccggtcgctgctgatgtatgccttcggccttctggaagtgagcctcgtggttgccgttgctacccccttacctctatggccaagttgccattgctttagttccacgcttggcttccgctggctggctgcaaacgtggaattgctggggaatggacttgtctttgctgctgccacatgtgccgtgctgagcaaagcccatctgtctgctgggctagtcggtttctccgtgtcggccgctctgcaggtgactcagaccttgcaatgggtagtccgtaattggactgatctcgagaactcaattgtgagcgtggaacgtatgcaggactatgcctggacacccaaggaggccccttggcggctccctacctgcgcagcgcagcccccatggccccagggcggtcaaattgaattcagagacttcggtctgcggtaccggccagagcttccactcgctgtacagggcgtgtcatttaaaatccacgctggagaaaaggttggtattgtcggccgtactggcgctggcaagtccagcctggccagcggtctgctgcgtctccaagaggccgctgagggaggcatctggatcgacggcgtaccgattgcacacgttggcctccacacacttaggtctcggatctccattatcccccaagatcctatcttgttccccggaagcttgcggatgaatctggatctcctccaggagcatagcgacgaggccatctgggccgctctggagactgtgcagctcaaagccctggtggcctccctacccggacagctgcagtataaatgtgcagatcggggtgaggatctgagcgtgggtcagaagcagctgttgtgcctcgccagagctctcttaaggaagactcagatattgattcttgacgaggcaactgccgctgtcgacccaggaactgaactccagatgcaggcgatgctgggttcatggttcgcccagtgtacggtgctactcatcgcacaccggctccgctcagtgatggactgcgcaagggtcctagtgatggataaaggccaggtcgccgaatccggcagtcccgcacagctgcttgcccagaaagggttgttctatcggttggcccaggagtctggactggtgtag

SEQ ID NO: 218607 - DNA, 528 bp, synthetic construct
  misc_feature 1..528: note = Description of Artificial Sequence: Synthetic coding sequence
  source 1..528: mol_type = other DNA
atgagccacggtgctggcctggttagaacaacatgctcttcaggcagcgctctgggacccggagctggtgctgcccagccgtcagcctctcctctggaggggttgctcgacctgtcgtacccaaggacgcatgctgcactgctcaaagtggcacagatggtgacactgttgattgcattcatctgtgtacggtcatccctttggacgaactactcagcatactcctatttcgaggtggtgacaatctgtgacctcatcatgatcctggctttctatctggtgcacctattccggttctaccgagtgctcacttgcatcagctggccactgagtgagctactccattatctgattggcactctactgctgttaatagcctccatcgtggcagcatcaaaaagctataatcagtccgggctggtggccggagccatcttcggttttatggcgaccttcctgtgcatggctagcatttggctttcgtacaaaatcagctgcgttactcagtccaccgacgcagctgtttag

SEQ ID NO: 218608 - DNA, 429 bp, synthetic construct
  misc_feature 1..429: note = Description of Artificial Sequence: Synthetic coding sequence
  source 1..429: mol_type = other DNA
atgagccacggtgccggactggtaaggaccacatgcagttcagggagtgctctgggccctggtgcaggcgcagcccagccctctgctagtccgctagagggactgttggacctgagttaccctcgtacccatgcagccctgttaaaagtcgctcagatggtaacactgttgatcgcctttatatgcgtacggtcttccctatggacaaactattcagcctactcatactttgaagtggtgactatttgtgatcttattatgatcctggccttctacctggtccacctgttcagattctacagggtgctgacttgtatatcctggccactatctatctttggattcatggccactttcctctgtatggcgagtatttggctgtcgtataaaataagctgcgtaactcaaagcacagatgcggcagtgtag

SEQ ID NO: 218609 - DNA, 522 bp, synthetic construct
  misc_feature 1..522: note = Description of Artificial Sequence: Synthetic coding sequence
  source 1..522: mol_type = other DNA
atggaggaaccgcagagggccagatctcacactgtcacgaccaccgcttcttctttcgccgaaaatttctcaactagttcgagctcctttgcttatgatcgggaattccttagaaccctcccaggatttctgatcgtggcagaaattgtcctgggtctcctggtgtggacactgatcgcaggcacagagtactttagagtaccagccttcggctgggtgatgttcgtcgcagtcttttattgggttctcaccgtgttctttctgattatttacatcactatgacctacacaagaattccgcaggtgccatggacaacagtgggattgtgcttcaatggctctgcttttgtcttgtatctgagcgctgcagtggtagacgcctccagtgtgtctcccgagcgtgactcccacaatttcaactcatgggccgctagctcatttttcgcctttttggtcaccatctgctatgcaggcaacacctactttagttttatagcctggagatcccgtacaattcaatag

SEQ ID NO: 218610 - DNA, 363 bp, synthetic construct
  misc_feature 1..363: note = Description of Artificial Sequence: Synthetic coding sequence
  source 1..363: mol_type = other DNA
atgcaggccctgcagcagcagccggtttttcccgatttgcttaaagcgatccccgtcagcatccacgtgaatgtcatactgtttagcgccatactgattgttctgaccatggttggaacagccttcttcatgtacaacgccttcggaaaaccctttgagactctgcacgggcctctcggattgtacctcctctccttcatcagtgggagctgcgggtgtcttgtgatgatcctatttgctagtgaggtgaagatccaccatctaagcgagaagatcgccaattataaagagggaacatacgtatacaagacccagtctgagaaatacactacatccttctggttgacaaaaggacacagttag

SEQ ID NO: 218611 - DNA, 699 bp, synthetic construct
  misc_feature 1..699: note = Description of Artificial Sequence: Synthetic coding sequence
  source 1..699: mol_type = other DNA
atgcccagtcagcagaagaaaattattttctgcatggcaggtgtgttctcctttgcatgcgcccttggcgttgtgaccgcccttgggacccctctgtggattaaggccaccgttctgtgtaaaacaggcgctttactcgtgaatgccagcggacaggagttggataaattcatgggtgaaatgcagtatggcctttttcacggcgaaggcgtgcgacagtgtggtcttggcgcaaggccctttcggttctctttttttccggatctgcttaaagctatccctgtctcaatccacgtcaacgtcatcctgttttcagcgatcctgatcgtgctgacgatggtggggacagcatttttcatgtataatgcattcgggaaacccttcgagacgctccacggtcccctcggcctgtacctgctttccttcatcagcggttcttgcgggtgtctggtgatgattttattcgctagcgaggtgaaaatccaccacctgagcgaaaaaatagcaaactataaggagggtacatacgtgtacaagactcaaagcgagaaatacactacaagtttttgggtgattttcttctgtttcttcgtgcatttcttgaacgggctccttatccggctcgccggtttccagttccctttcgccaaaagcaaagatgccgagacgacaaatgtggccgctgacctgatgtattag

SEQ ID NO: 218612 - DNA, 738 bp, synthetic construct
  misc_feature 1..738: note = Description of Artificial Sequence: Synthetic coding sequence
  source 1..738: mol_type = other DNA
atgccttcccagcagaagaagatcatcttttgtatggccggtgtctttagcttcgcttgcgcgctgggtgtggtgaccgccctcgggactccactctggatcaaagctactgtgttgtgtaaaacaggcgctcttctggtgaatgcctcagggcaggaattagataagttcatgggtgagatgcagtatgggctgttccacggagagggggtccgtcagtgtgggttaggggcacgcccattccggttctctttcttcccagacctccttaaggctatcccggtgagtatacatgttaacgttatcctgttcagtgctatcctcatcgtgttaaccatggtggggactgcgttttttatgtacaatgcctttggaaagccctttgagacactccacggccctttggggctttatctgttgagcttcatctctgtggctctctggcttccagctacgcggcaccaggcccaaggatcctgcggatgcctcgttatgatcctcttcgcctctgaagttaagattcaccacctatccgaaaaaattgccaattacaaagaagggacgtatgtatataagacccagagcgagaagtacaccactagcttttgggtcatcttcttctgcttttttgtccattttctcaacgggctgctgatacggctcgcgggatttcagtttcccttcgcgaaaagtaaggatgcagagacgaccaacgtcgctgctgatttgatgtactag

SEQ ID NO: 218613 - DNA, 348 bp, synthetic construct
  misc_feature 1..348: note = Description of Artificial Sequence: Synthetic coding sequence
  source 1..348: mol_type = other DNA
atgcaagcgctgcagcagcagccggtgttccctgaccttcttaaagccatccctgtttccattcatgtaaacgttatactcttcagtgccattctaatcgtactcactatggtgggaacggctttttttatgtataatgccttcggtaaaccgttcgagacactacatggcccacttggtctatacttgctctcgttcattagcgggtcctgcgggtgcttggtcatgatattgttcgcctcagaggtgaaaatccatcatctaagcgagaaaattgccaactacaaggagggtacctatgtgtacaaaacacagtctgagaagtacactacatctttctgggtctag

SEQ ID NO: 218614 - DNA, 1878 bp, synthetic construct
  misc_feature 1..1878: note = Description of Artificial Sequence: Synthetic coding sequence
  source 1..1878: mol_type = other DNA
atgaattactctgaaattgagtcgaaagtgcgcgaagctaccaacgacgatccctggggaccctccggacagcttatgggggaaatcgctaaggcaacctttatgtatgaacaattcccagaactgatgaacatgctatggtcgaggatgctgaaggataacaaaaagaactggaggcgagtgtataaatccctactcctgttggcctacctgatcagaaatggctcagaacgcgtggtcacgtccgcccgtgagcatatttatgaccttcgctctctcgagaattaccacttcgtggacgagcacggaaaagaccagggtatcaacatccggcagaaggtgaaggagctggtggagtttgcacaagatgatgacagactgagagaggagaggaagaaagctaaaaagaataaagataagtacgtgggtgtgtccagtgacagcgtgggcggtttcagatatagcgagcgttatgatcccgaacctaaatccaaatgggatgaggagtgggataaaaacaaaagcgcctttccctttagcgacaaacttggggaactgagcgacaagattggcagcaccattgacgacaccatctccaaattcaggcgaaaggaccgcgaagattcacccgaacgatgcagcgactcagacgaggaaaagaaggctcgtagaggccgatctcctaagggtgaattcaaggacgaagaagagactgtcacaaccaaacatatccatataacccaagcaacggagactaccacgacgcgccataagcgtaccgctaacccgagcaaaactatcgatctgggcgctgctgcccattatactggcgacaaggcttcacctgaccagaacgcgtccacccatacacctcagtcctcagtgaagacatcagtacctagtagcaagtcctccggagacctagtagatctttttgacggtacttcgcagagcactggcggatccgctgatctcttcggtgggttcgccgacttcggatctgccgctgcgagtggctctttcccaagccaggtgacggccacttccggcaacggagacttcggtgactggtctgcttttaaccaagctccctcggggcctgtagcctcttctggcgagttcttcggcagtgcctctcagcccgctgtggagctggtatcgggatcgcagtccgctctcggcccaccaccagccgcatctaacagttcagatctgttcgatctaatgggctccagccaggcgacaatgactagtagccaaagcatgaattttagtatgatgtctactaacaccgtcggactaggcttgcccatgagtcgatctcagcctctgcaaaacgtgtcaactgtgttgcagaaacccaacccattgtacaaccagaataccgatatggttcagaagtcagtctccaaaacgctgccaagtacctggtctgatcccagcgtgaatatttcccttgataacctacttcctggcatgcagccctccaaaccgcaacagccctcattgaacacaatgatacaacagcagaacatgcagcagcctatgaacgttatgactcagtcatttggggcagttaatttatcatccccatccaacatgctgccagttcgaccccagacgaatgctctgatagggggacccatgccaatgtccatgcccaacgtcatgactggaaccatggggatggcacctctcggcaacacacccatgatgaatcagtctatgatgggtatgaatatgaacatcggcatgtctgcagcgggaatgggcctgacaggcactatgggaatgggtatgcccaacatcgctatgacatccggcacagtgcagccaaagcaggacgccttcgcaaacttcgccaatttctcaaaatag

SEQ ID NO: 218615 - DNA, 1878 bp, synthetic construct
  misc_feature 1..1878: note = Description of Artificial Sequence: Synthetic coding sequence
  source 1..1878: mol_type = other DNA
atgcttaacatgtggaaagtgcgggagctcgtggacaaggctaccaacgtcgtgatgaattactccgagattgagagcaaagttcgagaggccaccaacgacgacccttgggggcctagcggacagctgatgggtgaaattgctaaagccaccttcatgtatgagcaattcccagagctgatgaacatgctttggagtagaatgctgaaggataataagaaaaactggcggagagtgtataagtctctgctcttgttagcttaccttatcaggaacgggagcgagcgcgtggtgacatccgccagagaacacatctacgatctgcgcagtttagagaattatcactttgtagatgagcacggcaaggaccaggggatcaatattcggcagaaggtaaaggagctcgtggagtttgcccaagacgatgaccgtctgcgggaagagaggaaaaaagctaagaagaacaaggacaagtacgtgggtgtttcctccgattcagttggaggatttcgatacagtgaacggtacgatcctgagcccaaatccaaatgggacgaggagtgggacaaaaacaagtctgcctttccatttagtgacaaacttggggagctctctgataaaatcggctcgacaattgatgataccatctccaaatttcggcgtaaagatcgggaagatagtccggagcgatgtagcgatagcgatgaagaaaagaaggccaggcggggacgctcgcccaagggtgagtttaaagacgaagaggaaacagtgaccactaagcatatccacatcacacaagcgacagaaaccacaacaacccgccataaacgcactgccaacccctctaagactattgatctgggggctgcagcacactacacaggtgacaaagcaagtcccgaccaaaacgcctccacacatactccgcagtcgtccgtcaagacgtcagtgccttcctcgaagagtagtggcgatctagttgacctgttcgacggcacaagccagtctacaggcggttctgccgatttgttcgggggattcgccgatttcgggtccgccgcagccagcggtagttttccttcacaggtgactgccacaagcggaaacggggacttcggcgactggtctgcgtttaatcaggcgccatccggtcctgtcgcaagcagcggcgagttttttggatctgctagtcagcctgccgtagaactcgtgtcaggctctcagtctgcactgggtccgcctcccgctgcgagcaactcatcagacttgtttgacctcatggggtctagtcaagccacaatgacgtctagtcagtccatgaacttttccatgatgtccacaaataccgtgggcctgggtttacctatgagccgcagtcagaacaccgacatggttcagaagtccgtttctaagacactgccaagcacgtggtctgatccaagtgtgaatatcagccttgataatctgttgcctgggatgcagccaagtaaacctcagcagccatctctcaacactatgatccaacagcagaacatgcagcaacctatgaacgttatgacgcagtcgtttggagccgtcaacctgtcgagtcccagcaacatgttaccagtgcgccctcagactaacgcactcattggcggtcccatgccgatgtcgatgccgaacgtgatgaccggcaccatgggaatggcacctctgggaaatactccaatgatgaaccagagcatgatgggcatgaacatgaatatcggaatgtctgcagccggtatggggcttactggaaccatgggcatggggatgcctaacatcgccatgaccagtggcacagtgcaacccaagcaggacgcttttgcaaattttgcaaacttcagtaagtag

SEQ ID NO: 218616 - DNA, 1878 bp, synthetic construct
  misc_feature 1..1878: note = Description of Artificial Sequence: Synthetic coding sequence
  source 1..1878: mol_type = other DNA
atgaactactctgagatagagagtaaggttcgagaggcaacaaatgacgatccatgggggccatctggacagctgatgggcgaaatcgctaaagccaccttcatgtacgagcagtttcccgagctcatgaacatgctttggtcgaggatgttgaaggacaacaagaaaaactggagaagggtgtataagagcttgctgcttctggcttacttgatcagaaacggttccgaaagagtggtaaccagtgccagggagcacatatatgaccttcggtccctggagaactatcactttgtcgatgaacatgggaaggatcagggcattaacattcgacagaaagtgaaagagctggtggaatttgctcaggatgacgaccgtctacgagaagagagaaagaaagcgaagaagaacaaggataaatacgtcggtgtctccagtgacagcgtcggagggtttagatatagcgaacgttacgatccagagccgaagtctaagtgggatgaagagtgggacaagaataagagcgccttccctttcagtgataagttgggagaactcagcgacaagatcgggtcaacaatcgacgacaccatctccaagtttaggagaaaagatagggaagatagccccgaaaggtgctcagatagcgatgaggaaaagaaagctcgaaggggacggagccccaagggcgagtttaaggatgaggaagagaccgtcaccactaaacacatccacatcacacaggccaccgagacaaccacgactagacataagaggacagcaaatccttctaagaccatagacttaggcgcagccgcacactacactggtgacaaggcaagtcctgaccagaacgcctctacccacaccccccaatcttccgtgaaaacgtccgttccatcctcaaaaagttctggggatctcgtcgatctgttcgatggcacctcccaaagcaccggtggctccgcggacttgtttgggggttttgccgatttcggcagtgcggcagccagcggaagtttcccctcccaggtaacggcaacatctgggaacggagatttcggagactggtcagctttcaaccaagcgccatctggtcccgtggctagttccggcgagttttttggcagtgcctcccaacctgccgtggaactcgtgagtggctctcagagcgctctgggcccaccccctgcagccagcaattcaagcgacctgttcgatctaatgggatcaagccaggccacaatgacatctagtcagtctatgaatttctctatgatgtcaaccaataccgttgggctggggctcccaatgtcgagaagccagcctcttcagaatgtttctacagtgctgcagaagcctaacccgctgtataatcagaacaccgatatggtgcagaagtctgtgtccaagacactaccttcaacttggtccgacccaagtgtcaatatttcactggacaatctgttacccggaatgcagccaagcaaacctcagcaaccgtctttaaatactatgatacaacagcagaacatgcagcagcctatgaatgtgatgacacagtcctttggcgcagtaaatctgagctctccttccaacatgcttccagttaggcctcaaacaaatgccctgatcgggggtcctatgcctatgtcaatgcccaatgtgatgaccggcacaatgggtatggctccactggggaacactccaatgatgaaccagagcatgatgggcatgaacatgaatatcggcatgtcagctgcaggcatgggattaaccggcaccatgggaatgggcatgcctaatatcgccatgacgagcggaacggtccagcccaagcaggacgcctttgccaattttgccaattttagtaagtag

SEQ ID NO: 218617 - DNA, 1878 bp, synthetic construct
  misc_feature 1..1878: note = Description of Artificial Sequence: Synthetic coding sequence
  source 1..1878: mol_type = other DNA
atgaactatagtgaaatcgagtccaaagttagagaagcaacaaacgacgacccatgggggccttctggccagctgatgggagagattgccaaggccacctttatgtatgagcaatttccagaactgatgaatatgctgtggagcagaatgttgaaggataataagaagaactggcgacgggtgtacaagtccctgctcctgctcgcttatctcattcgaaacggaagcgagcgggtcgtgacaagtgccagggaacatatatatgatctacggagcctggagaattaccatttcgtggacgaacatggcaaggaccagggtatcaacatcaggcagaaagtcaaggagctcgtggagttcgctcaggatgacgataggctgcgagaggaacggaaaaaggccaaaaagaacaaggacaagtatgtgggtgtctcttccgactctgtcggcggttttaggtattcggaacggtacgaccctgagcccaagtccaaatgggacgaggaatgggacaagaacaagagtgctttcccattctctgacaagttaggcgagttatctgataagatcgggtctactatcgacgacaccatttctaagtttcggagaaaagaccgtgaggactcccccgaaagatgtagcgattccgacgaggagaagaaagccagacgcggacggtctcccaagggggagtttaaggacgaagaggaaactgtgacaactaaacacatacacatcacccaggctacggagaccacaaccacaaggcacaagcgaaccgcgaacccctcaaaaacaattgatcttggcgcagctgcccattacacaggggacaaggctagtccggatcagaatgcctccacccacaccccccaaagttctgtcaaaaccagcgttccatcttcaaagtccagcggagacctggtcgacttgttcgatgggaccagtcaatcaacaggcggaagcgcggacttatttggtggctttgctgactttggtagcgcggcagccagcggcagcttcccatcccaggtcaccgctaccagtggcaacggcgacttcggggactggtccgccttcaatcaggcccctagcggaccagtggccagcagcggcgagttttttggatcagcctcacagcctgcagtcgaactcgtctccggctcccaatcagcgcttggaccccctccagcagccagcaattcgtcagacctcttcgacctaatggggagctctcaggccacgatgacatcttcccagtccatgaatttcagcatgatgagcacaaacactgtcggcttgggcttacccatgagtcgcagtcaaccactccaaaacgttagcactgttctacaaaagcctaacccactttacaatcagaatacagatatggtgcagaagagcgtcagcaagactctcccgtccacatggtccgatcccagcgtgaatatctcgttggacaacctgctgccaggaatgcagccctctaaaccgcagcaaccctcattgaacactatgattcagcaacagaatatgcagcagccaatgaacgtgatgacccagagcttcggggctgttaacctgtcctcccccagtaatatgctccccgtgaggccacaaacgaatgcgcttatcggcggacccatgccaatgtccatgccaaacgtgatgacgggaacgatggggatggccccactgggcaacacaccaatgatgaatcagagcatgatgggtatgaacatgaacatcggaatgtctgccgctggcatgggactgaccggcacaatggggatgggcatgcctaacattgccatgaccagtggaacagtgcaacccaagcaagacgcattcgctaatttcgcaaacttctctaaatag

SEQ ID NO: 218618 - DNA, 1932 bp, synthetic construct
  misc_feature 1..1932: note = Description of Artificial Sequence: Synthetic coding sequence
  source 1..1932: mol_type = other DNA
atgttaaatatgtggaaagtcagagagctggtggataaggcaactaacgtggtgatgaactacagcgaaatcgaatccaaggtgcgagaagccactaatgacgatccatggggacctagtggacagttgatgggagaaattgccaaggccactttcatgtatgagcaattccctgagctgatgaatatgttgtggagtaggatgctcaaagacaataaaaagaactggcgaagggtgtacaaaagcctcctgcttctagcatatctcattcgcaacgggtcagaacgcgttgttactagcgctagggaacacatctacgatcttcgcagcctcgaaaactaccactttgtggacgaacacggaaaggatcaaggaatcaacataagacagaaggttaaagagctggtggagtttgctcaggacgacgaccgactgcgggaagaacgcaaaaaagccaagaaaaataaagacaagtacgtgggggtcagttcggactctgtgggcggtttccggtatagtgaaaggtatgatcccgagcctaagtcaaaatgggatgaagaatgggataaaaacaagtcagcttttccattctcagataagcttggtgaattaagcgataagatcgggagtactatcgacgacactatttctaaatttagacgcaaggatcgtgaagatagtcctgagcggtgcagcgattccgacgaagagaaaaaggccagaagagggagatctccgaagggggaatttaaggatgaggaagagacagttacaaccaagcacatccacatcacccaggcaaccgagaccactacgaccaggcacaagcgtacagcaaatccatctaagactatcgacttgggggctgccgcacattataccggcgataaggccagccctgaccagaatgcgagcacacacacccctcaaagctcagtgaagaccagcgtgccttctagcaagagtagtggggatctggtggacctcttcgatggtacatctcagtccaccgggggatccgctgacttgttcggaggctttgccgacttcgggagtgctgctgcttccgggtcatttccatcacaggtcacagctactagcgggaacggcgatttcggtgactggtcagcattcaaccaggccccatccgggccagtagccagttcaggcgagttttttgggtcagcctcccagcctgcagtggaacttgtcagtggcagccaatccgcattagggcctcccccagctgccagcaacagcagtgatctgttcgatcttatgggctcctcccaggccaccatgacaagcagtcaatcaatgaattttagcatgatgtcaacgaatacagttggactgggactgcccatgtcccgtagccagccactgcagaatgtgtctacagtcctccaaaagcccaatcccttatataaccaaaacacagacatggtgcagaaaagtgtatcaaagacgctgccttcaacctggagcgatccttcagtaaacattagcctcgacaatcttctccccggaatgcaaccttcaaagccacagcaaccttccctcaataccatgatacagcagcaaaatatgcaacagcccatgaatgtaatgacccaatccttcggggctgtgaacctcagctcaccttcaaacatgttacctgtgcggccacaaacgaacgcattgatcgggggtccgatgccaatgtctatgcccaacgttatgactgggaccatgggaatggccccactgggtaacacccccatgatgaaccagagcatgatgggaatgaatatgaatatcggaatgtccgccgctggcatgggtctgaccgggactatgggaatgggcatgccgaacatcgctatgactagcggtaccgtgcagcccaagcaggacgcctttgctaacttcgcaaacttctccaaatag

SEQ ID NO: 218619 - DNA, 5027 bp, synthetic construct
  misc_feature 1..5027: note = Description of Artificial Sequence: Synthetic coding sequence
  source 1..5027: mol_type = other DNA
atggcccaaatcctgcccatccgatttcaggaacacctgcagttgcagaacctgggtatcaatcctgcgaacatagggttctccacccttacaatggaaagtgacaagttcatatgtattagggagaaggttggggaacaggcacaggttgtgattattgacatgaacgaccctagtaaccccatcagacgcccaattagtgctgatagtgccatcatgaatcctgcaagtaaagtgatcgctctaaaagctggaaaaacactgcagatcttcaatatagaaatgaaaagcaagatgaaggcccatacaatgactgatgatgtcactttctggaagtggatcagtttgaataccgttgccctggtgacagataacgcagtgtaccattggtctatggagggagagtcccagcccgtcaagatgttcgacagacatagttccctggcgggttgccagattattaattacagaaccgacgctaagcaaaagtggctcttgctcacaggtattagcgcacagcaaaaccgggttgtgggagccatgcagttgtattcagttgacagaaaagtctcacagcccatcgaggggcatgctgcctctttcgcccagttcaagatggaaggaaacgctgaggagagcaccctcttctgttttgccgttcggggacaggccggaggtaagttacacatcatcgaagtcggcactccccctactgggaaccagccatttccaaagaaggctgtggacgtgttctttccacctgaagcccagaatgatttcccggtggctatgcagatctcagaaaagcatgatgtggtgttcctcataaccaaatacggttatatacatctgtatgatttggaaactgggacctgtatctacatgaaccgcatttccggagaaacgatctttgtgaccgcccctcacgaggccactgccggtatcattggagtgaaccggaaaggccaggtgctttccgtgtgcgtagaagaggagaacattataccctacatcaccaatgttttgcagaaccctgacctggctcttaggatggccgtgagaaacaatctggctggggcagaggaactgtttgctcgaaagtttaacgctctcttcgcccaaggcaactactctgaggcggctaaggtcgcagctaacgcaccgaaaggcattctgaggacaccagataccattcgcagattccagagcgtgccagctcagccaggacaaacctctcccttgttgcagtatttcgggattctccttgaccaaggccagctgaacaagtacgagtcattggaactttgccggcctgttttgcagcaggggcgaaagcaactgctcgaaaagtggctgaaggaggacaagttggagtgctccgaagagctgggcgatctggttaagtccgttgaccccactctggccttgtccgtctatctccgagcaaacgtgccaaacaaagtgatccagtgctttgctgagaccggtcaggtgcagaagatcgtactgtatgcaaagaaggttggatacacgcccgactggatctttttacttcgaaacgtaatgcgtatttctcccgatcagggacagcagttcgcccagatgctagtgcaggacgaggaacctctcgctgatatcacacaaatcgtggatgtgtttatggaatacaacctcattcagcagtgcacagctttcctgctcgatgcgctaaaaaataaccggcctagcgaagggccactgcagacccgtcttcttgagatgaacttgatgcatgcaccccaggtagctgatgcgatattgggcaatcagatgttcactcattatgatcgggctcacatcgcgcaactctgcgagaaagccggattgctccaaagagctctcgagcattttacggacctctacgacatcaagcgagctgtagtccatacgcatctgttgaatcctgaatggttggtgaattatttcggtagtctcagtgtagaagatagcctcgaatgcctgcgtgctatgctgagcgcgaatatacgtcaaaacctgcagatatgcgtgcaggtagctagcaagtatcatgagcagctttccactcagtcactgattgagctgtttgagtccttcaagagctttgagggcttgttctattttctgggatccattgtcaattttagccaggaccctgatgtccacttcaaatatatccaggcagcctgtaagaccggacagatcaaggaagttgaaaggatttgccgcgagtcaaattgttacgacccggagagggttaaaaattttctgaaagaggccaagctgaccgatcagctcccattaattatcgtctgtgacagattcgattttgtccatgacttggtgctttacctttaccgcaacaatttacaaaagtatatcgaaatctatgtgcagaaggttaatccctccaggcttccagtggtgatcgggggactgctggacgtggactgctccgaagatgtcataaagaatctgatattggtggtcagaggccagttctctacagatgaactggtcgcagaggtggagaagcgaaaccgcctgaaactgttactcccatggttggaggcaaggattcacgaaggctgtgaggagccagcgacacacaacgctctggccaagatatacatagactcgaacaacaatccagaacgctttttaagggaaaacccatattatgactcacgcgttgtaggcaagtactgcgagaagagggatcctcacctcgcctgcgtcgcatatgaaaggggccagtgcgacttggaacttatcaatgtctgtaacgagaatagcctgtttaagagcctcagcaggtacctggtgcggagaaaggaccccgagctgtgggggtctgtgctgttggagtctaatccgtatcgaagacccttaatcgatcaggtggttcagacagccctcagcgagacacaagacccagaagaggtaagtgtgacagtgaaggcctttatgacagcagacttacctaacgagctgatagaacttttggaaaaaatcgtgctggacaattcggtattctcagagcaccgaaatcttcaaaacttgctgatcctcactgcaattaaagccgaccggacccgcgttatggaatatattaatcggcttgataattacgatgcccctgatatcgccaacattgcaatcagtaacgagctttttgaagaggcattcgctatattccggaaatttgacgtcaacaccagcgccgtgcaggtcttgatcgagcacattgggaacctcgatcgggcatatgaattcgccgagagatgtaacgagcccgctgtgtggtcccagctagccaaagcccaactgcagaagggcatggtaaaagaggccatcgactcatatattaaagcggacgacccctcttcttacatggaggtggttcaggcagccaacaccagcggcaattgggaggagcttgtcaagtaccttcagatggcacgcaagaaagctagagagagttacgtggagactgaactcatctttgcactggccaagacaaatcgtttggcagagctcgaggagtttattaatggacctaacaatgcacatattcagcaggtaggggatagatgttacgacgaaaagatgtatgatgccgcaaaacttttgtataataacgtcagcaactttggacgcctggcttcaacactggtccacctcggggagtaccaggcagcggttgacggtgccaggaaggcgaacagtacaagaacctggaaagaggtgtgcttcgcctgcgtggatggaaaggagtttcgactcgcacaaatgtgtggtctccacattgtcgttcatgctgatgagctcgaagaactaataaactactaccaggatagaggatattttgaagaattgataaccatgcttgaagcggcactcggcttggagcgcgctcacatgggcatgttcactgaactggcgatcctttattctaagttcaagccccagaagatgcgagaacatctcgagcttttttggtcccgagtgaacattcccaaagtgttgcgagcagctgaacaggctcatctgtgggccgaactagtgttcctgtacgataaatacgaagaatacgacaatgccatcattacaatgatgaatcacccgacagacgcttggaaggagggccaattcaaagatatcattaccaaggtcgccaatgtcgaactgtactaccgcgcaattcagttttacctggagtttaaacctctccttctgaacgacttgctgatggttctctccccaaggttagatcataccagggcagtgaattacttctctaaagtgaaacaactccccctcgtgaaaccctacctccggtccgtgcagaatcacaataacaagagcgtcaacgaatcccttaacaaccttttcattacggaggaagactatcaggctcttagaactagcatcgatgcgtacgataattttgacaacatctccttagcacaacggctggaaaagcacgagttaatagagtttagacgcattgccgcttatctcttcaaggggaataacagatggaagcagagtgtagaactttgtaaaaaggacagtttatacaaggacgctatgcagtacgccagcgaatccaaagatacagagctggctgaagaactgcttcagtggttccttcaggaagaaaagagagagtgctttggcgcatgtctcttcacttgctatgatctcctgcggcctgacgtggtgcttgaaacggcctggagacacaacataatggacttcgccatgccttatttcatacaagtcatgaaagagtacttaacgaaagtagataagctcgacgcctctgagtccctgagaaaggaagaagagcaggctaccgagacccagccaatagtttacgggcagccccagctgatgctcaccgctggtccctcagtcgctgtgcctccacaggccccattcggttatggctacactgcacccccatatggacaacctcagccaggcttcggatactctatgta

SEQ ID NO: 218620 - DNA, 4923 bp, synthetic construct
  misc_feature 1..4923: note = Description of Artificial Sequence: Synthetic coding sequence
  source 1..4923: mol_type = other DNA
atggcccagattctgcctgttagattccaggaacactttcagctgcagaaccttggcataaatcctgccaatattggcttctctacccttacaatggaaagtgacaagttcatttgtattagggagaaggtgggcgaacaagcccaagtgaccataattgatatgtctgatcctatggcacctatccgcagacctatcagcgccgaatccgccattatgaacccggcttccaaggtgattgccctgaaagccggaaaaactctgcagatcttcaatatagagatgaaatctaagatgaaagctcatactatggcggaggaggtgatcttttggaagtgggtgtctgtcaacaccgtcgccttggttacggagaccgctgtctaccattggagtatggagggtgattcacagcctatgaaaatgttcgaccgccacacaagcctggtcggttgtcaggtgattcactatcgaaccgacgagtaccaaaagtggttactccttgttggaatcagtgctcaacaaaacagagtggttggagccatgcagttgtactcagtggatcggaaggtgagccagcctattgagggccacgcagcagctttcgcggaatttaagatggaaggcaatgctaaacccgcaaccctgttctgttttgccgtgagaaatccgacgggaggaaagctgcatatcattgaggtggggcaacccgctgctggcaatcaacccttcgtcaaaaaggctgttgacgtgttttttccacctgaggcccagaacgacttcccagtcgcaatgcagatcggggcaaagcacggagtgatctacctaattacaaaatatggctacctgcacctgtatgatcttgaatctggagtctgcatctgtatgaaccgcatcagtgcagatacgatcttcgtcaccgccccacataaacccacttctggtatcatcggcgtaaacaagaaggggcaggtcctctcggtatgtgtcgaggaagacaacatcgtgaactacgccacaaatgttctccaaaatcccgacctcgggctgagactggccgtgcggtctaatcttgccggagcggagaagcttttcgtgagaaaattcaacaccttgttcgcacaaggcagttatgctgaagctgccaaagtggccgcttccgctcctaagggcatactccgcactagagagaccgttcagaagtttcaatcaattccagcccagtcaggccaggccagtcctttacttcaatactttggcattcttctcgaccagggccaacttaataagctcgagtccctagaactctgtcacttagttctgcagcaagggcgtaagcagcttctggaaaaatggctaaaggaagacaagctggaatgtagtgaagagttaggagatctggtcaaaaccactgacccgatgttggccctctcggtctacctgagggcaaatgtcccatctaaggttatccaatgctttgccgaaaccggtcagtttcagaaaatcgtgctgtacgccaagaaggtgggctatactcccgactggatcttcttacttaggggagttatgaagataagcccagagcagggtctgcagttctctagaatgttggtgcaggacgaggaaccgctagccaacatcagccagatcgtcgacatcttcatggaaaattcactaatccagcaatgcacttctttcctgctggatgcacttaaaaataaccggcctgctgagggcctcctgcagacttggcttctcgagatgaacctcgtgcatgccccacaagtcgctgacgccatattaggcaacaaaatgtttacacattacgatagggctcacattgctcagttatgcgaaaaggctggtctcctgcaacaggctcttgagcactacaccgatctgtatgatataaaacgggctgtagtccacacccacctcctgaatccggagtggctggtgaacttttttggttctctgtctgtcgaggatagcgtggagtgtctgcacgctatgctgtctgcaaatatccgtcaaaacctgcagctttgcgtgcaggtggcctctaagtatcacgaacaactgggcacacaggcacttgtggaactttttgaatcgttcaaatcttacaaagggctcttctatttcctgggctctatcgtgaattttagccaagatcctgacgtgcacttgaagtacattcaggccgcatgcaaaaccgggcagatcaaagaggttgaaaggatctgccgcgaatcttcctgctacaatcctgaacgcgtgaagaacttcctgaaagaagcgaagctgacggaccagctcccattgattatcgtgtgtgatcgtttcggcttcgtccatgacctggtcctgtatctgtacaggaataacctgcagcggtacattgagatctatgtccagaaagtcaaccccagccgaacccccgctgttatcggtggattgttggatgtggattgctcggaggaagttattaagcacctcatcatggccgtgcgaggacaattttcaactgacgaactcgtggctgaggtcgaaaaaagaaacaggctcaagctcctgcttccctggctagaatctcagattcaggaaggctgtgaggagccagccactcacaacgcactggcaaagatttacatcgactcaaataattccccagagtgttttctgagagagaatgcatactacgactcttctgtcgtaggtcggtactgcgaaaaacgcgatccccaccttgcctgcgtagcttatgaacgaggccagtgcgatcttgagttaatcaaagtgtgtaacgagaatagcttgtttaagtcagaggcgcgttacctggtatgtcgaaaggatcccgagctgtgggcccacgtactggaagaaaccaacccctccaggaggcagttgatagatcaggtcgttcagaccgctctctcagagacccgggatccagaggagatctcggtgaccgtgaaggcattcatgaccgcagacttaccaaacgaacttattgaactactggaaaagatagtcctagataattccgtatttagtgagcatcgaaacctgcagaatttgctaatcctcaccgctattaaggctgatagaacacgtgtcatggagtatatctccagactcgataactacgacgcactcgatatagccagtattgctgtctctagcgctctgtatgaggaagctttcacagtgttccacaaatttgacatgaatgcaagtgcaattcaggtcctgatcgagcatatcggcaacttggatcgcgcttacgagttcgctgagaggtgcaacgagccagctgtttggtcgcagctggcacaggcccagcttcagaaagacctggtgaaagaagcaattaacagctacatcaggggcgacgatccaagcagctatctcgaggtggtacagagcgcctctagaagtaacaactgggaggacttggttaaatttctgcaaatggctcgaaagaagggtcgtgagtcctacatcgaaacagagcttatcttcgcgctagcgaagacttctagagtcagcgagcttgaggattttattaatggtcccaataacgcgcacatccagcaggtcggagataggtgctatgaagaggggatgtatgaagccgcaaagctgttgtactccaacgtcagtaattttgccaggctggcctctacactggtgcatttaggagaataccaggcagccgttgacaatagcaggaaggcatccagcacacggacctggaaagaagtgtgttttgcttgtatggacggtcaggagttcagattcgcccagttatgtggactgcacatcgtgattcacgccgacgaactcgaggaactgatgtgctactatcaggatcgcggatatttcgaagaactgattttgctccttgaagctgctttaggcctcgagagggcgcacatgggaatgttcaccgagttagctatcctctacagtaaattcaagcctcagaagatgcttgagcatttggagctgttttggagtcgcgtgaatattcccaaagttttgcgcgctgctgagcaggctcatctgtgggctgagctggtgtttctgtacgacaaatatgaggagtacgataacgcagttctgactatgatgtcccatcctaccgaagcatggaaggagggccagtttaaggatattatcaccaaagtagcaaatgtggagctgtgctaccgagcattgcaattttatttagactacaagccattgttaattaatgacctgcttcttgtattatccccgaggctggaccacacgtggaccgtgtccttctttagcaaggcagggcagctcccacttgtcaagccgtacctaaggagtgttcagtcacataacaataagtccgtcaacgaggcattgaaccatctcctgacagaggaggaagattaccaggggttacgggcatccatcgacgcttacgataactttgacaatatctctctggcccagcagctggagaagcaccaactaatggagttccggtgtattgctgcctacctgtataagggcaataattggtgggcccagagtgtagagctgtgtaagaaagatcatctgtacaaggatgcgatgcagcacgcggctgaatctagggatgccgaacttgcacagaagctgctccaatggtttctggaagaaggaaaacgcgaatgtttcgccgcttgtctgtttacctgttatgatttgctgcggccagatatggtgctggaactggcgtggcggcacaacctggtcgatctagccatgccgtacttcatccaagtgatgcgagaatatctaagtaaagtggataagctggacgccctggagtcgctgcggaagcaggaggaacacgtgaccgagcctgcaccacttgtgtttgatttcgacggacatgagtag

SEQ ID NO: 218621 - DNA, 4752 bp, synthetic construct
  misc_feature 1..4752: note = Description of Artificial Sequence: Synthetic coding sequence
  source 1..4752: mol_type = other DNA
atggctcaaattctgccggtcaggttccaggagcacttccagctccaaaatttaggcattaatcccgcaaatatcggcttttcgacgctgaccatggagtccgataagttcatctgcatccgggaaaaagtaggggaacaagctcaggtgactattatcgatatgtccgatccaatggcacccattagaagacccattagcgccgaatccgccattatgaatccagccagcaaagtaatcgccttgaaagccggaaaaacactgcaaatctttaacatcgagatgaagagtaaaatgaaagcccacacaatggcagaggaagtgatcttctggaagtgggtaagtgtaaacacagtggcgcttgtaacagagactgcggtctatcactggagtatggaaggcgactcccagcccatgaaaatgtttgatcgacatacatcactcgtgggttgccaagtcatacactatcgaaccgacgagtaccagaaatggctattgctggttggcatctctgctcagcaaaacagggtagtgggcgctatgcaactgtattctgtggataggaaagtgtcacagcccatcgagggccatgccgctgcgtttgctgagtttaaaatggagggtaacgctaagcctgctacattgttctgcttcgccgtgcgcaaccctactggtggcaagctccatattatagaggttggtcaacctgcagctggtaaccagccatttgtcaaaaaagccgtagacgtgttctttccccctgaggcacagaatgatttccccgtggctatgcaaatcggcgctaagcacggcgtcatctacttaattacgaaatacgggtatctgcatctgtacgacctggaatctggcgtctgtatctgtatgaacaggatcagcgccgacaccatattcgtgacggctccgcataaaccaacttccggtattattggtgttaacaagaagggccaagtattatccgtgtgcgtggaggaagataatatcgtcaactacgcaacaaacgtgctgcagaatcccgacctaggcctaaggctagcagtcagatcaaacctggccggtgcagaaaagctcttcgtgcggaagttcaataccttgtttgcacagggcagctacgccgaggcagcaaaggtggcagcaagtgcgcctaagggaattctgagaaccagggagaccgtccagaagttccagagtattccagcccagtctggccaggccagtcccctactccagtattttggtattctccttgaccagggccagctgaataagctggagtcactggagttatgccacctcgttctgcagcagggccgtaaacagctgttggaaaaatggctgaaggaagataaactggagtgtagcgaagagttgggcgacctggtgaagactactgacccaatgcttgccctgagcgtttatttgagggctaatgtgccttccaaggtgatccagtgcttcgcagagactggccagtttcagaagattgtcctgtatgcaaagaaagtgggctatacacccgactggattttcttgctcagaggtgtgatgaaaatatctcctgagcaggggctccaattctccaggatgttggttcaggatgaggaacccctcgcaaacatatcacaaattgtagatatttttatggagaacagcctcattcagcagtgtaccagtttcctgcttgacgccttaaaaaataacaggcctgccgaggggttactgcaaacatggctgctggaaatgaatctggtacatgcccctcaagtggccgatgctatactgggaaataaaatgtttacccactacgatcgggctcacattgcacaattgtgtgagaaggccggattgctgcagcaggcactggagcattacactgacctctatgatattaaacgtgctgtagtacatactcaccttctcaatccggagtggctggtcaacttcttcggttcactgagcgtggaggattcagtggaatgtctccacgccatgttgtcagccaatattcgccaaaatctccaactttgtgtacaggttgccagcaagtatcatgagcaactggggacacaagcactggttgaactgttcgagtcttttaaatcatacaaggggttgttttatttcctgggatcaattgtgaacttctctcaggaccctgatgtccacctgaaatatattcaagctgcctgtaaaaccggccagatcaaggaggtggaaagaatatgcagggagagctcttgttacaacccagaaagggtaaagaacttcctcaaggaagctaagctaaccgatcagcttccgctgataatagtctgtgatagattcggcttcgttcatgatctggtactctatctgtatcggaataacctccagaggtacatcgagatatatgttcagaaagttaatccatccagaacacctgcggttataggcggactgctggatgttgattgcagtgaggaagtgatcaaacatctgattatggctgtgaggggtcagtttagcacggacgagctagtcgccgaggtggaaaagagaaaccggctgaagcttttactgccatggctggagagtcagattcaggagggctgtgaggagccagcaacacataacgccctggccaaaatttatatagattccaataattccccagagtgctttctgagggagaatgcatactatgacagcagcgttgttggccgttactgcgaaaaacgggatcctcatctggcttgtgttgcttatgaacgcggacagtgcgatttagagctgattaaggtctgtaacgagaactccctgtttaagtcagaggctagatacctggtctgtcggaaagatcctgagttatgggcgcatgttttagaggagactaatccgagccggaggcagttaatcgatcaggtggttcagactgccttatccgagacacgagacccagaagagatatcagttaccgtaaaagcttttatgacagcagaccttccaaacgagctgatcgagctgctggagaaaattgtccttgacaactctgtcttctccgagcaccgtaatttacaaaacctgctgatccttactgcaatcaaagcagaccggacccgagtgatggaatacatcagcagattagataactatgacgctcttgacatcgcctccatcgctgttagcagcgccctatatgaagaggccttcacagtttttcataagtttgatatgaacgcttccgccattcaggtgctcattgaacatatcggcaatttggaccgggcatacgagtttgctgagcgctgcaacgagcccgcagtctggtcccagctggctcaagcacaattgcagaaggacctcgtcaaagaggcaattaattcgtacattcgcggtgatgatccctcatcctacctggaagtggtgcagtcagcaagtagaagtaacaactgggaggatttagtgaaattcctgcaaatggcaaggaagaaaggcagggagagctatatcgagacagaactcatatttgcactggcaaaaacttctcgagtttctgagttggaggacttcatcaatggtcccaacaacgctcatatccagcaagtcggtgatagatgctacgaggagggtatgtatgaggcagcaaagttgttatattccaacgtctccaatttcgcacgactggcatctaccctggtacacctcggagaatatcaagcggcagtggacaattctcgtaaggccagcagcacacggacctggaaagaggtgtgctttgcctgcatggacggccaggaatttcggttcgctcaactatgtggacttcacattgtcatccacgccgatgagcttgaagagctgatgtgttactaccaggaccgaggctactttgaagaactgatcctgctattggaagccgctttggggttggaaagagcgcacatggggatgtttactgagctggcaattctctattccaagttcaaacctcagaagatgctggagcacttagagctcttctggtcccgagtcaatatcccgaaggtgttacgcgctgctgaacaggctcatctttgggctgaactggtgtttctctacgataagtacgaggaatacgacaacgccgtcttaaccatgatgtctcatcctactgaggcttggaaggagggccagtttaaggatatcattacaaaggtggcgaatgtggagctatgctatagggctctgcagttctacctggactacaaacctcttctgattaatgaccttctgttggtcctgtcacctaggctcgatcacacatggacagtgtccttcttttccaaagcagggcaattacctcttgtgaagccctatctacggagcgtacaatcgcataacaataagagcgtcaacgaagccttaaatcatctgctgacagaggaagaggactatcaggatgccatgcagcacgcagccgagtcaagagatgcagagttagcccaaaaactgctgcaatggttcctggaggaaggcaagagggagtgctttgccgcatgcctattcacctgctacgaccttcttcggcctgatatggtgctcgagttggcgtggcgccacaatcttgtggacctggccatgccatacttcattcaagtgatgcgggaatatctgtcaaaggttgataagctggatgcgcttgaaagccttaggaaacaggaagagcacgtgacagaacctgctcctcttgttttcgatttcgatggccacgagtag

SEQ ID NO: 218622 - DNA, 4923 bp, synthetic construct
  misc_feature 1..4923: note = Description of Artificial Sequence: Synthetic coding sequence
  source 1..4923: mol_type = other DNA
atggctcaaatactccctgtgcggtttcaagaacactttcagctacaaaacttagggatcaaccctgccaatattggcttttcgaccctgacaatggaaagcgacaagtttatctgcattcgagagaaggtgggagagcaagcccaggttacaatcatagacatgtcagaccctatggcccctatccggagaccaatcagcgccgagtctgctattatgaatcctgcatccaaagttatcgctctaaaagcaggcaaaaccctccagatatttaatatcgaaatgaaaagcaaaatgaaagcgcacactatggcagaggaagtcattttctggaaatgggttagcgtgaacaccgttgcactggtgacagaaacagccgtttaccattggagtatggaaggtgattctcagcccatgaagatgttcgatcggcacacgagcctggttggatgccaggtaattcattaccgcaccgacgagtaccagaaatggttgctgctcgtcgggatatccgcccagcaaaatcgtgtagtcggcgcaatgcagttgtactctgtggatcggaaagtttctcagcctattgaggggcatgctgccgcattcgctgagttcaagatggaagggaatgccaagcctgcaaccctgttctgcttcgccgtcagaaaccccaccgggggaaagttgcacattattgaagtgggccaacccgcagccggtaatcagccatttgtgaaaaaggcagtcgacgtgttcttccctccggaagcccaaaatgattttcctgtcgctatgcagataggagctaaacacggagtaatctacctaattacaaagtacgggtaccttcacttgtatgatctagaaagcggagtgtgcatctgtatgaataggatatccgccgatactatttttgtcaccgcaccacacaagccgacatcaggcataataggcgtcaacaaaaaagggcaagtcctcagcgtctgcgttgaagaggataacattgttaattacgctaccaacgtgctgcagaaccctgatctcgggttaagactcgccgtgcggagcaacctcgcaggcgctgaaaagctgtttgtgaggaagttcaacactctttttgcccagggcagttacgccgaggcggcaaaagtcgcagcatcggcccctaagggaattttacgcactcgagagactgtgcagaagttccagagtatccccgctcaatccggacaagcttcccctctcctgcagtacttcgggattctgttagatcagggacagttgaataaactagagagccttgagctttgtcacttggtcctgcagcaaggtagaaagcagctgttggaaaaatggttgaaagaggataagctggagtgctccgaggaactaggtgatttagtaaagacaaccgacccgatgctggccctttcagtctaccttagggcgaatgtcccttcaaaagtcatccagtgcttcgccgaaactgggcagtttcagaagatagtgctttatgcaaagaaagtgggttacactccggactggatcttcctgcttcgaggggtgatgaaaatttcgcctgagcagggattacagttctcacggatgctggttcaagatgaagagcctctggccaatatctctcaaattgttgatattttcatggaaaactccctaattcaacaatgcacttccttcctgctcgacgcactcaagaacaaccggccagccgaaggcctgctccaaacatggctgttggagatgaaccttgtgcacgccccacaggtggccgacgcaatcttgggcaataaaatgtttacacactatgaccgtgcacatatcgctcagctttgcgaaaaggctgggctcctccaacaggccctagagcattacaccgatctctatgacatcaagagggccgtagtacatactcacttgctgaaccccgagtggctggtcaacttttttgggagcctcagcgtggaggattcagtcgagtgcctgcatgccatgctgtctgctaacattagacagaatctccagctgtgcgtgcaggttgccagcaagtaccacgagcagttgggaacacaggccctcgtggagctgttcgagagctttaagagttataagggactgttctacttcctgggctccattgtcaactttagtcaagaccccgacgttcatctgaaatacattcaggcagcctgtaagaccgggcagatcaaagaagtggagcgcatttgccgggaatctagctgctacaaccctgagagagtgaagaactttctcaaagaagccaaactcaccgatcaactgccactgattattgtgtgcgatcgctttggcttcgtgcacgatcttgtcttatatctatacagaaataacttacaaaggtatatagagatctatgtacagaaggtgaatccgagccggacaccagcagtcatcgggggactgttggacgttgactgttccgaggaggtcattaaacatctgattatggctgtgaggggacagttctccaccgatgagctggtcgctgaagttgagaaaagaaacaggcttaagcttttgttaccttggctcgagagtcagatccaggaaggctgcgaggagccagccacccacaacgccttagcaaagatctacattgatagcaacaactctccagaatgctttttgcgcgagaatgcctattatgacagctctgttgtgggcagatattgcgagaagagggacccccacctggcatgtgttgcgtatgagcggggtcagtgcgaccttgaactaataaaggtatgcaacgaaaattctttatttaaatccgaggcaaggtacttggtgtgccgcaaagatcctgaactctgggcgcatgtgctagaagaaactaacccttcacgccgtcagttgattgaccaggtggtgcagaccgctctatccgaaacccgggaccctgaggaaatcagcgtgacagtgaaagctttcatgacagcggacctcccgaatgaattaatcgaactgctcgagaagatagtgttggataactccgtgttctcagaacatcgaaacctccagaatctcttaatactcacagcgattaaggcagatcgaactagggtgatggagtatatcagcaggctggataattatgatgctttagatattgcgagcatcgctgtctcctcggccctgtacgaagaggcctttaccgttttccacaaattcgatatgaacgccagcgcaatccaggtgctgatagagcatatcggcaacctcgacagagcttatgaattcgccgagcggtgcaacgagcctgctgtgtggagccaactggcacaggcgcagctacaaaaggatcttgtaaaggaggccattaacagctatattaggggggatgacccgtcgtcataccttgaagtggtccagagcgcttcacgatccaataattgggaagaccttgttaagtttttgcagatggctaggaaaaagggaagggagagctacatcgaaacagagttaatctttgctcttgccaagacgtctcgtgtgagtgagttagaagactttattaacggcccaaataacgctcacatacagcaagtcggggataggtgctatgaagagggcatgtatgaagccgcaaagttattgtatagtaatgtctccaacttcgccagactggccagtacactggtacatctgggtgagtaccaagctgcagtagacaacagcagaaaagcttcttcgacccggacttggaaggaagtgtgttttgcttgcatggatggacaggagtttcgtttcgcccaattgtgcggactccatattgtcatccatgccgacgaactcgaggagctcatgtgctactaccaagatcggggatactttgaagagctcatcctcctgctagaggctgcccttggtctggaaagggctcatatggggatgttcactgagctggccatcctgtattccaagttcaagccacaaaagatgctggagcacctagaactcttctggagtcgggtgaacatccctaaggtcctcagagcagccgagcaagctcatctctgggccgaacttgtcttcctatatgacaagtacgaggaatatgacaatgcggtccttactatgatgagccaccctaccgaggcgtggaaagaaggtcagttcaaggacatcatcacaaaggttgctaatgtcgaattgtgctaccgggctctgcaattttacctggattacaagcctcttctcatcaatgacttgctactcgtgttgtcacccagactggatcacacatggaccgtgagcttctttagcaaagccggacagctgcccctggtgaaaccgtacctgcgctctgtgcagtcacataataacaaatccgtgaatgaagcattaaaccatttactcaccgaagaggaggattatcaaggtcttcgagcttctatcgatgcatacgataactttgataacatatcccttgctcaacagcttgagaaacaccaactgatggaatttcgctgtattgccgcttacttgtataagggcaataactggtgggctcagtcggtcgaactgtgcaagaaagaccacctgtataaggatgccatgcagcacgccgcagaaagtcgcgatgcagaactggcacaaaagttattgcagtggttcctggaggagggcaaacgcgaatgctttgctgcctgcctcttcacttgctacgaccttttgaggccggatatggtgttagagctcgcgtggaggcataacctggtggacctggccatgccatactttatccaggtgatgcgcgagtacctctccaaagttgataagcttgatgcccttgagagtttgaggaagcaggaggagcatgttactgagcccgctcctctggtcttcgatttcgacggtcatgagtag

SEQ ID NO: 218623 - DNA, 747 bp, synthetic construct
  misc_feature 1..747: note = Description of Artificial Sequence: Synthetic coding sequence
  source 1..747: mol_type = other DNA
atggccgaactggacccattcggtgcccctgccggagctcccggtgggcctgctctgggaaatggcgtagcaggcgctggagaagaggaccccgctgccgctttcctggcacagcaggagagcgaaatagccggaattgaaaacgacgaggcctttgctatcctggacggcggagcgcctggaccccaaccccacggagagcctcctgggggtccagacgccgtggacggagtcatgaatggtgagtactaccaagaatccaatgggccaaccgacagttacgctgccataagccaggtggaccggcttcagagcgagccagaatctattcggaagtggcgcgaggaacagatggagcgactggaagcattggatgctaactcacgcaaacaggaggctgagtggaaagaaaaagcaatcaaggagcttgaggagtggtatgccaggcaagacgagcagttacaaaagacgaaggcaaacaacagggtggcagacgaagcgttctacaagcaaccgtttgccgacgtgattggctatgtcaccaacattaatcatccgtgttactcactggagcaagctgctgaagaagcttttgtgaatgatattgacgagtcctcaccaggaactgagtgggaacgcgttgccagactctgcgatttcaatccgaaatcatcaaaacaagccaaggacgtgtctcgaatgcgttctgtcctaatctccctgaagcaggccccactggttcattag

SEQ ID NO: 218624 - DNA, 657 bp, synthetic construct
  misc_feature 1..657: note = Description of Artificial Sequence: Synthetic coding sequence
  source 1..657: mol_type = other DNA
atggccgaactggatcctttcggcgcaccagcaggcgcacccggaggccctgctctcggcaatggcgtcgccggagctggagaagaagatcccgctgctgccttcttagctcagcaggagtctgagattgccggaatcgagaacgacgaggccttcgccatcctggatggcggtgcacccggacctcaaccacatggagagcccccaggaggacccgacgccgtcgatggagtaatgaatggggagtactaccaggaaagcaatggtcccactgacagctatgccgcaatcagccaggtggaccggcttcagagcgagccggagtcgatacggaagtggagagaggagcagatggaacggctggaggctttggacgctaacagccggaagcaagaggctgaatggaaggagaaagctattaaagaactggaagagtggtacgcgaggcaggatgaacaactgcaaaagactaaggccaataatcgtgccgctgaggaagcttttgttaacgatattgacgaatcctccccaggtacggaatgggagcgtgtagctcgattgtgtgatttcaacccaaaaagctctaagcaggcaaaagatgtcagccgaatgagatcagttctcatttccctaaaacaggcaccactcgttcattag

SEQ ID NO: 218625 - DNA, 711 bp, synthetic construct
  misc_feature 1..711: note = Description of Artificial Sequence: Synthetic coding sequence
  source 1..711: mol_type = other DNA
atggccgagctggacccttttggcgctccagcaggagcccctgggggacccgcattgggaaacggagtggctggagcaggggaggaggacccagctgcggcattcctcgctcaacaggagtcagagatcgctggcatcgagaacgacgaagcatttgctattctggatgggggagctccaggccctcagccccatggggagccaccagggggacctgatgctgtggacggcgtaatgaacggcgagtactaccaggagagcaatggcccaaccgattcctatgcagctatttcccaagtcgatcggctgcaatctgagccagaaagcatccgaaagtggagggaagagcaaatggagcggctcgaagccctggacgctaactcccggaaacaggaagctgagtggaaagaaaaagccattaaggagttggaggagtggtacgcacgccaggacgagcaactccagaagaccaaggccaataatagggttgcagatgaagccttttataagcagccgtttgccgacgtgatcgggtatgtggccgcagaagaggctttcgttaacgacatagacgagtctagtcccggtacggagtgggagagagtagcaagactctgcgattttaacccaaagtcctcaaaacaagccaaggacgtaagcagaatgcgctctgtcctgatctctctaaagcaggctcccctcgtgcattag

SEQ ID NO: 218626 - DNA, 747 bp, synthetic construct
  misc_feature 1..747: note = Description of Artificial Sequence: Synthetic coding sequence
  source 1..747: mol_type = other DNA
atggccgagttggacccctttggtgcccctgctggcgcaccaggagggcctgccttagggaatggagtcgcgggagccggtgaagaggacccagctgccgctttcctggctcagcaagaatccgaaattgccggaattgagaatgatgaagccttcgccattctggacggtggggctcccggaccacaaccccacggtgagccccctggcggacctgatgctgtggatggggttatgaacggagaatactatcaggagtctaacgggccaactgacagctacgctgccatcagtcaggtcgaccgactgcagagcgagccagagtcaatcagaaagtggcgggaggaacaaatggaaagactggaggcgctggacgctaatagccgaaaacaggaagccgagtggaaggaaaaagcgatcaaggagcttgaggaatggtacgccagacaggatgagcagctgcagaaaactaaggccaataacagggtagcggatgaagccttttacaagcagccatttgcggatgtcataggatatgtcactaacattaatcatccatgctactccctggagcaggctgcagaagaggcattcgtcaatgatatcgacgaaagctctccagggaccgagtgggagcgtgtggcacggctgtgtgatttcaaccccaaatcatcaaaacaggccaaggacgtcagtaggatgagaagcgtgctcattagcctaaagcaggcccctctggtccactag

SEQ ID NO: 218627 - DNA, 693 bp, synthetic construct
  misc_feature 1..693: note = Description of Artificial Sequence: Synthetic coding sequence
  source 1..693: mol_type = other DNA
atggcagagctcgatccttttggggctccggcaggtgccccaggcggtcccgctttagggaacggagtggcaggcgcaggggaagaagatccagctgctgcttttctcgcccagcaggagagcgagatcgctggtattgagaacgatgaagcgtttgctatcctggatggtggagcacccggtcctcaacctcatggcgagcctcctggcggtccggatgccgtcgacggggtaatgaacggcgaatactaccaggagagcaacgggccaactgactcatatgctgcaatatctcaggttgacaggctgcagtctgaaccggagagcattcgcaagtggcgcgaggagcagatggagcgcttggaggcactcgacgctaatagccgaaaacaagaagcagagtggaaagaaaaagccattaaggagctcgaagaatggtacgcaaggcaggatgagcagcttcaaaaaactaaagccaacaactcaacgaatattaaccacccttgctatagcctagagcaggccgcagaagaggcctttgtgaatgacatcgatgaaagtagtcccggaaccgagtgggagagggttgctcgcctgtgcgatttcaacccaaaaagtagcaagcaggctaaagacgtaagtcgcatgcggagcgtattgatctccttgaagcaggccccactcgtccactag

SEQ ID NO: 218628 - DNA, 693 bp, synthetic construct
  misc_feature 1..693: note = Description of Artificial Sequence: Synthetic coding sequence
  source 1..693: mol_type = other DNA
atggccgaactggacccttttggagcccctgccggagccccagggggtccggcattgggaaatggggtggcaggcgctggagaggaagaccctgccgctgcattcctggcccaacaagaatcagagatcgccggtatcgagaatgatgaggcatttgcaattctggacggtggggctcctggaccccaaccgcacggggagcccccagggggtccagatgccgtggacggggtaatgaacggagagtattatcaagaatccaatggcccaacggatagctatgccgctatcagccaggtggatagactgcagtctgagccagaatctatcaggaaatggagggaagagcagatggaacgcctggaagccctagacgccaactcacgcaaacaagaagctgagtggaaagagaaggccataaaagagctagaagaatggtacgctcggcaagacgagcagctgcagaagactaaagccaataactccaccaatattaaccatccgtgctattcactggagcaagccgctgaagaagctttcgtaaacgatatcgacgaatcatcaccaggtaccgagtgggaacgggtggctcgcctgtgcgatttcaatcctaagagctctaaacaagccaaagatgtgtctcgcatgcgtagcgtattgatcagtctgaaacaggcccctctcgtgcactag

SEQ ID NO: 218629 - DNA, 501 bp, synthetic construct
  misc_feature 1..501: note = Description of Artificial Sequence: Synthetic coding sequence
  source 1..501: mol_type = other DNA
atggccgagctggacccttttggggcacccgctggggctccaggcggtccagccctgggcaacggtgtggcaggtgccggagaggaggatcccgctgccgctttcctggcccaacaagagtccgagattgccggaattgagaatgatgaggcctttgccatcctggacgggggagcccctgggccacagccgcacggcgagccacctggtggacctgacgccaacagcaggaagcaggaagctgagtggaaggaaaaggctataaaggagctcgaggaatggtacgcccgtcaggacgaacagctgcagaaaaccaaggcgaataaccgggctgctgaggaggcttttgtgaacgacatcgacgaatcctcccccggtaccgagtgggaaagggtggctagactgtgtgacttcaatcccaagagttcaaagcaggcgaaggatgtcagcaggatgagatccgtgctgatcagtctcaaacaggcccctctggtgcactag

SEQ ID NO: 218630 - DNA, 690 bp, synthetic construct
  misc_feature 1..690: note = Description of Artificial Sequence: Synthetic coding sequence
  source 1..690: mol_type = other DNA
atggccgatgactttggttttttctccagctccgagagcggagcgcctgaagccgcagaagaagatcctgctgccgcatttctggcccaacaggagagcgagatcgctgggatagagaatgacgaagggttcggtgcaccagccggatcccatgctgcgccagctcaaccaggtcctacaagtggcgctggttctgaggatatggggacaaccgtaaatggtgacgttttccaggaagcaaatgggcctgctgacgggtacgccgcaatagctcaggccgatagacttactcaagagcctgagtctatccgcaaatggcgggaggaacagcgtaaacggttgcaagagctcgatgccgcatccaaggtcacagagcaggagtggagggaaaaggctaaaaaagatctcgaggaatggaaccaaagacagtctgaacaggttgagaagaacaaaattaacaaccggatcgcagacaaggctttctatcagcagcctgacgccgacatcatcggatacgtcgccagcgaagaggcattcgttaaggagtccaaggaggaaactcccggtacagaatgggagaaagtggcccaactttgcgactttaatcccaaaagctcaaaacagtgcaaagatgtgagtaggctccggagtgtgctgatgtccttaaagcagactcccttgtcacggtag

SEQ ID NO: 218631 - DNA, 636 bp, synthetic construct
  misc_feature 1..636: note = Description of Artificial Sequence: Synthetic coding sequence
  source 1..636: mol_type = other DNA
atggcagacgactttggctttttttcctcctctgaaagcggagcgcctgaagctgcggaggaggatcccgctgccgcttttttggcccaacaagaatctgagattgccggaatcgagaacgatgaaggattcggcgcacccgctgggtctcatgctgctccagctcagcctgggcctacctccggggcagggtccgaagatatgggcacgactgtaaatggggacgttttccaggaggcaaatgggcctgcagacggctatgctgccatcgcccaggcagatcggctgacccaggaaccagaatcaatacggaaatggcgagaggagcagaggaagaggttacaggaactggacgccgctagcaaggtaaccgagcaggaatggagggagaaagcgaagaaggaccttgaagagtggaaccagaggcagagcgaacaagtagagaagaacaaaatcaacaatagggcaagtgaggaggcattcgtgaaagagtcgaaagaagaaacccccggaacagaatgggagaaagtcgcacagctttgcgacttcaatcccaagagcagtaagcagtgcaaggatgtgtcaaggctacgctcggtattaatgagcttgaagcagacccctttgagtcgctag

SEQ ID NO: 218632 - DNA, 405 bp, synthetic construct
  misc_feature 1..405: note = Description of Artificial Sequence: Synthetic coding sequence
  source 1..405: mol_type = other DNA
atggccgacgactttgggttttttagttcaagcgagtcaggcgctccagaggccgctgaggaggaccctgcagctgcctttctagcccaacaagaatctgagatcgctggaatagagaacgacgagggtttcggcgcacctgccggatctcacgctgcgcctgctcagccagggccaacgtcgggggctggctctgaggatatgggcaccacagtgaatggcgacgttttccagcctgtgcaccatcagcgagtacaattacagacgcagctgcctatccaaccaaaagacgagccagctcacaactacagcagcagtatctggcactctcaggggcagggacagaaaggacctgcgggactgagactgcctacatctgcccagatcttgagtccatttccatag

SEQ ID NO: 218633 - DNA, 636 bp, synthetic construct
  misc_feature 1..636: note = Description of Artificial Sequence: Synthetic coding sequence
  source 1..636: mol_type = other DNA
atggccaacgccggattgcagctgctaggctttattctagcattcttgggttggatcggagcaatcgtttccacagccctgccgcagtggcgcatttacagctacgccggtgacaacattgtcacagcccaggccatgtatgaaggactatggatgtcctgcgtgagtcaatcaacgggccaaattcagtgtaaggtgttcgattctctgctgaatctgtccagcaccttgcaggctaccagagcactaatggtggtcggaatcttactcggtgtgattgcaatcttcgtggctactgtaggcatgaagtgtatgaaatgccttgaggatgatgaggttcagaagatgcgaatggctgttatcggcggtgccattttcctgcttgctggtctggctatccttgtcgctactgcttggtatggaaacaggatcgtgcaggagttttatgacccgatgacgcccgtaaacgctcgctacgaattcgggcaagcgctgtttacagggtgggcagccgcatcactttgccttcttggtggtgccttattgtgttgctcctgtccccgaaagactaccagttaccctactcctcgtccctacccaaaacctgcaccctcctccggcaaagattacgtctag

SEQ ID NO: 218634 - DNA, 501 bp, synthetic construct
  misc_feature 1..501: note = Description of Artificial Sequence: Synthetic coding sequence
  source 1..501: mol_type = other DNA
atgtacgaaggactgtggatgtcatgtgtttcccagagtactggtcagatccagtgcaaggtgtttgactcccttctgaaccttagcagtaccttacaggccacaagagcactaatggtggtggggatactccttggagtgatagccatctttgtggccacagtgggtatgaaatgtatgaagtgcttggaagatgatgaagtgcaaaagatgcgcatggctgtgatcggcggagctatttttctgcttgctggtctggcaatactcgttgccactgcctggtatggcaaccggattgtgcaggaattttatgatccaatgactcctgtgaatgcccgatacgaatttgggcaggctctattcactggttgggcagcagcaagcttatgcctgctcggaggcgcacttctgtgctgtagctgcccacgtaagactacaagttatccaacccccaggccctacccgaaaccagctccctcctcggggaaggactacgtgtag

SEQ ID NO: 218635 - DNA, 624 bp, synthetic construct
  misc_feature 1..624: note = Description of Artificial Sequence: Synthetic coding sequence
  source 1..624: mol_type = other DNA
atggtcgcaacttgtctgcaagtggtggggttcgtgacctcctttgtggggtggattggggtcatagtcacgactagtaccaacgactgggtggtgacatgcgggtatactatccctacctgccgaaagttggacgaactgggttcgaagggcctatgggctgactgtgttatggccactggcctttaccactgcaaacccttggtggacatcttaattctgcctgggtacgtgcaggcatgccgggctttgatgatcgctgctagcgtgctaggtttaccagccatccttcttctcctgactgttcttccttgtatcagaatgggtcaggaaccgggagtagctaaatatcggagggcacagctcgccggtgtgctgctgatccttctcgctctgtgtgctctggtagccactatttggtttcctgtgtgtgcccacagagaaacgaccatcgtgtcattcgggtattcactttacgcgggttggatcggtgcagtgctgtgcctggtgggaggctgcgttatcctgtgctgcgcaggtgatgcccaggcctttggtgagaatcgcttttattacaccgccggttcgtccagccctacgcacgctaagagcgcacacgtctag

SEQ ID NO: 218636 - DNA, 498 bp, synthetic construct
  misc_feature 1..498: note = Description of Artificial Sequence: Synthetic coding sequence
  source 1..498: mol_type = other DNA
atggtggcaacatgcctacaagtggtggggtttgtgactagcttcgtgggctggatcggggtaatcgtaacaacaagtacaaacgattgggtcgtaacatgtggatatactatccccacctgccggaagctagatgagcttgggtcaaaaggcctctgggcagattgcgttatggcaaccgggctttaccattgcaaaccactggttgacatccttatcttaccaggctacgtgcaggcgtgcagggccctgatgatagccgcttccgtcttgggactaccggctatactgctcttgctgaccgtgctcccctgcattcgcatgggccaggagcccggagttgccaagtaccgcagggcgcagttggctggagtgcttctgattctgttgggatgtcagctcctgtgggcaaagacagagagtagcctgcactcacagcacctggtccaatttaagcaaaaatacttggaagatttcagttacctgcaaggggactag

SEQ ID NO: 218637 - DNA, 498 bp, synthetic construct
  misc_feature 1..498: note = Description of Artificial Sequence: Synthetic coding sequence
  source 1..498: mol_type = other DNA
atggtggccacttgtttacaagttgtgggcttcgtgaccagctttgtgggttggatcggtgtgatcgtgacaacgtcgactaatgattgggtggtaacatgtgggtatacaatccctacctgtcgcaagctggacgagcttggaagtaaaggactgtgggcggactgcgtcatggctacaggcctgtatcactgcaaaccgctggtggacattctgatactaccgggatacgttcaggcatgtcgcgctctgatgatcgccgcttcggtattgggtctccccgctatactgctattactgacagtcctcccttgtattcgaatgggacaagagcccggagtggcgaagtatcgtcgggcacagctggccggtgttctgctcatacttctgggctgtcaactcctgtgggccaaaactgagtcttctctccatagccagcacttagttcagtttaagcagaagtatctagaggacttttcttatctgcagggcgattag

SEQ ID NO: 218638 - DNA, 720 bp, synthetic construct
  misc_feature 1..720: note = Description of Artificial Sequence: Synthetic coding sequence
  source 1..720: mol_type = other DNA
atggcgagcacggccgtccagctgctggggttcttgttatcctttcttgggatggttgggaccctcattaccaccatacttcctcattggcgcagaactgcccatgtgggcaccaatattctgacagctgtcagctatctgaaaggtctgtggatggaatgtgtttggcatagcacgggaatctaccagtgtcagatctaccggagcctgctggctcttccacaggacctgcaggctgctcgtgccctcatggtgattagctgtctcctgagcggaattgcttgtgcttgtgctgtgattgggatgaagtgtacgagatgtgcaaaagggacaccagctaaaaccacgtttgcaatactcggcggaacgttattcattctcgccggtttgttgtgtatggtggctgtcagttggaccacaaacgatgtagtccagaacttctataaccctttacttcctagtgggatgaaatttgaaattggccaggccctctatctgggcttcatctcgagctccctgagcctgattggcggaacccttttgtgtctttcttgtcaggatgaggcgccatataggccttatcaggcaccccctcgggctacgaccaccactgccaacactgcccctgcttaccaacccccagcagcatataaggacaaccgcgcaccatctgtgacatctgccacccactccgggtatcgccttaacgattatgtttag

SEQ ID NO: 218639 - DNA, 720 bp, synthetic construct
  misc_feature 1..720: note = Description of Artificial Sequence: Synthetic coding sequence
  source 1..720: mol_type = other DNA
atggcaagcaccgcagttcaactgttaggcttcctgttgagctttcttggtatggtaggaacactgatcaccaccatcctgccgcattggagaaggactgctcatgtcggtacaaacatcttgaccgcagtttcctacctaaaaggactatggatggagtgcgtgtggcattctaccggcatctatcagtgccagatctatcgctccctcttggccctaccgcaggacctgcaggcggcacgcgcactgatggtgatctcatgcctgcttagcggtattgcgtgcgcctgcgcggtgattgggatgaaatgtacccgctgtgcaaagggtacccccgctaagacgacatttgccatcttgggcggtaccctcttcatcctggcgggactgttatgtatggtcgctgttagctggacgaccaacgacgtggtgcagaatttctataaccctttgctgccttccgggatgaaatttgaaattggacaggctctgtacctgggattcatttcctcctccctgagtctcatcgggggtacccttttatgtttgagctgtcaggacgaggcaccgtaccgcccttatcaggcacctcctagggctaccacaacaacggctaacacagcgcctgcctatcagccgccagctgcatacaaggataacagggccccaagtgtcacctctgccacacattccgggtacaggctgaacgattacgtttag

SEQ ID NO: 218640 - DNA, 720 bp, synthetic construct
  misc_feature 1..720: note = Description of Artificial Sequence: Synthetic coding sequence
  source 1..720: mol_type = other DNA
atggcaagcacggctgtgcagctgctgggttttcttctgagcttcctgggcatggtgggaaccctcatcaccacgatcctacctcattggcgccgaaccgcccacgtgggcactaacatacttactgcggtgagctatctgaagggtctctggatggagtgtgtctggcactcaacaggaatttatcagtgtcaaatatatcgttcactgctggccctgccacaggacctccaagctgcacgcgcactcatggttatctcctgtctgctctccggcatcgcctgtgcctgtgcagtgattgggatgaaatgcacccgctgcgcaaaggggactccagctaagaccacatttgcgatcctggggggtacactgtttatcctggcagggctgctctgcatggtagctgtgtcctggactaccaatgatgttgtccagaatttctataaccccctcctcccaagcggtatgaagttcgagattggccaggccctgtacctcgggttcatttcatcttcattatctctaatcggcggaactctgctttgcttgagctgtcaggacgaagcgccatacaggccctaccaggcaccgcctcgcgcaaccacaaccaccgccaacacagcgccagcctatcagccccctgcggcttacaaggataatagggccccttcagtgactagtgccactcactcaggctaccgactgaacgactatgtgtag

SEQ ID NO: 218641 - DNA, 720 bp, synthetic construct
  misc_feature 1..720: note = Description of Artificial Sequence: Synthetic coding sequence
  source 1..720: mol_type = other DNA
atggccagcaccgccgtccagctgttgggattcctgctgagcttccttggcatggtgggcacgctaattaccactatcctcccccactggagacgcaccgcccacgttggaacaaacatcctgacagcagtgagctacttgaagggcctgtggatggagtgcgtctggcattcaacaggcatataccagtgtcagatctatcgaagtttactggctcttccccaggatcttcaggcagccagagccttaatggtcatctcgtgcctgctgtcaggcatcgcctgcgcctgtgccgtgattggtatgaagtgcacccgctgtgctaagggcactcctgcaaagaccaccttcgctattctaggcggaactctcttcattctggctggcctgttgtgcatggtcgcagtgagttggacgacaaatgatgtggtgcagaacttttacaatcctctcttacccagtggcatgaaattcgagatcggtcaagctctttacctgggcttcatcagttcttccttaagtctgattggcggaacactgctgtgcctcagttgccaagatgaggctccctacaggccctaccaagcaccgccacgggcaactacgactactgctaacaccgccccagcgtatcagcccccagccgcatataaagacaacagggccccttccgtcacatccgcaacgcacagcggttaccgtctaaacgattatgtctag

SEQ ID NO: 218642 - DNA, 720 bp, synthetic construct
  misc_feature 1..720: note = Description of Artificial Sequence: Synthetic coding sequence
  source 1..720: mol_type = other DNA
atggcctctactgcggtgcagctcttgggtttcctgttgagcttccttggcatggtgggaactctgatcacaacaattctccctcactggaggagaactgcccatgtgggcacgaatatactcacggccgtgtcttacctcaagggcttgtggatggagtgtgtttggcattctactggcatctatcagtgccagatctaccggagcctgctcgccctgccccaggacttgcaagctgctcgggcactgatggtcatcagctgcctgctgtccggtattgcttgtgcttgtgctgttatcggcatgaagtgcacacgctgtgccaagggcacccctgccaagaccacttttgccatcctgggtggcactctctttatacttgccggattactgtgtatggtagctgtgagctggaccactaatgatgtggtgcagaacttttataatcccctgttacccagtggaatgaagttcgaaattggtcaagcactgtatttgggcttcatctcctcttccctctccctgattggcggaacactgttatgtctgtcttgccaagacgaagccccttaccgcccttaccaggcgcctccccgtgccaccacaactactgccaacactgctccagcttaccaacccccagccgcttacaaagataatcgggctccatctgtgacctccgcaacccactccggatacagactgaacgattacgtatag

SEQ ID NO: 218643 - DNA, 918 bp, synthetic construct
  misc_feature 1..918: note = Description of Artificial Sequence: Synthetic coding sequence
  source 1..918: mol_type = other DNA
atgacgtcccgcacaccccttctggtgactgcctgtctgtactattcctattgcaactccagacatctgcagcagggcgtaaggaaatctaaacgtcccgtgtttagccattgtcaagtcccagaaacgcagaagactgacacccgacacttaagcggcgctagagcaggagtctgtccatgttgccatcccgacggcttgctggctactatgcgcgacctgctacagtatatcgcctgcttctttgccttcttctcagcgggttttcttatcgtggccacatggaccgactgttggatggtcaatgcggatgattccctggaagtgtcaaccaaatgcaggggcctttggtgggaatgtgtgactaacgcattcgacggtataagaacctgcgatgagtatgatagcatcctggcggaacaccctttaaaactggtggtgacgagggccctcatgatcaccgcagatatactggcgggatttgggtttctcacactgctcctaggtctagactgcgtgaagttcctgcccgatgagccatatatcaaggtgcgcatctgttttgtggccggagcgacgcttctgatcgccggaacaccaggcattataggcagcgtgtggtacgcggtcgatgtctatgtggaaagaagcacattggtactgcacaatatcttcctgggcatccagtataagttcggctggagctgttggttggggatggctggctctctgggatgtttcctcgctggggctgtcctcacctgttgtctctatttgttcaaggatgtcggtcccgaacggaactacccgtactctctccgcaaggcttattccgcagccggagtctccatggccaaatcctactccgccccacgtacagaaactgcaaagatgtatgccgtggatacacgtgtgtag

SEQ ID NO: 218644 - DNA, 360 bp, synthetic construct
  misc_feature 1..360: note = Description of Artificial Sequence: Synthetic coding sequence
  source 1..360: mol_type = other DNA
atgacctctcgtactcctttgctggtgacagcttgtctctactatagttattgcaatagcagacacctccagcagggagtgcgtaaatccaaacgtcccgtgttctcccactgccaggttcctgagacgcagaaaaccgacacccgacacctctccggggctcgtgccggtgtttgcccatgctgccacccagatgggctcttagctacgatgcgcgatctgcttcagtacattgcctgtttttttgctttcttttcagccggattcctgatcgttgcgacttggaccgactgctggatggtgaatgcagacgattcccttgagatgctcgacctcagggagaccatcctgatcccatag

SEQ ID NO: 218645 - DNA, 675 bp, synthetic construct
  misc_feature 1..675: note = Description of Artificial Sequence: Synthetic coding sequence
  source 1..675: mol_type = other DNA
atggcaaattccggcctccagctcctgggctacttccttgctctgggagggtgggtcggtatcatcgcctctaccgccctaccccagtggaaacaaagtagctatgctggagatgcaattatcaccgctgtcggattgtatgaaggcctctggatgtcctgcgccagccaatccaccggacaggttcagtgcaagctttatgattcattattggcacttgacgggcacattcagagcgcgcgagctttgatggtcgtggccgtgctgctcggttttgtggccatggtactttccgtcgtgggtatgaaatgtactcgcgtgggcgattcaaatccaatcgccaagggtagagtggcaattgccggaggcgcactgttcatcctggccggtctgtgcaccttgaccgcagtcagctggtatgctacattggttacacaggaattcttcaacccatcaacccccgtgaacgcacgatatgaatttggccctgccctgttcgtggggtgggcctctgctggattggccgtgctgggcggatcctttctgtgctgcacatgcccagagccagaacgaccgaacagttcgcctcagccataccgacccggtccgagcgcagcagcgagagaaccagttgtgaaactgccggcttccgccaagggcccactaggagtgtag

SEQ ID NO: 218646 - DNA, 636 bp, synthetic construct
  misc_feature 1..636: note = Description of Artificial Sequence: Synthetic coding sequence
  source 1..636: mol_type = other DNA
atggcgaacagcggacttcagttgctgggctactttctcgccctgggcggttgggtgggcataattgctagtactgccctccctcagtggaagcagtcatcctacgctggagacgccatcattactgccgtcggcctgtacgagggtctgtggatgtcttgtgccagccagtctacaggccaggttcagtgtaagctctatgatagcttgttagccttggacggtcacattcagagtgccagggctttgatggtcgtcgctgtgctgttagggtttgtggccatggtgctcagcgtggtgggcatgaaatgtacacgggttggcgacagtaatccaatcgcgaaaggcagggttgcaatcgccggaggcgcactattcatacttgctggcctgtgcactttgacagcggtcagttggtacgccaccttggtaactcaggaatttttcaaccccagtacgccggtgaacgccagatacgaattcggaccggcactgtttgtgggatgggccagcgccggactcgccgtgttgggcggttcttttttatgctgcacctgccctgagcctgaacggccaaattcttctcctcagccgtaccgccctgggccatctgccgcagccagggaatacgtgtag

SEQ ID NO: 218647 - DNA, 657 bp, synthetic construct
  misc_feature 1..657: note = Description of Artificial Sequence: Synthetic coding sequence
  source 1..657: mol_type = other DNA
atggcaaacagcggcttacagcttttaggctatttcctggctttgggagggtgggtggggataatcgcttcaaccgccctcccacagtggaaacagagctcctatgctggcgacgcaataatcacagctgttggcctatatgaagggctttggatgtcttgcgcaagccagtcaacaggtcaggtacagtgtaaactctatgacagcctgctggccctagacgggcacatccagtcagcaagagccctcatggtggttgcagtgctgctgggcttcgtcgccatggtcctcagcgtggtgggcatgaagtgcactcgtgtaggcgatagtaatcctattgccaaggggagggtggctatcgctgggggagctctctttatcctggcgggaatgaacctggcacagccctgttcttgggccggacctcaactggcatggccttgctgggctgctccgagctcggctgcacacgccaggagtcaacgggatccaaccgccgctcacagccccatcggactcgaccctcttctgctaccagaatccacctccgaacttaggctgccctggccggctcctcatccagtggcgccactgccctccatccagcctgcctcacagcaccctggacagggccactggggcatagggtgggcttag

SEQ ID NO: 218648 - DNA, 663 bp, synthetic construct
  misc_feature 1..663: note = Description of Artificial Sequence: Synthetic coding sequence
  source 1..663: mol_type = other DNA
atgagcatgggtttagagatcacaggcactgcactcgccgttttgggttggcttggcactattgtgtgctgtgccttgcccatgtggagagtctccgctttcatcgggagcaacatcattacgagtcaaaatatttgggagggactctggatgaactgcgtggtgcaatccaccggccaaatgcagtgtaaggtgtacgactctctcctggcccttccgcaggatcttcaggccgctcgcgcactcattgtagtcgctattttactcgctgctttcgggctgctggtcgctctggttggcgctcagtgcactaactgtgttcaggacgataccgccaaggcaaagattaccattgtggcaggagtattgttcctcctggctgccctgctcacgctcgttccagtttcgtggtccgcgaataccatcattagggacttctataatcccgttgtgccggaggcccagaaaagggagatgggcgctggactttatgtcggatgggccgcagcagccttgcagctgcttggaggtgcgctcctctgctgctcctgtcccccacgcgaaaagaaatacacagctacgaaagttgtgtacagcgcacccagaagcaccggtccaggtgccagcctgggcacaggctacgatcggaaggactacgtctag

SEQ ID NO: 218649 - DNA, 630 bp, synthetic construct
  misc_feature 1..630: note = Description of Artificial Sequence: Synthetic coding sequence
  source 1..630: mol_type = other DNA
atggcatccatgggccttcaggtgatgggcatcgctctggctgtgctggggtggctggccgtcatgctttgctgcgccctgcccatgtggcgcgtgacagcctttataggcagcaacattgttacttcccagaccatttgggagggattatggatgaactgtgttgtgcagagcaccggtcagatgcagtgtaaagtgtacgacagtcttctggccctaccacaggatcttcaggcagcgcgtgcactagtcataatcagcatcatcgtggcggcacttggggtcttgctgtcggtcgttggcggtaagtgcactaattgcctcgaagacgaatccgccaaagctaaaacaatgatcgtggccggagttgtgttcttactggccggactcatggtcatcgtgcctgtgagttggactgcccacaacattattcaggacttttacaaccctctcgtcgccagtggtcaaaaacgggagatgggagctagtctgtatgtgggttgggctgcctccggccttcttctgctgggaggcggattgctttgttgtaattgtcctccccgtaccgataaaccttatagcgctaaatattccgcggctaggtccgccgctgcttccaattatgtgtag

SEQ ID NO: 218650 - DNA, 630 bp, synthetic construct
  misc_feature 1..630: note = Description of Artificial Sequence: Synthetic coding sequence
  source 1..630: mol_type = other DNA
atggctagtatgggcctgcaagtgatgggcatagccctggcagttctagggtggcttgccgtaatgttatgttgcgccctgcccatgtggcgcgtgacggccttcatcggctcaaacattgttacgagtcagacaatctgggaaggtctgtggatgaattgtgtggtgcagtccacaggccagatgcagtgtaaggtgtatgattcgctgcttgctttgccgcaggacttgcaggcagcgcgtgctctggtcattatctctatcatagtggccgctttaggggtgcttttatctgtggtaggcggaaagtgtacaaactgtttggaagatgagagcgctaaggctaaaaccatgattgtggctggtgtggtttttctcctcgccggtcttatggttatcgtgccagtcagctggactgcccataacatcatacaggatttctataaccccctcgtcgcgtccgggcagaagagagagatgggtgcctcactttatgtgggctgggcggcttctggtttgctcttgcttggcggtggcctcctgtgttgcaactgcccaccgagaaccgataagccctactccgccaaatattcagcagcacgcagtgccgctgcaagcaattacgtgtag

SEQ ID NO: 218651 - DNA, 630 bp, synthetic construct
  misc_feature 1..630: note = Description of Artificial Sequence: Synthetic coding sequence
  source 1..630: mol_type = other DNA
atggccagtatgggactacaggtaatggggatagccctggctgtgctcggctggctggcagtaatgctgtgctgtgctttgcctatgtggagagtgactgcgtttattggatccaatattgtgacttcacagactatctgggaagggctgtggatgaactgtgtggtgcagtctactggccagatgcaatgcaaagtctacgatagtttgctcgccctgccacaagatctacaggcggctcgggctcttgttattatatccataatcgtggctgccctaggtgtgctgctgtctgtagtcggaggaaagtgtacaaactgcctggaggacgaatcagctaaggccaagaccatgattgtggctggggttgtattcctgctggcaggactgatggtgatagttcctgttagctggactgctcacaacattatccaggacttctacaaccccctcgttgccagcgggcaaaagcgggagatgggggcatccctctacgtgggatgggctgcgtcaggattgctgctgttggggggagggctgttgtgctgtaactgccctccaaggaccgacaagccctactcagccaagtacagcgccgctcgttcagcagccgctagcaattacgtgtag

SEQ ID NO: 218652 - DNA, 591 bp, synthetic construct
  misc_feature 1..591: note = Description of Artificial Sequence: Synthetic coding sequence
  source 1..591: mol_type = other DNA
atggctagcatgggcttgcaggtcatgggcatcgcactggccgtgctgggctggcttgctgtgatgttgtgttgtgcgctcccaatgtggagggtcactgccttcattggatcaaacatcgtgacatctcagagcaccggccaaatgcaatgtaaggtgtacgactccttacttgcactcccccaagacctacaggctgcccgtgccttagtgattattagcatcatcgtggccgctctgggcgttctattgtccgtcgtcggcggaaagtgcactaattgcctggaggatgagagcgccaaagcaaagactatgatcgtggccggtgtagtgttcctactcgcgggactgatggtcatcgtccccgtgagctggaccgctcataatataattcaagatttctacaatcctctggtggctagcgggcagaagcgcgagatgggagccagtctgtacgttggctgggcagccagtggtctcctgttgctcgggggaggcttattgtgctgcaactgcccgccaaggacggataagccctactcagccaagtactcagcagctcgcagcgccgcagcgagtaattacgtttag

SEQ ID NO: 218653 - DNA, 912 bp, synthetic construct
  misc_feature 1..912: note = Description of Artificial Sequence: Synthetic coding sequence
  source 1..912: mol_type = other DNA
atgacgcgggcaaggataggatgtttcggacccggtggcagggctaggggaacagagtccgccccagagcctagcaagcgagtaccacctggacggtcatggcagacccaggaagtgcggcaaacccggggagctaacgggcttggacctcgcgcaggaagcgctggcgctaaggcacccggtcccgctcagggggcagctcagcatggactggggggaagcgcgggattgagagtccgcgtgtcccctttggctatgggtagcgccgctctcgaaattttgggcctcgtgctgtgtttggtggggtgggggggactgatcctggcttgcggactgcctatgtggcaggtcacagcgttcctagaccacaatatcgtcacggcacagaccacgtggaaggggctatggatgagctgcgtcgtgcagtcgacagggcacatgcagtgtaaggtatacgattctgtgcttgctctatctaccgaggttcaggctgccagggccctcacagtaagtgcagtgctactcgcctttgtggctctgtttgtaactctggcaggggctcagtgtacaacatgcgtcgctcccggtcccgcaaaagcacgtgtggctctgacgggtggggtcttgtatctcttttgcggcctcttagcgctggtccctttgtgttggtttgccaatatagttgtgagggaattctatgatccgagtgtccccgtctcccagaaatatgagctcggcgcagcactttatatagggtgggccgcaactgccctgctgatggtagggggatgtttactttgttgcggcgcttgggtgtgcacgggcaggcctgacttaagtttccctgtaaagtatagcgctccccgtaggcctacagccaccggcgattatgacaagaagaattacgtgtag

SEQ ID NO: 218654 - DNA, 912 bp, synthetic construct
  misc_feature 1..912: note = Description of Artificial Sequence: Synthetic coding sequence
  source 1..912: mol_type = other DNA
atgaccagggcacgcattggctgcttcgggcctgggggtcgagcccgaggcacggaatctgcacctgagccatctaaacgcgtgccacctggcagatcttggcaaacccaggaggttaggcagaccagaggcgcaaatggcctagggccaagggccggttccgcaggcgctaaggcacctggcccagcgcagggagctgcccagcacggcctgggagggtcagccggactccgcgtgcgtgtgtccccactggccatgggttccgctgcgctggagattctcggcctggtcctgtgtctggtggggtggggcggtctgattctggcttgcggcttgcccatgtggcaggtcaccgccttcctggatcacaacatcgtgactgcccagaccacctggaagggcttatggatgtcctgtgtcgtgcagagcacaggacacatgcagtgcaaggtttacgacagcgtgctcgctctgtcaaccgaggttcaagcagcccgagccttaacagtttccgccgtactgctggcgtttgtcgctctgtttgtcacgctggctggcgctcaatgcacaacctgtgtcgcacctggcccagccaaggcgagggttgctttaaccggtggggtcctgtatctgttctgcgggcttctcgctctcgttccactctgctggtttgcaaatatcgtagtccgcgagttttacgatccgtctgtgccggtatcacaaaagtacgagctgggggctgccttgtatatcgggtgggccgcaaccgccctcttaatggtaggaggctgtcttctgtgttgcggcgcttgggtatgcactgggcgaccagacctctcttttcctgtgaagtatagtgcccctaggagacccactgccactggtgattatgataaaaaaaactatgtgtag

SEQ ID NO: 218655 - DNA, 912 bp, synthetic construct
  misc_feature 1..912: note = Description of Artificial Sequence: Synthetic coding sequence
  source 1..912: mol_type = other DNA
atgacacgggcacgcattggatgctttggtcccggtggccgtgctcgtggcaccgaaagtgcccctgagccttcgaagcgcgtgccccctggcagaagttggcagacccaggaagttcgacagacccggggagcaaatgggcttggacctcgcgcaggctcggccggtgccaaagcaccgggaccggcacaaggagccgcacaacatggcctgggcggaagtgccggacttagagtgagagtttccccattggccatgggatccgcagcgcttgaaatactgggactggttctctgtttggttgggtggggcggattaatcctggcctgcggacttcctatgtggcaagtgaccgcctttttggatcacaatattgtaactgcccagactacctggaaaggcttgtggatgagctgcgtcgtgcaaagcaccggacacatgcaatgcaaggtgtatgatagcgtgcttgctctctcaaccgaagtccaagcagcccgagctttgaccgtcagtgcagtattgctggctttcgtggctcttttcgtgactttggccggagcgcaatgcaccacctgcgttgcacccggtcccgctaaggctagagttgccctcactgggggagtgttataccttttttgtgggcttctggctctggtgcccctgtgctggttcgccaacatagtggtcagggagttctacgacccctcagtcccagtctctcaaaagtatgagctcggcgctgcgctctacatcgggtgggcggctactgccctgctgatggtgggtggctgcctgctgtgctgcggcgcatgggtttgtactgggagaccagatttgtcttttcctgtgaagtacagtgcacctcgtcgccctaccgcaaccggagactatgataagaagaattacgtatag

SEQ ID NO: 218656 - DNA, 1086 bp, synthetic construct
  misc_feature 1..1086: note = Description of Artificial Sequence: Synthetic coding sequence
  source 1..1086: mol_type = other DNA
atgggggaagaggcaaacgatgacaaaaaaccaactacaaaattcgagctggagcgggagaccgagctccgcttcgaggtggaagcctcccagagcgtccagctagaacttctgacgggcatggctgagatctttggaacagagctcacccgtaataaaaagttcacatttgacgcgggagccaaggtggcggtgttcacatggcatggctgtagcgtgcagctgagcggcagaaccgaggtggcttatgtgtcaaaagatacgccgatgctcctgtatttgaacactcacactgccctcgaacagatgaggagacaggccgagaaagaggaggagcgcggaccccgtgtcatggtggtaggccctacagatgtcggaaaatcaaccgtttgccgtctgctgctgaactacgcgatcacaagcagactagctgatgtgttcaatcagcggtgcgaggtgaataggcgcgctagtgtgtccggttgcgtcatcaatacctgcggatgggttaagggatctggttatcaggcactggtacacgccgcaagcgctttcgaagtggacgtggtggttgtgcttgatcaggaacgcttgtataatgaactcaaaagggacctccctcactttgttcgcactgtacttctaccaaagagcggtggggtcgtggaacgctccaaagactttcgtcgcgagtgcagggatgagcgcatccgcgagtacttttacggtttccggggttgtttctaccctcacgctttcaacgtgaaattctcggatgtcaagatctataaggtgggcgcacccacaatcccagattcctgtcttcctctaggaatgtctcaggaggacaatcagttaaaattggttccggttacccctggacgcgacatggtgcaccatctgttgagtgtcagcacagctgaagggactgaggagaacctttcagagactagcgtggcaggatttattgtggtgacaagtgttgacttggaacaccaagtctttaccgtgttatctccagccccacggcctctccctaagaacttcctcttgatcatggacatccgctttatggacctcaagtag

SEQ ID NO: 218657 - DNA, 810 bp, synthetic construct
  misc_feature 1..810: note = Description of Artificial Sequence: Synthetic coding sequence
  source 1..810: mol_type = other DNA
atgcaggaaataattgccagtgtggatcatataaaatttgatttagagattgccgtggaacagcaactgggggctcaaccccttccatttccaggaatggacaaaagcggagctgccgtgtgcgaatttttcctgaaggcagcatgcggaaaagggggtatgtgcccttttagacacatttctggagaaaaaactgtggtgtgcaagcattggctgagagggctgtgcaagaagggtgaccagtgcgagtttctgcatgaatacgacatgactaagatgccagagtgttacttctactctaagttcggagagtgcagcaacaaagaatgccctttcctgcacattgatcctgaatcaaagattaaagattgtccctggtacgacagaggcttttgtaaacacggacctctgtgcagacatcggcatacccgccgtgtgatttgcgtgaattatttagtagggttttgtccggaggggccttcttgcaagtttatgcaccccaggtttgagctgcccatgggtaccactgagcaaccacccctacctcagcagacccagccaccagccaagcagagcaacaaccctccgctgcaaaggtccagctcactgatccagctaacctctcagaacagttctccaaatcagcagaggaccccacaagtgatcggggtaatgcagagccagaatagcagcgctggcaaccgagggcctagacccctggagcaggtgacgtgctataagtgtggtgagaaaggacattacgccaataggtgtactaaaggccacttagcctttttgagtggccagtag

SEQ ID NO: 218658 - DNA, 735 bp, synthetic construct
  misc_feature 1..735: note = Description of Artificial Sequence: Synthetic coding sequence
  source 1..735: mol_type = other DNA
atgcaggagatcatagcctctgtggatcacattaagtttgatcttgagatagccgtggagcagcagttgggggcacagccactgccgtttccaggcatggataagtcaggcgcagcggtgtgtgagttcttcctaaaggccgcatgtggcaagggcggaatgtgcccctttcgtcatatcagcggagagaaaaccgtcgtctgtaagcattggctgagaggtttgtgtaagaagggcgaccagtgcgagttcctgcacgaatacgacatgaccaagatgccagagtgttacttctattccaaattcggcgagtgttccaacaaggaatgtccgtttctgcatatcgacccagagagcaaaatcaaagactgcccttggtatgatcgaggtttctgcaaacacggacccctgtgccgacataggcacactagaagagtgatatgcgtgaactaccttgtaggattttgcccagagggtccttcctgtaaatttatgcacccaaggttcgagctgccaatgggtacaacggaacaaccacctctgcctcagcagacccagccccctgcaaagcagaggaccccccaagtgatcggggtgatgcagtcacagaacagcagcgctggaaaccggggtccaagacccctagagcaggtcacttgctacaaatgcggcgagaagggacactacgcgaatcgctgcacaaaaggacatctggcctttctgtcagggcagtag

SEQ ID NO: 218659 - DNA, 636 bp, synthetic construct
  misc_feature 1..636: note = Description of Artificial Sequence: Synthetic coding sequence
  source 1..636: mol_type = other DNA
atgcaggagatcatcgcctccgttgaccacataaaatttgatctcgagatagcggttgaacagcagctcggtgcacagcctcttcccttccctggaatggacaagagcggcgctgctgtgtgcgagttctttcttaaagctgcatgtggcaaagggggaatgtgtccctttaggcacataagtggcgagaaaacagttgtctgcaaacactggttacgcggattgtgcaagaagggtgatcaatgcgagttcctgcacgaatatgacatgaccaaaatgccggaatgctacttttattccaagttcggcccattgtgccggcacaggcatactagacgggtgatttgcgtgaactacttggtggggttctgccccgaaggaccgagctgcaagttcatgcacccaaggttcgagcttcctatgggcactacagagcagccccctctgccccagcagacccaacccccagcaaaaaggacaccccaagtcatcggtgttatgcagtcccaaaactcctcagctggaaatcgagggcctcggccacttgaacaggtgacatgctacaagtgcggtgagaagggacactatgccaatcgatgtacgaaggggcatcttgctttcctgagcggccaatag

SEQ ID NO: 218660 - DNA, 1767 bp, synthetic construct
  misc_feature 1..1767: note = Description of Artificial Sequence: Synthetic coding sequence
  source 1..1767: mol_type = other DNA
atggcggatggcgttgatcatatcgatatctacgcagatgttggcgaagagttcaaccaagaggctgaatacggcggtcacgatcaaatcgacctgtacgatgacgtcatatccccgagtgccaataatggagatgctcccgaagacagagactacatggacactctgccgcctaccgtaggagacgacgttggaaaaggggcagccccaaacgtggtctatacctatacaggaaaaagaattgcgctgtatatcggaaatctgacctggtggacaaccgacgaagacttgaccgaggcagtgcatagcctaggggtcaacgatatactagagataaaatttttcgaaaatcgtgccaatggacagtctaagggtttcgcgctagtcggcgtcggatccgaggcctccagcaagaaattaatggacttgctgcctaagagggagttgcatggacagaatcctgtggtcactccatgcaacaaacagtttttatcccaatttgaaatgcagtcacgcaaaactacacagtcgggccaaatgtctggagagggcaaagctgggcctcctgggggttctagtagagcggcattccctcagggcggacgcggacggggacgattccctggagccgttccaggcggagaccgcttccccggaccagcaggaccgggtgggcctcccccacccttcccagggaaccttattaagcatctagtaaagggtactcgcccactgtttctggaaacgcggataccatggcacatgggccactctattgaggaaatccctatctttgggctcaaagcagggcagacacctccaaggccccctctcggccctcccggtcctccgggacccccaggacccccaccacctggacaggtcctgcctccgcctctagccggtcctcctaacagaggagaccgcccaccacccccagtgctttttcctgggcagccgtttggccagccacctctgggccctctcccacctggtccgccacctccggttcctgggtacgggccacccccaggcccaccgcctccccaacaggggcctccgcctcccccagggcctttccctcctaggccaccagggcctctaggtccacctctgaccctggcacctccgccacatctgccaggtccaccacctggagccccaccaccagctccccacgtcaatcctgctttttttcctccaccaactaatagcggcatgcccacctctgattcccggggtccgccacctaccgatccttatggtagacctccaccttacgacagaggggactatgggcctccaggacgagaaatggataccgcacgcactcctttaagtgaggcagagttcgaggaaatcatgaatcgtaatagggcgatatcaagcagcgccataagtcgtgctgtttcagacgccagtgccggagactatgggagtgccattgaaaccctagtgaccgccatctctcttataaaacagtctaaagtttccgccgatgataggtgcaaagtcctgatttcttcgttgcaggactgccttcatggcatcgagagcaaatcatacgggagtggaagccgacgtgaacgctcccgggagcgcgatcacagtcgatctcgggaaaagagtcgaagacacaagagtcgctctagggaccgacacgacgattactatagggagcgttccagggaaagagaacgccacagggatagagaccgggatcgtgacagagaacgtgacagggaacgagagtacagacacaggtag

SEQ ID NO: 218661 - DNA, 1656 bp, synthetic construct
  misc_feature 1..1656: note = Description of Artificial Sequence: Synthetic coding sequence
  source 1..1656: mol_type = other DNA
atggccgatggtgtggaccacatagacatctatgcagatgttggggaagagtttaaccaagaagctgaatacggcggacacgaccagattgatctgtatgacgatgtgatcagtcccagtgccaataacggcgatgcaccggaagaccgcgactatatggataccttaccaccaaccgtgggtgatgatgtcggcaagggcgctgcgccaaatgtcgtttacacatataccggtaagcgcatcgccttgtatatcgggaatctcacttggtggacaactgatgaggacctcaccgaagccgtgcatagcctgggagtcaacgatatcttggaaatcaaattcttcgagaatagggctaacggacagagcaaaggcttcgcattggttggcgtagggagtgaagcatcgtctaagaaattaatggatctgctgccaaaaagggagcttcatggacagaatcccgtggttacaccttgtaataaacaatttctgtcccagtttgaaatgcagtctcgcaagaccacacagtccggccaaatgtcaggcgaaggcaaggcaggtcccccaggaggtagcagccgcgctgcattccctcagggcggaagaggaagaggaagattccctggcgcagtcccgggaggcgatcggttccccggacccgctggaccaggtggaccccctcccccttttccggctgggcagacacctccaagacccccactcgggcctccaggaccacccggtccgccagggccaccacccccaggccaggtgctaccccctccgctggccggtccaccgaataggggcgatcgtcctcctccacccgttctgtttcctggccaaccctttgggcaacctccgttgggtcccttaccacctggcccaccccctcctgtgcccggttatggaccccctcctggccctcctccccctcagcaaggcccaccgccaccgcctggtccattccccccaagaccgcctggcccactcggtcctcccctgactctcgcccctccaccacatctaccgggtccccctcctggcgcacctcctccagccccacatgtgaaccccgcatttttcccacccccaacaaattcagggatgcccacttccgacagccggggtccccctcctactgacccgtacggtaggcctcctccttatgaccgaggagactacggccctcccggacgtgaaatggatactgcacgcacaccgttgtctgaggctgaatttgaggaaatcatgaatcgaaaccgcgcaatctctagctccgccatcagtagggccgtttccgatgcctccgcgggagattatggctcagctattgaaactctggtgacggccataagcctgataaaacagtccaaagtgtccgcagacgatcgttgtaaagtgcttattagcagtcttcaagactgtctccatggcatcgagagtaagtcatatggatccggctctcgaagagaacggtctagagagagagatcatagtcgatctagagaaaaaagtaggcgccacaagtctcggagcagggacaggcatgacgattactaccgagagcgcagtcgggaacgtgagcgccacagagacagagatcgggacagggacagagagagggatagagagcgggaatacaggcatcggtag

SEQ ID NO: 218662 - DNA, 1437 bp, synthetic construct
  misc_feature 1..1437: note = Description of Artificial Sequence: Synthetic coding sequence
  source 1..1437: mol_type = other DNA
atggctgacggagttgaccatattgacatatatgctgatgtgggcgaggagttcaaccaggaggccgagtacggcggacatgaccagattgacttgtatgatgacgtgatttctccttctgctaacaacggcgatgcaccagaggatagagattatatggacactctcccacctactgttggagacgatgttggaaaaggagccgcacccaatgttgtctatacctatactggcaaacggatcgctctgtatatcgggaatctaacgtggtggaccaccgacgaggaccttactgaggctgtgcactccctaggagtgaatgatatacttgaaataaagtttttcgagaacagagccaatggacaaagtaagggcttcgcactggtgggtgtgggttctgaagctagctcaaagaagttaatggatctgctgcctaagcgcgagctgcacggccagaatcccgttgtcacgccatgcaataaacaatttctcagtcagtttgagatgcagtctcgcaagaccacccagtccggtcagatgtcgggggaggggaaagccggaccacctggagccggaccccctaataggggtgacaggccgccacctccagttctgttccctggccagcccttcggacaacccccactgggccctttacccccaggccctccaccacccgtcccaggatatggccctcctcccggtccaccaccacctcagcaggggcctcccccaccacctggtcctttcccgcctcggcctcctggtccattaggccctccactcaccctcgcccctcctccacatttgccaggaccccctcctggcgcacctccccctgccccacacgtgaatccagccttttttccgcctcccacaaactccggaatgcccacgagcgactcacggggacccccacctactgacccatacggcagacctcccccttatgataggggggactacggtccccctgggagagaaatggatactgcaaggacgccactgtccgaggcagaatttgaggagataatgaatcgaaacagagctatcagcagtagcgcaatatctcgggcagtgtctgacgcttctgcaggagattacggctccgccatcgagaccctggtgactgctatcagcctgattaagcagagcaaggtgagcgcagatgacagatgcaaggtactgatttcctccttacaggattgcttgcatggaattgagtccaagagttatggctccgggtccagacgcgagcgaagcagagagcgggaccactcccgttcaagggaaaaatccaggcggcacaagagccgcagccgggatcgtcacgacgattactatcgagagcggtctcgggaacgggagcgacatagggatcgggatcgcgaccgagaccgcgagagggaccgagaacgagaataccggcacaggtag

SEQ ID NO: 218663 - DNA, 1851 bp, synthetic construct
  misc_feature 1..1851: note = Description of Artificial Sequence: Synthetic coding sequence
  source 1..1851: mol_type = other DNA
atgagcagcctggccgtgcgggatcccgctatggatcgcagcctgagatcagtgttcgtggggaatattccatacgaggccactgaagagcagctgaaagatattttcagtgaagtcggcagtgtggtgagtttccgccttgtgtacgacagagagaccgggaagccaaaagggtacggattttgcgagtaccaagatcaggaaactgctttatcagccatgcgcaacctcaatgggcgtgagttctctggacgggctctacgcgtggacaatgccgcatccgaaaagaataaagaagaactgaaatccctggggccagctgctccgatcatagattcaccatacggcgacccaatcgacccagaagacgcccctgaaagcataacccgcgcagtggcaagtctgccgcctgaacaaatgttcgaactaatgaagcagatgaaactatgtgtgcagaacagccatcaggaggctcgcaacatgttgttacaaaatccccagctggcctacgccctccttcaagcccaggtggttatgcgaataatggaccctgaaatagcgctcaagatcctacacagaaagatccatgtgacaccactgatccctggcaaatcgcaatctgtgtcagtgtcaggacctggccctggccctggtcccggattgtgccctggccctaacgttctgctcaaccagcagaatccacctgcccctcagccccaacacctagctcgtaggcccgttaaggacatcccccctctaatgcaaacccccattcagggcggaatccctgcccctgggccaattcccgcagcggtgcccggagcaggacccggttccttgacgcccggaggagccatgcaaccccagctggggatgcccggtgtgggacccgttcctttggaacgtggtcaggtgcaaatgtctgacccgagggctccaatccctaggggcccagtgaccccgggtggccttcctccaagaggtctcctgggcgatgcccctaacgaccctaggggaggcacacttctgtcagtgacaggcgaggttgagccaaggggctacttaggtcctccccatcaggggcctcccatgcaccacgcatccggtcacgatactcgaggccctagcagccacgaaatgagggggggtcccctgggcgacccgagacttttgatcggtgagccgaggggcccaatgattgatcaacgcggactgcccatggatggcagggggggtcgagactcccgcgcaatggaaaccagggccatggagaccgaggtgttagagacccgagtaatggagcgcagagggatggagacttgcgccatggagactagaggtatggaagccagaggcatggatgctcgcggactggagatgcgtggccctgtaccttcatctcggggtccaatgaccgggggaatacagggccctggccctattaacatcggggctggtggccctcctcagggccctcgccaagtccccggaatctccggggtgggaaaccccggagccggaatgcagggcacaggaatccagggcacagggatgcagggggctggcatccaggggggtgggatgcagggggctggcatccagggcgtcagcattcaggggggtgggatacagggaggcggtattcagggggcttcaaaacaaggcggaagccaaccttcgagctttagtcccggacaatcccaggttacaccacaggaccaggagaaagccgcactgataatgcaagtcctgcagctgactgccgaccaaatcgccatgttgccaccagaacagaggcaaagtattctgattctgaaggagcaaatccaaaaatccaccggggcatcatag

SEQ ID NO: 218664 - DNA, 2541 bp, synthetic construct
  misc_feature 1..2541: note = Description of Artificial Sequence: Synthetic coding sequence
  source 1..2541: mol_type = other DNA
atgttgttcaccgtgtcttgtagtaaaatgtcctccattgtggaccgggatgactccagcatcttcgatggactggtggaagaggacgacaaagacaaagccaaaagagtgtctaggaataaatccgaaaagaagcggcgtgaccagtttaatgtgctgataaaggaactcggctccatgctgccgggaaacgctcgcaagatggacaaaagcacagtccttcagaagtctattgatttcctcagaaagcacaaggagattacagcacagtccgacgcaagcgaaattagacaggattggaagcccacttttcttagtaatgaggagttcacacagttgatgctggaggctcttgatggtttcttcctggccatcatgaccgatggctcaatcatttatgtgtcggagtcagtgacctccctactggagcatctgccctcagatctggttgatcaatctatcttcaactttatccccgaaggggagcactccgaagtttacaaaatcttaagcacccacctgctggagagtgactctctcacccccgagtacctcaaaagtaaaaatcagttggagttttgctgtcatatgctcagggggacgattgatccaaaagagccatcaacatacgagtacgtaaagtttatagggaactttaagtctctcaacagtgtctcaagcagcgcgcacaacggcttcgaaggaactattcagcggacacatcgaccttcctacgaggatagggtgtgctttgtggctactgtgaggttagccactccccagttcatcaaagagatgtgcaccgtcgaggaacctaatgaggagtttactagtcggcactccctggagtggaagtttctgttccttgatcaccgggctcccccaatcattggctacctgccgttcgaggtgctgggcacaagcgggtacgattattatcatgtggatgacctagagaatctggccaagtgccacgagcatcttatgcagtatggcaagggtaaaagttgttactatagattcctgacaaaaggccagcagtggatttggctgcagacacactattacatcacttatcatcagtggaattctaggccagaattcatcgtatgtacacacacagtggtttcttatgcagaggtgcgggctgagaggcggcgagaactgggcattgaggaaagcttgcctgaaactgctgctgataagtcacaggattcagggtctgataaccgaatcaataccgtatctctgaaagaagctctggaacgcttcgatcactcgcccacacccagcgcctctagccgatcatcgcggaagtcctcgcatactgcggtcagcgacccaagtagcacccccactaaaattcccaccgatactagcacacctcctcgacaacacctgccagcccacgaaaagatggtgcagagacgaagttcattttcttcacagagcatcaatagtcagtctgtgggtagcagcctaacccaaccagtgatgtcccaggcaactaatctcccaattccccaggggatgagtcagtttcaattcagcgcccagttgggtgccatgcagcatctcaaggaccagttagaacaacgaacaagaatgattgaagcaaacattcatagacagcaggaagagctgcggaagatacaggaacagctccagatggtgcatgggcaaggcctgcagatgtttctccagcagtctaatccgggactgaatttcggatctgtgcagctgtccagcggaaacagcagtaacattcaacaactcgcccctatcaacatgcagggccaagtcgtgccaactaaccagatccagtcaggcatgaacaccggacacattggcacaacccagcacatgatccaacagcagacactccaatcaacttcaacccaatcccagcagaacgtgctttccggtcattctcaacagacctcactcccaagtcagacccaatccactttaacagcccctctttataatacaatggttatcagtcagccagcagcaggatctatggtccaaataccctctagcatgccacagaatagcacacaatccgcagccgtgacaaccttcacccaagaccgacagattcggttcagccagggccagcaattagtgaccaagctggttaccgcacccgtggcctgcggggctgtaatggtgccgtccacaatgctgatgggccaggtggtgactgcctatcccacgtttgcgacccagcaacaacaaagccagacactgagcgtaacccagcaacagcagcagcagagctctcaggagcaacagttgacatccgtgcagcagccatcccaggctcagttaactcagcctccacagcagtttttgcagacgtccagactgctccacggcaatcctagcacacaactgattctaagcgcagccttccccctgcagcagtcgaccttcccccagagtcaccaccagcagcaccaaagccagcagcagcagcagctgagccgtcacagaaccgactcactacctgatccatccaaggtccaaccccagtag

SEQ ID NO: 218665 - DNA, 1278 bp, synthetic construct
  misc_feature 1..1278: note = Description of Artificial Sequence: Synthetic coding sequence
  source 1..1278: mol_type = other DNA
atgggtgaggaggcaaatgatgacaagaagccgacgaccaaatttgagctcgagcgggagacagaactgcgcttcgaagtggaagcttctcaatccgtgcaattggagctgttgaccggcatggccgaaatctttggtaccgagctcacccggaataaaaaatttaccttcgacgcgggtgcaaaggtggctgtgtttacctggcatggttgttctgtccagcttagcggaaggactgaagtggcttatgtcagcaaggatacgccaatgctactgtatctgaacacccataccgcactagaacaaatgcgcagacaggcagaaaaagaagaggagcgagggccaagggtaatggtggttggtcccactgatgtcgggaaatccaccgtatgcagactcctcctgaattatgcggtccgactgggcaggaggcctacctatgtcgagctagatgtcgggcagggaagcgtgagtatacccggaaccatgggcgctctgtatatcgagcgacctgctgacgtggaggagggatttagtatccaggctccactggtctatcactttggttccacgacaccaggcaccaacatcaaactatataataaaatcacttcccggctggctgatgtgtttaaccagagatgcgaggtgaaccgacgagcgtccgtcagcggatgcgtgatcaatacctgtgggtgggtcaaagggtccgggtatcaggcgttggtccatgccgcatcagcattcgaagtggacgtggtggtcgttcttgaccaggagaggctttacaatgagctaaagagagacctgccgcatttcgttcgtaccgtgctcttgcctaagtccggaggggttgtcgagcgctcaaaggacttcagacgagagtgtcgcgatgagagaatccgggagtatttctacggttttcggggttgcttttatccgcacgccttcaatgtgaagttctcagacgttaagatctataaggtgggtgctcccacgatccctgatagctgtcttccccttggcatgagccaggaagacaatcaattgaagctggttccggtgacacccggacgggacatggtgcatcaccttttgtcagtttccactgccgagggcaccgaggaaaacctgagtgaaacctcagtggccggattcattgtagttacatccgtggacctggagcatcaggtgttcaccgtgcttagccccgctcctcggccacttccaaagaattttttgctaatcatggacatcagattcatggacctgaagtag

SEQ ID NO: 218666 - DNA, 1311 bp, synthetic construct
  misc_feature 1..1311: note = Description of Artificial Sequence: Synthetic coding sequence
  source 1..1311: mol_type = other DNA
atgacagacctgcactcatcctacacagaggaaatgggagaggaagctaacgatgacaagaagcccaccactaagttcgagttggagcgcgagaccgaactgcggtttgaggtcgaggcttctcagtccgtccaactcgagctgctgacgggcatggcagaaattttcgggactgaactcacgaggaataaaaaattcacctttgacgccggagctaaagtggctgtgttcacttggcacggatgtagcgtccaactgtcgggcagaactgaggtggcttacgtttcaaaagatacaccaatgctattatacctgaatacacacacagcacttgagcagatgcggaggcaggccgagaaagaagaggagaggggacctagagttatggtggtcggacccaccgacgtgggtaagtccacagtctgcagacttctgctgaactacgccgtccggctgggcagaaggccaacatatgtcgaactggatgtgggacaggggtcagtgagtattccaggaacaatgggagccctgtacatagagagacccgcagatgtggaagaaggatttagtattcaggccccactggtgtaccattttggtagcactactcccggaactaacattaagctctacaataaaatcacctctcggttagccgacgtctttaatcaacgttgtgaagtgaataggagggcctccgtgagcggatgtgtaatcaacacttgtggatgggtaaagggttccggttaccaggccctggtgcacgcggcaagcgcctttgaagtcgacgtggtcgtggttctggatcaggaacgactgtacaatgaattgaaaagagacctaccccattttgtgcggaccgtgcttctcccgaagtcgggaggggtcgtcgagagatctaaggattttaggagggagtgtagggatgaacggatcagagagtatttctatggattccggggatgcttctatccacatgccttcaacgtgaaattcagtgacgtcaagatttacaaggtgggcgctcctactatcccagattcttgcttaccactgggcatgtcccaggaggacaatcagttgaagttggttccagttacgccagggagggatatggtgcatcatctgctgtccgtgtccacagctgagggcactgaagaaaatctctctgaaactagtgtcgcaggattcattgttgtgacttccgtggacctggaacaccaggtgtttactgtcctctctcctgcccctcggcctctgccaaagaacttccttctgatcatggatattcggtttatggacttgaagtag

SEQ ID NO: 218667 - DNA, 279 bp, synthetic construct
  misc_feature 1..279: note = Description of Artificial Sequence: Synthetic coding sequence
  source 1..279: mol_type = other DNA
atgggcgaagaggcaaatgacgataagaagcctactacgaagttcgagctggaaagagaaacggagttaaggtttgaggtggaggcgtcacaaagtgtccagctagagcttcttaccggaatggcggagatcttcggcacggagctgaccaggaataagaagttcactttcgacgctggggcaaaagtggcggttttcacctggcatggctgttcagtccaactctcagggcgtacggaagtggcttacgtctccaaggacacacccatgttgttatag

SEQ ID NO: 218668 - DNA, 1278 bp, synthetic construct
  misc_feature 1..1278: note = Description of Artificial Sequence: Synthetic coding sequence
  source 1..1278: mol_type = other DNA
atgggtgaagaggccaacgatgataagaaacctaccacaaagtttgagctggaaagagaaacagaattacggttcgaagttgaggcctcacagagtgtgcagctggagttgctgaccggcatggccgaaattttcggtaccgaattaactcgcaacaaaaagtttactttcgacgcaggcgctaaagtcgctgtattcacgtggcacgggtgctccgtccaattatcaggcagaaccgaagtagcttatgtgagcaaggatactcccatgctgttatatctgaacacccacacagcgctggaacaaatgcgacggcaggccgaaaaagaggaggagagaggccctcgcgtgatggtagtcggcccaacggacgtgggtaaatccactgtctgtaggctcctgcttaattacgccgtaaggttggggcgaaggcccacgtacgtagaactggatgtgggtcagggatctgtgtccattccaggcactatgggagccctctacattgagcgccctgcggacgtggaggaaggatttagcatacaggcccctctcgtgtaccatttcggctctactactccaggcaccaatattaagttgtacaacaagattacttccaggctcgcagatgtatttaaccaacgctgcgaggtgaatagacgggctagcgtgtctggatgcgtgatcaacacttgtggttgggtaaaaggcagcggttaccaggcactcgtgcacgctgcttccgccttcgaagtggatgttgtcgtagtcttggaccaggagcggctgtacaacgaactcaaacgagacctgccccattttgtgagaactgtgctgctacctaaatccggcggagttgtggagcgatccaaagactttcgtcgcgagtgcagagatgagagaatccgagaatacttctacgggttcaggggatgtttctacccccacgccttcaatgtaaaattctctgacgtcaagatatacaaagttggggcacctactatacctgattcctgtttgccactgggaatgtctcaggaggataaccagcttaagctggtgccagtgacacccggaagggatatggtgcatcacctcctgtccgttagcactgccgaaggaacagaagagaacctgagcgaaacatcggtggctggcttcatcgtggtcacgtctgtggatctggaacaccaggttttcacagtcctgtcgccggcaccacggcctctccctaagaactttctcttgataatggacataagatttatggatctgaagtag

SEQ ID NO: 218669 - DNA, 399 bp, synthetic construct
  misc_feature 1..399: note = Description of Artificial Sequence: Synthetic coding sequence
  source 1..399: mol_type = other DNA
atgggtgaagaagccaatgacgataaaaaacctactacgaagttcgaactcgagagggagactgaactacgtttcgaggtggaagcttcccagagcgtgcagcttgagttacttactggcatggccgaaatttttgggacagagctcactcgtaacaagaagtttacttttgacgcaggtgctaaagtagcagtgtttacctggcatggatgctccgtccagctctcgggccgtacagaggtagcctatgttagcaaagatactccaatgcttctataccttaatacccacacggctttagagcagatgagaagacaagctgagaaggaggaagaaagaggacccagggttatggtagttggacccaccgacgtagggaaatcgaccgtgtgtcgatag

SEQ ID NO: 218670 - DNA, 834 bp, synthetic construct
  misc_feature 1..834: note = Description of Artificial Sequence: Synthetic coding sequence
  source 1..834: mol_type = other DNA
atgtggcctgggatactggtgggtggagctcgcgtggcctcttgcaggtacccggctctcgggccaagattagccgctcacttccccgcacagcgccctccacagcgcacactgcagaacgggctggccctgcaaaggtgccttcacgctacagccacacgggctttaccgttaatcccaatagtggtagagcaaaccggacggggagagcgcgcttacgatatttactctcgcctgttgcgggaaagaatcgtttgtgtgatgggacccatcgacgactccgttgcgagcctggtcattgcccagctcctttttctacagagtgaaagtaataaaaagccgatccacatgtacattaactcgcccggtggcgtcgtgaccgctggcttggccatctatgacactatgcaatacatactgaaccccatttgcacgtggtgcgtggggcaggccgcttctatgggcagcttgctgctcgctgccggtactccgggaatgcgccatagccttcctaattcaaggataatgattcaccaacctagcggtggtgctcgtgggcaggccacagatattgcgatccaagcagaagagatcatgaagctgaagaagcaactgtacaacatttacgccaaacacacaaagcagagcctccaagtaatcgagtccgccatggaacgggacagatatatgtcacctatggaggcccaagaatttggcatactagacaaagtgcttgtacatcctccgcaggatggcgaggacgaacccaccctggtgcagaaagaaccagtggaagctgcacctgcagccgaaccggtccccgcaagcacatag

SEQ ID NO: 218671 - DNA, 1617 bp, synthetic construct
  misc_feature 1..1617: note = Description of Artificial Sequence: Synthetic coding sequence
  source 1..1617: mol_type = other DNA
atgtggtccgggaggtcaagctttaccagcctcgtggttggcgtatttgttgtatacgtggtgcatacatgctgggtcatgtatggaatcgtttacacacggccttgcagcggggacgcaaattgtattcagccttatctggcccgacgcccaaagctacagttgtccgtgtacaccaccaccaggtcccatttgggagccgagaataatatagacttagtactgaatgtggaggactttgacgtagaaagcaagttcgaacgaaccgtaaacgtttcagtgccgaaaaaaacacgcaataacggaacactctacgcctatatcttcctgcaccatgctggggtgctcccgtggcacgacgggaagcaggtgcacctggtttcaccactcactacatatatggttcccaaacctgaggagatcaatctgctgacaggggaaagcgacactcaacaaattgaagctgaaaaaaagcctacatctgcactcgacgaaccagttagccactggcgcccaagacttgccctcaacgtgatggccgacaacttcgtttttgacggctcatccctcccagccgacgtgcatcgctacatgaagatgatccagcttgggaaaaccgttcattatctgcctatactgttcatagatcagctttctaacagggtgaaagatctgatggtaataaacaggtctaccacagagttgcccttgacagtgtcctacgacaaggtctcgttaggccgtctgagattctggattcatatgcaggatgccgtgtacagcttgcagcagttcgggttttccgagaaagatgcagatgaggtaaaaggtatcttcgtcgacacaaatttatatttccttgccttaaccttctttgtggctgcatttcacctcctgttcgacttcctagcatttaaaaatgacatatctttctggaaaaaaaagaagtccatgattggcatgagcacaaaggcagttctgtggcgttgtttcagcactgtggtgattttcctcttcctgctggacgagcaaacttccttgttagtgctggtgcccgcaggcgtgggggctgccattgaactgtggaaagttaagaaggccctaaagatgaccatattttggaggggcttgatgcctgaattccaatttggcacctattctgagtccgaacgaaaaacagaagaatatgatactcaggcaatgaagtatctctcttacctgctctacccgctctgcgtagggggagccgtgtacagcctgctgaatattaagtacaagtcgtggtactcctggctgataaactcttttgtgaacggggtctatgctttcggattcttatttatgttaccacagctgtttgtcaattataagctgaaaagtgtcgcccatctgccctggaaggcattcacttataaagcatttaatacgttcattgacgacgtctttgcatttatcattaccatgccgacctcccatagactggcctgcttcagagatgacgtcgtttttttggtgtatctctaccagagatggctttaccccgtcgacaagaggcgggtcaacgagttcggagagtcctacgaagagaaggccacaagggcgccacacaccgactag

SEQ ID NO: 218672 - DNA, 1509 bp, synthetic construct
  misc_feature 1..1509: note = Description of Artificial Sequence: Synthetic coding sequence
  source 1..1509: mol_type = other DNA
atgtggagcggaaggagctctttcacctctttggtcgtgggcgtatttgtagtttatgtggtccatacctgttgggtaatgtatggaattgtctatacgaggccatgttcgggagatgcaaactgcatccagccttacttagctcgacgccctaagctgcagcttagcgtgtacaccacaactcgaagtcacttgggcgctgaaaacaacattgatttggtcctcaacgtggaggacttcgacgttgaatctaagtttgagagaactgtaaacgtgtcggtccccaaaaagacacggaataacggaactctgtacgcatatatttttctccaccacgccggtgtgctgccttggcatgacgggaagcaggtgcacctggtctcccccctcactacatacatggtgcccaaacccgaggagattaatttgttaaccggagagagtgatacgcagcaaattgaggccgagaaaaagcccacctccgcattggatgaaccagtctctcactggaggccacggctcgcacttaacgtcatggctgataattttgtttttgatggaagttcccttcccgctgatgtgcaccgctacatgaagatgattcagctaggaaaaactgtccactacttgccgatactgtttatcgatcaactgtctaaccgtgtcaaggatttgatggtgatcaatcgttccacaactgagctcccactgaccgtatcatacgataaggttagcctcggtagactgcgattctggattcatatgcaggacgcagtgtacagtctgcaacagtttggattttctgaaaaagatgccgatgaagtgaagggtattttcgtggataccaacctctacttcttggccctgacattcttcgtggctgctttccacttactatttgacttcctggccttcaaaaacgatatcagcttctggaaaaagaaaaagtcaatgatcgggatgagcaccaaactctggaaagtcaagaaggccctcaagatgactatcttttggagagggcttatgcctgaattccagtttgggacgtactccgagagcgaacgcaaaacagaggagtacgatacacaagccatgaaatacctgagctacctattgtaccctttgtgcgtcggtggggctgtgtatagcttacttaatataaagtataagtcttggtacagttggttaattaattcattcgtcaacggagtctatgcattcgggtttttgttcatgttgccccagctgttcgtgaactacaagctgaagtcagtcgcccacctcccctggaaggcttttacatataaggcctttaataccttcattgatgatgtgtttgcttttatcattactatgccaactagccatcgcctggcctgtttccgtgatgatgtggtgttcctcgtttatctgtatcagcgctggctgtatcccgtggataaaaggcgagttaatgaatttggggagtcatacgaggagaaggccacacgcgcaccacatacagactag

SEQ ID NO: 218673 - DNA, 1350 bp, synthetic construct
  misc_feature 1..1350: note = Description of Artificial Sequence: Synthetic coding sequence
  source 1..1350: mol_type = other DNA
atgatgaagacacttctgcttttcgtgggactcttgctgacctgggaatccggacaagtactcggtgatcaaacggtcagcgacaacgaattacaagagatgtcaaatcaagggagcaagtatgtcaataaggagatacagaacgccgtgaatggcgttaagcagataaaaaccttgattgaaaaaacaaacgaggaacgcaaaacattgctgtccaatctggaggaagcgaaaaagaagaaagaggatgcactgaatgagacccgggaatcagaaactaaactcaaggagttacctggtgtatgtaacgagactatgatggccttgtgggaggaatgtaaaccctgccttaaacagacctgcatgaaattttatgcgcgagtctgtcggtcaggatctggcctcgtagggcgtcaactcgaagagttcttgaatcagagtagtccgttctatttctggatgaatggcgatcgtattgactcccttttagagaatgaccgccagcagactcatatgctggatgttatgcaagatcacttctccagagcctctagcataatagacgaactatttcaagatagattcttcactcgggaaccccaggatacgtatcattacctgccattttccctgccacatcggaggcctcatttcttttttccaaaatctcgtatcgtgcgcagcctcatgccattctccccttacgagccacttaattttcatgcgatgttccaaccattccttgagatgatccatgaggcccagcaagccatggacatccactttcattcccctgcttttcagcacccccctacggagtttattcgagagggagacgacgacaggacagtgtgtcgggagattagacacaattccaccgggtgtctgagaatgaaagatcaatgtgacaagtgccgcgagatactgtctgtcgattgtagtactaacaatccctcacaggccaagttacgtagagaacttgatgagtcgctccaggtcgctgagagactgacaagaaagtacaacgaactcttaaagagctatcagtggaaaatgctgaatacctcttcgttactggaacagttgaatgagcaattcaattgggtaagtcggctcgcaaatttaactcagggcgaggaccaatattacttgcgagtcaccactgtcgctagccacacctcagattccgatgtgccatctggagtgactgaggtagtggtgaaactttttgactctgatccgattactgtaactgtcccagtggaggtcagccgcaagaatcccaagtttatggagactgtggctgaaaaggctctgcaggaataccgcaagaagcacagggaagagtag

SEQ ID NO: 218674 - DNA, 825 bp, synthetic construct
  misc_feature 1..825: note = Description of Artificial Sequence: Synthetic coding sequence
  source 1..825: mol_type = other DNA
atgcaggaccatttctctcgggcttctagtatcattgacgagctttttcaggaccgtttctttacacgggaacctcaggatacataccactacctaccattctctcttccccatagacgtccccacttttttttccctaagtcacggatcgtgcggtcactgatgcccttttctccctatgagcctttgaattttcatgccatgtttcaaccctttctagaaatgatccacgaggcccagcaggccatggacattcacttccacagcccagcattccagcacccccctaccgaattcattcgcgaaggtgacgacgataggaccgtttgtagggaaattcgacacaattcgaccggttgtctcaggatgaaggatcagtgtgacaagtgcagggagatacttagtgtggattgttcaacaaataaccccagtcaagctaaacttagaagggaactcgacgaaagcctgcaggttgcagagagactgacacgcaagtacaacgagctgctgaaatcctaccagtggaaaatgcttaacactagcagcctgctcgagcagctcaacgagcagtttaattgggtatcaaggctcgcaaatttgactcagggggaggatcaatactatctgagggtgaccactgtggcttcacacacctctgattccgacgtgccaagtggagtgacagaggtggtagtcaagttgtttgattcagatccaataacagtaaccgtccctgtagaagtctcaaggaagaatccgaaatttatggagactgtcgcagagaaagctctgcaggaataccgtaagaagcatagggaagaatag

SEQ ID NO: 218675 - DNA, 1350 bp, synthetic construct
  misc_feature 1..1350: note = Description of Artificial Sequence: Synthetic coding sequence
  source 1..1350: mol_type = other DNA
atgatgaaaacgctcctgctgttcgttggcttactgctcacctgggagagcgggcaagtgctgggcgatcagactgtgtctgacaacgagcttcaagaaatgtcaaatcagggatctaagtacgtcaataaagagattcagaatgcagtaaacggggtgaagcagattaagacactcattgagaagaccaacgaagaacgcaaaacactactgtccaatctagaagaagctaagaaaaagaaagaagacgcgctcaacgagacacgagaaagcgaaaccaagcttaaagaattgcctggcgtgtgcaacgagactatgatggccctgtgggaggaatgcaaaccttgtcttaaacagacctgtatgaagttttatgccagggtgtgccggtccgggtccggactcgtggggagacagctagaggaattcctgaaccagtcttctcccttttacttttggatgaatggagaccgtatagattcactgctggaaaacgaccggcaacagacccatatgctggacgtgatgcaggatcatttctcccgggcaagtagtataatcgatgagctgtttcaggaccgatttttcacacgcgaaccccaggacacttatcattacttgcctttttctttgcctcataggcggccacatttcttctttcccaaatcaaggatcgtgcggtctcttatgccttttagtccttatgaacctctgaatttccacgctatgttccagccatttctggaaatgatccacgaagcccaacaggctatggatattcacttccattcccctgcctttcagcacccgcctaccgagtttatccgcgagggtgacgatgataggactgtttgcagggagattcgccacaactcaacgggttgcctacgcatgaaggatcagtgtgataagtgccgggaaattctcagtgtggactgcagtaccaacaatccctcacaggccaagttacgacgcgaacttgacgagtcacttcaggtggccgagcgcctgacacgaaaatacaatgaactgctcaagtcttatcagtggaaaatgctgaatacctcctccctgctcgagcaactgaacgaacagtttaattgggtgagccgcttagccaacctcacccagggggaggaccagtattatctcagagttactactgtggcatcccacaccagcgatagcgatgtgccttctggtgtgacagaggttgtggtgaagctgttcgactctgacccgatcaccgtgacagttcctgtggaggtgagtagaaaaaaccctaagtttatggaaacagtggcagaaaaggcgctgcaggaatacaggaaaaagcacagagaggaatag

SEQ ID NO: 218676 - DNA, 615 bp, synthetic construct
  misc_feature 1..615: note = Description of Artificial Sequence: Synthetic coding sequence
  source 1..615: mol_type = other DNA
atgatgaaaacacttcttttgtttgtgggacttctcctgacgtgggagtctggacaggtcctgggcgaccaaacagtgagcgacaacgaactgcaggaaatgagtaaccagggttccaaatacgttaacaaagaaattcagaacgccgtgaacggggtgaaacagattaaaacgctcatagagaagaccaacgaggaacgaaagactctcctgagcaatctggaggaggcgaagaaaaagaaggaggatgcccttaacgaaacaagggaatccgaaactaagctgaaggaactgcctggggtttgcaatgaaaccatgatggccctgtgggaggagtgtaagccctgcctaaagcagacctgtatgaagttttacgccagggtttgcaggagcggttccggcctagtgggcagacagctcgaagaattccttaatcaatcttctcctttttacttctggatgaatggagaccgtattgatagcttactggaaaacgaccggcagcagacacacatgctggatgtgatgcaagaccactttagtagagcttctagcattatagacgagttgtttcaagatcggttcttcacacgcgaaccacaggacacttactag

SEQ ID NO: 218677 - DNA, 1350 bp, synthetic construct
  misc_feature 1..1350: note = Description of Artificial Sequence: Synthetic coding sequence
  source 1..1350: mol_type = other DNA
atgatgaagactctccttctgttcgtgggtctcctgcttacatgggagagcggacaggtgctaggcgaccagacggtttccgacaacgagctgcaggagatgtcaaaccaagggtccaagtatgtcaataaggaaatacagaatgcggtaaatggcgttaagcagataaaaactctcattgagaaaacaaacgaggaaagaaaaactctcttgtccaacttggaagaagcgaagaaaaagaaggaggacgctctgaatgagactagggaatccgaaacaaaattgaaggaactccctggcgtgtgtaacgagaccatgatggccctatgggaggaatgtaagccatgcctcaaacagacctgtatgaagttctacgccagggtgtgtagatctggatccgggcttgtggggaggcagttggaggagttccttaaccagtccagtcccttttacttttggatgaacggggatcgcattgattctcttctggagaacgacagacagcagacccacatgctggacgtgatgcaagaccatttttcccgcgcatcttctatcatcgatgagctgttccaggatagattcttcactcgagaacctcaggacacctaccactacctgcccttctccctgcctcaccgacggccacactttttttttccgaaaagccggatcgtgaggtctctaatgcccttcagtccctacgaacccctaaatttccacgctatgtttcagccatttctcgagatgatccacgaggcccaacaggctatggacatccactttcatagtccagcctttcagcatccacccaccgagtttattagagaaggagacgatgaccgtacagtctgtcgagagatacgccacaattctacagggtgtctgagaatgaaggaccagtgcgataagtgcagggagatactgagtgtcgattgttcaaccaacaatccatcccaggctaagctgcggcgagaacttgatgagtccctgcaagttgccgaacggttgaccaggaagtacaacgagctgcttaagagttatcagtggaaaatgttaaacacatccagtttactggaacagctgaacgaacagtttaattgggtcagtcgcctggcaaacctgacacagggagaggatcagtactacctgcgcgtgaccacagtcgcctcccacacttccgattcggacgtgccctcaggggtgacggaggttgtcgttaaattgtttgattctgatcctattaccgttactgtgcccgttgaagtatctcgtaaaaaccctaaattcatggagactgttgccgaaaaagctctccaggagtatcggaaaaaacacagagaagagtag

SEQ ID NO: 218678 - DNA, 816 bp, synthetic construct
  misc_feature 1..816: note = Description of Artificial Sequence: Synthetic coding sequence
  source 1..816: mol_type = other DNA
atgatgaagaccctattgctctttgtgggcctgttactcacctgggagtcagggcaagtgttaggcgaccagaccgtttcagacaatgagctccaggagatgagcaatcaggggtcgaaatatgtgaataaagagatccaaaatgccgtaaacggtgtaaagcagatcaaaacattaatcgaaaaaactaatgaggaacgcaaaacactccttagcaatctggaggaggccaaaaaaaaaaaagaggatgcattgaacgagactagggagtctgaaaccaagctaaaggagctcccaggcgtctgtaacgaaacgatgatggcactttgggaggaatgcaagccttgcttgaagcaaacctgcatgaaattttatgctagagtctgccggtcaggatccggtttagttggacgccagctggaagaattcttgaaccagagctcacctttctatttctggatgaatggcgatcgtatagacagcctactggaaaatgatagacagcaaacacacatgttggatgtgatgcaggatcacttttcccgcgcttcaagcatcattgatgaacttttccaggattcactgatgccattcagtccttatgagcccttgaatttccacgctatgtttcaaccctttctggagatgattcatgaggcccagcaagctatggatatccattttcattcacccgcatttcaacatccacctaccgagtttattcgagagggcgacgacgaccggacagtgtgccgggagatccgtcacaattcaacaggctgccttagaatgaaggaccagtgcgataaatgctag

SEQ ID NO: 218679 - DNA, 1383 bp, synthetic construct
  misc_feature 1..1383: note = Description of Artificial Sequence: Synthetic coding sequence
  source 1..1383: mol_type = other DNA
atggaagcctgcaaggattcccggatcgggggtatgatgaaaaccttactgctgttcgtagggctgctcctcacatgggagtccgggcaggtcttgggagaccagaccgtgagtgataatgaactgcaagagatgtccaatcaggggtccaagtatgtaaataaggagatccaaaatgctgttaatggcgtgaagcaaatcaaaacacttattgagaagaccaacgaggaacgaaaaacactcctttccaacctggaggaggcaaaaaaaaaaaaggaggacgccctgaacgagacacgcgagtctgagaccaagctgaaggagttacctggggtatgtaacgagactatgatggccctgtgggaggagtgtaaaccttgcctcaagcaaacctgcatgaagttctacgccagagtgtgtagatccggttctggcctggtgggacgtcaactggaagaatttttgaatcagtcttcccccttttacttctggatgaacggggacagaattgactctctcttggagaacgataggcaacagactcacatgttggatgttatgcaggaccacttctccagagccagtagtattatcgatgagctgtttcaagaccggttttttactcgggaacctcaggatacctatcactatctcccattttccctgcctcatagacgacctcactttttttttccaaagtcacggattgtgaggagtctcatgccgttctcaccatatgagccgctgaactttcatgcaatgttccaaccgtttctagaaatgatccacgaggcccagcaggccatggatatccacttccattccccagcttttcagcacccccctactgagttcattagggaaggagacgacgaccgcactgtgtgtcgcgaaatcaggcataatagcactgggtgtctccgcatgaaggatcagtgtgacaagtgccgtgagatactcagcgtggactgttctacaaacaatcccagtcaagccaaactgagacgcgaactagacgagtccctgcaggtggccgagaggctaactcggaagtacaacgagctccttaagtcttatcagtggaagatgctgaacacaagtagccttttagagcagctgaacgagcagttcaattgggtaagccgactcgctaacctaacccaaggtgaagaccagtactacctccgggttacaacggttgcctctcatacaagcgacagtgatgtaccctctggggtgacagaggtggttgtcaagttattcgatagcgacccaatcactgtaacagtgcccgtcgaagtgtcacggaagaaccctaaatttatggagactgttgctgaaaaggcactccaagaatacaggaaaaagcacagggaggaatag

SEQ ID NO: 218680 - DNA, 1506 bp, synthetic construct
  misc_feature 1..1506: note = Description of Artificial Sequence: Synthetic coding sequence
  source 1..1506: mol_type = other DNA
atgcaagtctgtagccagccccaaagaggatgcgtgcgcgaacagagcgccattaacaccgctcctccatctgcacacaatgccgcttctcctggcggagcgagaggccaccgagtccccctgaccgaggcatgtaaagactcaaggataggaggcatgatgaagactcttctcctgttcgtcgggctcctgctcacatgggaatctggtcaggtcttgggtgaccaaactgtgtctgacaacgagctgcaggagatgagcaaccaggggtccaaatatgtaaataaggagatccagaatgccgtaaacggagttaagcagattaagaccctgatcgaaaagactaatgaggagagaaaaaccctgctttctaatctcgaagaggcaaagaaaaagaaagaagacgctttaaatgaaacgagagagtctgaaaccaagcttaaggaactgccaggagtctgcaacgagaccatgatggccctctgggaagagtgcaaaccttgcctaaagcagacatgcatgaaattttacgcaagggtttgcagatcaggttccgggttagtaggacggcagcttgaggaatttcttaaccagagctcacctttctacttttggatgaacggcgaccgaatcgattcattactggaaaatgaccgtcagcagactcatatgctcgacgtcatgcaagatcacttctctcgcgcatcttcaattatcgacgaattatttcaggacagatttttcacccgcgagcctcaagacacctaccactacctgccattctcccttccccatcggaggccacatttttttttccctaagtctcgcattgttcggtcactcatgccattttcgccatacgaacctcttaattttcacgccatgttccagccattcctggaaatgatacatgaagcccagcaagccatggacatccactttcattcccctgcttttcaacaccctccaactgaattcattcgcgaaggagatgacgatcggacagtgtgtagagagattcggcacaattccactggatgtcttaggatgaaagaccagtgcgacaagtgccgcgagattcttagtgttgactgctcgaccaacaatcccagccaagccaaactgaggcgggagctcgacgagtccctgcaggtagccgaacgtctcacccggaagtataatgaactgctgaagagctaccaatggaagatgctgaatacatcttcactgctggaacagttgaatgaacagttcaattgggtctcaagactggccaacctcacacagggtgaagaccagtattacctgcgcgtgaccactgtagccagtcataccagcgatagtgatgtgccctccggggtcaccgaggtcgtggtgaaactctttgactccgatcctataaccgttacggtgccagtagaagtctcccgtaaaaatccaaaatttatggagacagtggcagagaaggccctacaagaatataggaagaagcaccgggaagagtag

SEQ ID NO: 218681 - DNA, 894 bp, synthetic construct
  misc_feature 1..894: note = Description of Artificial Sequence: Synthetic coding sequence
  source 1..894: mol_type = other DNA
atggaggcctgcaaagatagccggattggtgggatgatgaaaaccctcctgctgttcgtggggttactccttacctgggaatccggccaagtgctcggggatcagaccgtgagtgataacgagctgcaggaaatgtccaatcaggggtctaaatatgtcaacaaagaaatacagaacgctgtgaacggtgtgaaacaaatcaagactctgatcgagaagacaaacgaagaacgtaaaacgctgctgtctaacctcgaggaggctaagaagaagaaggaggatgccttaaacgaaacacgcgaatctgagacaaaactcaaagaacttcctggcgtctgcaatgaaacaatgatggcactctgggaagaatgcaaaccatgtctcaagcagacttgtatgaaattctatgccagagtctgcagaagtggcagtggactggtgggacggcaactggaggaattcctcaaccagtcaagtcctttctacttttggatgaatggcgacagaatagacagcctcctcgaaaacgatcgacagcagacccacatgctggacgtgatgcaagatcatttcagccgagcctcaagtatcattgacgagttatttcaagaccgattcttcacacgggagccacaggacacttaccattatcttccattcagtctcccccacagaaggccgcacttttttttccctaagtcgcgtattgttagaagcctaatgccctttagcccatatgaaccccttaattttcatgccatgttccagcccttcttggagatgatccacgaggctcaacaggctatggacatccattttcattcgcccgcatttcagcatcccccaactgagtttatcagggaaggcgacgacgaccgcaccgtctgcagatag

SEQ ID NO: 218682 - DNA, 2040 bp, synthetic construct
  misc_feature 1..2040: note = Description of Artificial Sequence: Synthetic coding sequence
  source 1..2040: mol_type = other DNA
ctgggccaatttgagcagcctactggatacatggagaactctgtctcttactccgccatcgaagatgtgcaactgctctcatgggaaaatgcacctaagtactgtttgcagctgacgatccccggtggaaccgtgcttctacaggccgctaattcttacctccgggatcagtggttccactctctgcagtggaaaaaaaaaatatataagtacaagaaggtcctttcgaatccaagccgttgggaggtcgtgttgaaggaaatacgtacccttgtggatatggctcttactagtccccttcaagacgactcaatcaaccaagcccctttagagattgtaagcaagctcctcagcgagaatacgaacttgacgacacaggagcacgagaatattattgttgccatcgctccacttcttgagaacaaccatccacctccagacttgtgcgagtttttttgtaaacattgccgggagagaccaagaagcatggtggttatagaagtgtttactccagttgttcagaggattctcaaacacaacatggattttggaaagtgtccacgcctccgacttttcacccaagagtatattctcgccctaaatgagcttaatgccggaatggaagtggtgaaaaagtttattcaaagtatgcacggaccaaccggtcactgccctcatccccgagtacttcccaatctggttgcagtgtgtctagctgccatctactcatgttacgaagagtttatcaatagtcgggacaattccccatccttgaaagagattaggaacggctgccaacaaccctgcgaccggaagccaaccctgccgttgcggctgcttcacccgagccccgaccttgtgagccaagaagcgacgctgtctgaggctaggctcaagtctgtcgtggtggcgagttccgagatccacgtggaagtagagcgtacgtcaacagccaagcctgcgctcactgcatcagccggtaacgacagcgagccgaatctgattgattgtctgatggtcagccctgcctgttcaacaatgagcattgagctgggccctcaagccgaccggacactcggttgttacgtggaaattctgaagcttctgtcagattacgacgattggcggccatctcttgcctccctgctacaacccataccttttcccaaggaggcactagcacatgaaaagttcacaaaggaattaaagtacgttatccagcggttcgcagaggacccgcgtcaggaggtgcattcgtgcctcctgtccgtccgcgctggcaaagatgggtggttccagctgtacagcccgggaggggtcgcatgcgatgatgatggagaactctttgcttccatggtgcatattctgatgggcagctgttacaaaactaaaaaattcttgctgtcgctcgctgagaacaaactggggccttgtatgctgcttgcactcagaggcaaccagacaatggttgagattctgtgtctgatgctcgagtacaacattatcgacaacaacgacacccaacttcagataatcagcactttagagtctactgacgtggggaaacggatgtatgaacagctttgcgacagacaacgggaactgaaggagcttcagcgtaaaggtggacccacccgcctgactctaccgtctaagagtactgatgcagatctggcaagactgctgtcctctggctccttcgggaacttggagaacctcagtttggcattcaccaacgttacatccgcgtgcgcagagcaccttattaagctgccttctctcaagcagctgaatctgtggagtacacagttcggtgatgctgggcttagactcctgagcgagcatttgaccatgttgcaggtgctaaacctgtgcgaaacaccagtgacagacgccggactgctagccctgagctctatgaaatctctgtgttctttgaatatgaattctaccaaattgtcagctgatacctacgaagatctcaaagctaagttgccaaatctaaaggaagtggacgtgcgttatactgaggcttggtag

SEQ ID NO: 218683 - DNA, 2322 bp, synthetic construct
  misc_feature 1..2322: note = Description of Artificial Sequence: Synthetic coding sequence
  source 1..2322: mol_type = other DNA
atggacgtcacctcctcgtctgggggaggcggtgatcctcgtcaaatagaagagaccaagccattgctggggggtgatgtctcggctcctgaggggaccaaaatgggggcagtgccatgccggcgtgcactattgctctgcaatggcatgaggtataagcttctacaagaaggagacatccaagtttgcgtaattcgtcacccaaggacgttcctttcaaagatattgacaagcaaattcctgcgtagatgggaaccccaccacttaaccctagcagacaacagcctcgcatccgcaacccctacaggatacatggaaaattctgtctcatactccgcaatcgaagacgtgcagctgctgtcctgggagaacgcaccaaaatactgcctgcaactgaccattccaggaggcactgtgctgcttcaagccgctaattcctatctgcgtgaccaatggttccactcattgcagtggaaaaaaaagatatataaatacaaaaaggtgctttccaaccccagccgctgggaggttgttctgaaggaaatccgtaccctggtcgacatggccctcactagccccctgcaggacgacagcattaaccaagcacctctcgagattgtctcgaagctcctgagcgagaacaccaatctgacaacccaggaacacgaaaatatcatcgttgccattgctccattgctggagaacaaccatcctccccctgatctgtgtgaatttttttgcaaacattgccgcgagcgccctcgcagcatggtggtgattgaggtgttcacccccgtagtgcagcgcatcctcaaacataatatggatttcgggaaatgtccgagacttaggctgttcacccaggagtatattctcgcacttaacgagctcaatgccggaatggaagtcgtgaagaaatttatccagagcatgcatggccctaccgggcactgccctcatcccagagtgctcccaaacttagtagccgtctgtttggccgctatctacagttgctatgaagagtttatcaattcaagggacaacagcccaagcctcaaggaaatcagaaacggatgccagcagccttgcgatcgtaagcccacacttccattaagactgctccacccctcacctgatctggtaagtcaggaagccacgctgagcgaagcccgtctaaaatccgtggtggtggcctcctctgagatccatgttgaggttgagagaaccagtacagccaaacccgctttgacagcttccgctggcaatgatagcgagcctaatctgatcgactgtctgatggtgagcccggcttgcagcaccatgagtatagagttaggtcctcaagcagaccggacactggggtgttatgtggaaatcctgaaactgctgtccgattacgacgattggcgtccctccctggcctcccttttacagccgatccccttccctaaggaggccctggctcatgaaaagttcaccaaggaacttaagtacgtgattcaaaggttcgctgaagatccacgccaggaagtacacagttgtctattgagtgtgagagcaggtaaagatggctggttccaactctactctcccggaggagtagcttgcgacgatgatggggagctttttgccagtatggtccatatcttgatggggtcctgctacaaaacgaagaaattcctgctaagtcttgcagagaataaattggggccatgcatgctcctggccctgagaggtaaccagactatggtagagatcctatgcctgatgctggaatacaacatcatagacaacaacgacacacagctccagatcataagtacgcttgagtcaacggacgtgggtaagcgcatgtatgagcaattatgtgacagacagagggagctgaaggagctgcagcgcaaaggagggccaacacggctaacgctacccagcaagagcactgacgccgatttggcccgtctgctcagttctggcagttttggcaatctcgaaaacttaagtctggctttcaccaacgtgactagtgcttgtgcagaacatcttatcaagctaccctctttgaagcaactgaatttatggagcacccagtttggcgatgcgggtctgcgcttgctgagcgaacacttaactatgctgcaggtattgaatctttgcgagacgcccgtcaccgacgctggtctactcgccctgagttcaatgaagtctctgtgttctttgaacatgaactccactaagctgtccgccgatacatacgaggacctcaaagcaaagctaccgaacctgaaggaagtggatgtacggtataccgaagcttggtag

SEQ ID NO: 218684 - DNA, 2040 bp, synthetic construct
  misc_feature 1..2040: note = Description of Artificial Sequence: Synthetic coding sequence
  source 1..2040: mol_type = other DNA
atgggacaagcagccgaacccactggctacatggaaaactctgtgtcatactcagccatcgaggatgtacagttactgtcctgggagaacgctcctaagtactgtctgcaactgactatccctggcggtacagtcttgctccaagcggcaaactcatacctcagggatcagtggtttcatagcctccagtggaagaaaaaaatatacaagtataagaaggtccttagcaatccctcccgatgggaggtggtactgaaagagatacgcacactggtggatatggctctcacctcccctctccaggacgacagtataaaccaggccccacttgaaatcgtttccaagctactgtccgagaacaccaatctgactacacaggaacacgaaaatatcatagttgctatcgcgcctctgttggagaataatcaccctccaccagacctatgcgagtttttttgtaaacactgcagagagaggccccgatccatggtggtcattgaggtctttaccccagtcgtccagcgcatcctcaaacacaacatggacttcgggaaatgccctaggctgcgcttatttacccaggagtacatcctggccctgaacgaactgaacgccggaatggaggtggttaaaaaatttattcagtccatgcacggaccaactggccattgcccacaccctagggtgctgcccaatttagtcgcagtgtgcctcgctgccatctactcctgttatgaggagttcattaacagcagggataactctccaagtctaaaggagattcgaaatggctgccagcaaccgtgtgacagaaagccaacactgcctctgaggcttctgcatccctctccggacctcgtgagccaggaggcaaccctcagtgaggctagactgaaaagcgtagtcgtggcctcttccgagatacatgtcgaggtggagcgtacgagcacagccaagcccgctttaacagccagcgccggaaacgattccgaacccaatctcattgattgtctcatggtctcaccggcatgcagcaccatgagcatcgagctcggaccacaggctgatcgcaccttggggtgttacgttgagatcctaaaattgctctccgactatgatgattggcgaccctcccttgcttccctactgcagccaatccccttccctaaggaggctctggcgcatgagaagtttaccaaagaactcaaatatgtcatccagcggttcgcagaggatcccagacaagaggtccactcctgtcttctatccgttcgtgcagggaaagacggctggtttcaactgtacagccccggtggagtagcctgtgacgacgacggggaactctttgcttccatggtgcatatcctgatggggagttgctataaaaccaaaaaatttttgttaagcctcgcggagaataagttggggccatgtatgctacttgcattaagaggtaatcaaacaatggttgagatcttgtgtctcatgctcgaatacaatattatcgacaacaatgacactcaattgcagatcatatctaccctggaatcaaccgacgttggtaaacggatgtatgagcagttgtgcgacagacagagggagctgaaggaactgcagagaaagggcggacctactaggctaactctaccaagcaagtccaccgatgccgacctggctcgcttgttgagcagcgggtcttttgggaatcttgaaaacctgtctttagccttcacaaatgtcactagtgcctgcgccgagcatctgattaaacttccctccctcaagcaattgaacctgtggagtacacagtttggggatgcaggattgcgcttgttatctgagcacctgacgatgctgcaggttttgaatttatgcgaaactccagtaaccgatgccggtctgttggcattgtcgagtatgaagagtctctgctccttaaatatgaactcaacaaagctgtctgctgacacatacgaggatcttaaggccaagctccccaacctgaaagaggtggatgtgcgatacacagaagcatggtag

SEQ ID NO: 218685 - DNA, 1761 bp, synthetic construct
  misc_feature 1..1761: note = Description of Artificial Sequence: Synthetic coding sequence
  source 1..1761: mol_type = other DNA
atggctctgacatctccacttcaggatgactctatcaaccaggcccctctggagattgtatcaaagctgttgagcgagaacaccaatttaaccacgcaagaacatgagaatatcattgtggctatagctcctctcttggaaaacaaccatccacccccagatctgtgtgaattcttctgcaagcactgcagggaacgcccaagatcaatggtcgtcattgaagtgtttactcccgtggttcagcgcatcctaaagcataacatggactttgggaagtgccccaggctgagactcttcacccaagagtacattctggctcttaacgaactcaatgccggaatggaagtggttaagaaatttatacagtctatgcacgggccaacaggccattgccctcacccgagggtcctgccaaacctggtcgccgtgtgtcttgccgcaatctactcctgctatgaggagtttattaacagtagggataactcaccgtccctgaaagagatccgtaatggctgtcagcagccctgcgatcggaagccaactttacccctccggctgctgcaccccagccccgatctcgtgtcacaggaggcaaccctttcggaagcaaggctcaaaagtgtagtcgtggctagctctgagatccatgttgaggttgagcggacgagcaccgccaaacctgcgctgacagcaagcgcgggtaatgactcagaacctaacttaatagattgtttgatggttagcccagcttgctcaactatgagcatcgaactcggaccccaggctgatcgcacgctcggctgctacgtcgaaatcctgaagcttttaagcgattatgacgactggcggccaagtctcgctagcctgctgcaaccaattccattccctaaggaggcgctagcgcatgaaaaattcaccaaggaactcaaatacgtgattcaacgctttgcagaggacccccgacaggaggtacactcctgtctgttgagcgtcagagctggaaaggacggctggttccagctgtattcccccggtggcgttgcatgtgacgacgacggtgaactattcgcctctatggtgcatattctcatgggatcttgttacaaaactaaaaagttcttactttccctggcggagaataaactgggaccatgtatgctccttgcgcttagaggtaaccagactatggttgaaatactgtgcctcatgctggagtacaatatcattgacaacaatgatacacaacttcagattatcagcacacttgagtctaccgacgtgggcaagaggatgtatgagcagctgtgcgatcggcagcgggagctgaaggaactgcagcgtaaaggcggacccacacgtctgactctcccctcaaaaagtacagatgccgatctggccagactcctctctagtggctcttttggcaatctagaaaatctgtccctcgccttcacaaatgtgacgtccgcatgcgcagagcacctgatcaaactcccctcactgaagcagctgaacctatggagtacacagttcggcgacgccggactccggctcctgagcgaacaccttaccatgttgcaggtcctcaacctttgcgaaacacctgttaccgatgcaggtcttttagccctttcaagcatgaagagcttatgttctttgaacatgaatagcaccaagctgtctgccgacacttatgaggatctgaaggcaaagctgcccaatctaaaagaggttgatgtcaggtatactgaagcttggtag

SEQ ID NO: 218686 - DNA, 312 bp, synthetic construct
  misc_feature 1..312: note = Description of Artificial Sequence: Synthetic coding sequence
  source 1..312: mol_type = other DNA
atggcccactataaggcagcggactccaagagggagcagtttcggcgatacttagaaaaaagcggcgtgctggatacgctgacaaaagtcttggtggcactgtatgaggagcctgaaaaacccaactctgccctggacttcctgaaacaccaccttggagccgctacgcccgaaaatcccgaaatagagctgctccgacttgagctggccgaaatgaaggaaaaatatgaggccatcgtcgaagagaacaagaagctgaaagccaaacttgcgcagtatgaacctccccaggaggagaagagggctgaatag

SEQ ID NO: 218687 - DNA, 1695 bp, synthetic construct
  misc_feature 1..1695: note = Description of Artificial Sequence: Synthetic coding sequence
  source 1..1695: mol_type = other DNA
atggccgtttttaggtctggcttattagtacttactacaccacttgccagccttgcgcctcgactcgccagcatcctgacatctgccgctaggctcgtgaatcacacactgtatgtgcatctccagcccggaatgtctctagaagggcctgcccagcctcagtcttcccctgtccaggctactttcgaagttctcgacttcattacccacttgtacgccggagctgacgttcataggcacctggatgtgcggatattgctgaccaacatcagaactaagagcaccttccttccacccctgcctacaagcgtccaaaatctggctcacccgcctgaggttgtgttgaccgactttcagacccttgacggatcccagtacaaccctgtaaaacagcagttggtacgctacgctacctcttgctacagctgttgtcctcggctggcgtctgtcctgttatactctgactacgggatcggcgaggtcccagtagagccccttgacgtccccctgccaagtaccatcagaccagccagtccggtggcgggatcccctaaacagccggttcgcggatattaccgaggagcagttggtggaacgtttgaccgcctgcataacgcccataaggtgcttctttctgtggcttgtatcctggcccaggaacaactggtggtaggagtggccgacaaagatctgcttaagtccaagcttctccccgaactgctgcagccttacacagagagggtggagcacttaagcgagttccttgtggacatcaagccctccctgaccttcgacgttatccctcttctggacccctacgggccagcaggcagcgacccatcactcgagttcttggtggtgagcgaggaaacttatcgtggaggcatggccattaacagattccgtctcgagaatgacctagaagagctagccctgtaccaaatccagttgctgaaagacctgcgtcatacggaaaacgaagaagataaagtgtcatcctcatcgtttaggcagaggatgctgggcaatctcctgcgacctccttacgagcgtccggagcttcccacctgtttatacgtaattggtcttactggcatttccggctccgggaagagctcaattgctcagcgcctaaaaggcctgggggcttttgtcattgactccgaccatttgggccaccgggcttacgctcccggagggccagcctaccagcctgttgtggaagctttcggtactgatatcctacataaggacgggattattaacagaaaggtcctgggaagccgggttttcggaaacaagaagcagctgaagattttgaccgacattatgtggcctatcattgccaagctggcccgagaggaaatggaccgcgctgtggccgaggggaaacgggtgtgcgtcatcgacgctgctgtccttctcgaagcaggctggcagaacctggtgcatgaggtttggaccgcagttataccggagactgaagcagtgaggcgcatcgtcgaacgggatggactgtctgaggctgccgctcaatctcgcttacagtcacaaatgtccgggcaacaactcgttgagcaaagtcacgtggtactctccactctctgggaacctcatataacccagagacaggtggagaaagcctgggcgctactacaaaaaaggatccccaagacccaccaggctctggattag

SEQ ID NO: 218688 - DNA, 1695 bp, synthetic construct
  misc_feature 1..1695: note = Description of Artificial Sequence: Synthetic coding sequence
  source 1..1695: mol_type = other DNA
atggctgtatttagatctggactgctcgtcctcaccactcctttagcttctctggctcctcgactagcctccattttaacatctgcagctcgcctggtgaatcacacactgtacgtgcacctgcagccaggaatgtcgctagaagggccagcccaaccgcaatcatctcctgtacaagccacctttgaagtgctcgatttcatcacgcacctgtacgccggagctgacgtgcaccgtcatctggatgtgcgcatcttgctgacaaacattcgtactaagagcactttcttgcccccacttcccacctccgtgcaaaatctagctcaccctcccgaggtggtgttgacggattttcagacactcgacgggagccagtataaccccgtcaaacaacagctcgtccgatacgcaactagttgttattcttgttgtcccaggctagcttcagttctgctgtattcagattacggcatcggggaggtgcccgtggagcctctggatgtacctttaccgagtacgatcagacctgccagtcctgttgctggctcccctaagcaacccgtgaggggatattacaggggggctgtaggcggaacctttgaccgcctccataatgcccacaaggtcctgctgtcagtggcttgtattctcgcacaggagcaacttgtagtcggcgtggctgacaaggaccttctgaaatctaaattattaccggaattactgcaaccatataccgagcgtgtcgaacatctgagtgaattcctcgttgacattaagccgtccctgacctttgatgtgatcccacttctggatccttacggcccagctggatcggacccatccctagagtttctcgtggtgagcgaggaaacttatcgcggtggaatggcaatcaacaggtttcgcctagaaaacgatcttgaggagttagcgctttaccagatacagctgctcaaagacctgagacacactgagaacgaagaggataaggtctcatcttccagcttcagacaacgaatgctggggaacctcctgcgccctccatacgagaggcctgagctacctacgtgtctgtatgtcataggcctgactggaattagcggcagcggaaagtcttctatcgcccagagactgaagggcctgggagcatttgttatcgactcagatcatctgggccatcgggcttacgcccctgggggtcctgcctaccaaccagtcgtagaagccttcggtaccgatattctgcacaaggatgggattataaataggaaagtcctcgggtcacgggtgttcggcaacaagaagcaattaaaaatcttgactgacatcatgtggcccatcatcgctaaactggcgagagaggaaatggacagggcagtcgccgaaggcaagagggtttgtgtcattgacgccgctgtgttacttgaggccggttggcagaaccttgtgcacgaggtgtggaccgctgttatccccgagaccgaggctgtgaggcgcattgttgaacgagatgggctgtctgaggctgctgcccagtcacggcttcaatcacagatgtctggacagcagctggtcgaacaatcacacgtcgtgttgtcaaccttgtgggaacctcacatcacacagagacaagtggagaaagcctgggccctcctccagaaacgaattccgaagacacatcaagcccttgattag

SEQ ID NO: 218689 - DNA, 1782 bp, synthetic construct
  misc_feature 1..1782: note = Description of Artificial Sequence: Synthetic coding sequence
  source 1..1782: mol_type = other DNA
atgagaactccaaggcttcgtgcccagccacgcggagcagtgtaccaagccccaagccctcctcctgctcccgtgggcttgggatccatggccgtgtttcgcagtggacttctggtcttaactactccactggcttctctggcacctcgcctcgcatcaattctcacctcagctgctcgactggttaaccacacattatacgtgcacttgcaacccggaatgtccctggagggaccagcccaaccacagagttctcccgtgcaggccactttcgaggtgctggattttattactcacctgtacgcaggcgcagacgtgcataggcacctggatgttaggatcctcctgaccaacatccggaccaaatccaccttcctaccccctctacccacctctgttcagaacctggcccaccctcccgaggtcgtattgaccgactttcagacccttgatgggtctcaatataatccagttaagcaacaactcgtacggtacgcaacatcttgctactcctgctgtccacggctggcgtccgttctgttatacagtgactatggaattggagaggtgcctgtagagcccctggatgtgccactcccttctacaatccgcccagcctctccggtggcaggcagtcctaagcagcccgttcggggatactacagaggtgccgtagggggaacattcgataggctccataacgcacacaaagtgctgctttccgtagcctgcatactcgcgcaggaacagctagtcgtgggtgtggccgacaaggatctgctaaagtcaaagctgctgcccgagcttctgcagccctacacagaacgggtcgaacacttatcagaatttctggtagacattaaaccatcgcttacctttgatgtgatacccctgctggatccatatggccctgctgggtctgaccctagtttggaattccttgtggtgagcgaggagacataccgcggagggatggccataaaccggttccgtctggaaaacgatttggaggaactcgctctctatcagatccagctgcttaaggatctccgccataccgagaacgaggaggataaggtctccagcagctcctttagacagcggatgttgggcaacctcctgagaccaccctacgagaggcccgagctccccacatgtctctacgttatcggtctgaccggaatctctggatctggcaaaagttccatcgcccaaaggctcaagggattaggagcgttcgttatcgactccgaccacctggggcatagggcctacgctcccggagggccagcttaccagcctgtcgtggaggcgtttggtactgatatcctgcataaggacgggattatcaaccgcaaggtgctgggatcacgggtgttcggcaataagaagcaactgaaaatcctgactgatattatgtggcccattatagctaaactggcaagggaagaaatggatagggctgtagctgaagggaaaagggtctgtgttatcgatgccgctgtcttgctagaagccggatggcaaaacttggttcacgaggtctggacggcggtgatccctgagacagaggctgtgcgcaggattgttgagcgtgacggactgtctgaggccgcagctcagtctagacttcagtctcagatgtccgggcaacaactggttgagcaaagccatgtggttctttccacactgtgggaaccccacatcactcaacggcaggtggaaaaagcttgggccctgctgcagaagaggatacccaagacgcatcaggcccttgattag

SEQ ID NO: 218690 - DNA, 528 bp, synthetic construct
  misc_feature 1..528: note = Description of Artificial Sequence: Synthetic coding sequence
  source 1..528: mol_type = other DNA
atggctgtgttcagatcaggactgctggtcctcaccactccgctggctagcctagccccacggcttgccagcatcctcacctcagccgctcgtttggtaaatcacacgctgtatgtccacctgcagccaggaatgtctctggagggtcctgcccagccgcaatcttcacccgtgcaggctacatttgaggtgttagattttatcacacatctgagcccatcccctgcccacctatctcctgaaagtaggcctcccgcaagaagtcgtgtggaccggtttccagatcccggttggaagcccgtgcagccagggcagacagccgcttcagccctacggcatcagctgctccagcttttgtccgccaccggcctgggtgccgcaattttgcggctgtgggaccgtcggtccgccagaggcgctccagggtgcccattaactctgcatgaccaggcctccttccccaggggacgggtgtccaaagctgcgggagcatggctgctcccatggagatgcagatggcatgtttag

SEQ ID NO: 218691 - DNA, 810 bp, synthetic construct
  misc_feature 1..810: note = Description of Artificial Sequence: Synthetic coding sequence
  source 1..810: mol_type = other DNA
atggccatcaatcgttttcgactggagaacgatctggaggaattagctctgtaccagattcagctgcttaaagacctgcggcatacagagaatgaggaagacaaggtatcctcatcatcgttccggcagaggatgttagggaacctgcttcgccctccctacgagaggcctgaattgccaacctgtctttatgttattggcctgaccggtatctctggctccggaaagagtagcattgctcagaggctgaagggtctgggcgctttcgtgatcgattctgaccacctcggccatcgtgcttatgctcccggtggcccagcctatcagcctgtggtcgaagcattcgggacggacatcctccacaaggacggaataatcaacagaaaggtcctgggatcacgagtcttcggaaacaagaaacagctcaaaatcctgacagatattatgtggccaatcatagccaagttggccagggaggagatggatcgggcagttgcagaaggaaaacgcgtttgtgttattgatgctgccgtgttactggaagcaggatggcagaatttggttcacgaagtatggacagcggtgatacccgagaccgaagccgtgcgcaggatagtggagcgcgatgggctctcggaagcagcagctcaaagccgccttcagagccagatgtctggtcaacagctcgtggaacagtctcatgtggttctgagtaccctgtgggaaccacacatcacacagcggcaagtggaaaaagcttgggcattattgcaaaaaagaatacctaaaacccaccaggctctggactag

SEQ ID NO: 218692 - DNA, 1782 bp, synthetic construct
  misc_feature 1..1782: note = Description of Artificial Sequence: Synthetic coding sequence
  source 1..1782: mol_type = other DNA
atgcgaacaccacgcttgagagctcagccgcgaggggcagtctatcaggccccttcaccaccacccgcacccgttggattaggatctatggcagtgtttagaagcggcctgcttgtcctgaccacccctcttgctagtcttgctcctaggctggcgtcaatcctaaccagcgcagctaggcttgtcaatcacaccctgtacgtccacctgcagcctggaatgtcacttgaaggacctgcacagcctcagtcctcccccgtccaggccacctttgaggttctcgattttataacgcacttgtatgctggggcagacgtccaccggcatctggacgtgaggattctgctcacaaatatcagaacaaaaagcacctttcttccacctctgcccacttctgtacagaacctggctcatcctcccgaagtcgtactcacagactttcagaccctggacggctcgcaatacaatccggtgaaacagcagttggtacgctacgctacctcttgctactcctgctgcccacggctggccagcgtgttactgtatagtgattatgggattggggaagttccagtggaaccactggatgtgcctctgccatccactattagacctgccagtcctgtggctggtagccctaaacagcccgtgagagggtactatcggggagcggtcggaggcacattcgaccggctgcacaacgcccataaggtcctcctgtccgtcgcttgcatactggcgcaggaacagttagtcgtgggcgtggcggacaaagacctgctgaagagcaagcttcttcccgaacttctacagccctatacagagagggttgagcatctttctgaatttctggtggacatcaaaccatccttgacatttgacgtgatccccttgctcgatccatacggtcccgctggaagcgaccctagtttagagtttctcgttgtctcggaagagacctatcgaggtggtatggccatcaatcgatttagactggaaaatgatcttgaggagctggccctctaccagatccaactcctcaaggatctaagacataccgagaatgaagaagataaagtgtcctcgagctcctttcgacaaagaatgttaggtaatctacttaggccaccttatgagcgacccgaactgcccacctgcctatacgttattggcctaacagggatttctgggagtggcaaatcctccatcgcccagagactgaaagggctgggggcatttgtgatcgacagcgatcacctgggtcaccgcgcatacgctccaggtgggccagcatatcagcccgtggtggaggcttttggaactgacatcctgcacaaggacgggatcattaacaggaaggtcctgggttctcgcgtgttcgggaacaaaaagcagctgaaaattctgaccgatatcatgtggcctatcatagcaaagctggcacgcgaggaaatggatcgcgcagtggccgaggggaaacgggtgtgcgtgatcgacgccgcagtcctcctagaggctgggtggcagaatctggtgcacgaggtgtggaccgcagttatacccgagaccgaggctgttagaagaatcgtggagcgggacggcctgtctgaagctgctgctcagtccaggctccagagtcagatgagcggacagcagctcgtggagcagtctcatgtggtgctgtcgacactttgggaaccccatatcacccaaagacaagtagagaaggcctgggcgctcctgcagaagcggattcccaagacacaccaggcgctggattag

SEQ ID NO: 218693 - DNA, 429 bp, synthetic construct
  misc_feature 1..429: note = Description of Artificial Sequence: Synthetic coding sequence
  source 1..429: mol_type = other DNA
atggccacaaagatcgacaaggaggcctgtagagcagcatacaaccttgtgagagatgatggaagtgccgtgatttgggtgacttttaagtatgacggaagtaccattgttccgggagaacagggcgcagaataccagcactttattcagcagtgcactgatgatgtccggctgtttgctttcgtgaggttcacaacaggagatgctatgagtaagaggtcgaagttcgcccttatcacctggataggtgaaaatgtctctggcttgcagcgcgctaagacaggaactgataaaaccctggtgaaagaagtcgtccaaaactttgcaaaagagtttgttatttctgacagaaaggagctcgaggaagacttcattaagtccgaattgaaaaaagccggaggggctaactacgacgctcaaaccgagtag

SEQ ID NO: 218694 - DNA, 1731 bp, synthetic construct
  misc_feature 1..1731: note = Description of Artificial Sequence: Synthetic coding sequence
  source 1..1731: mol_type = other DNA
atgcgtggtcctaattctggaaccgaaaaggggagacttgtgattccagagaagcagggatttgatttcttgtgcatgccagtctttcatccacgctttaagagagagttcattcaggaacctgccaagaaccggcctgggcctcagacacgatctgatctcctgctgtctggccgtgcttttctcctccccctcaaccaggaggataacacaaatctggcgcgtgttctcacaaaccacattcataccggccaccatagtagtatgttttggatgcgagtaccactggtggccccagaagatctgagagacgacataatagaaaacgcccctacgacacacactgaagaatatagcggcgaggagaagacgtggatgtggtggcataactttcggactctgtgtgactactccaaacgaattgccgttgctctagagataggcgcagatctaccttctaaccatgtaatcgatcgatggctcggggagccaattaaagccgctatcttacccacttctatttttctgacaaataagaaggggttccctgttctctccaagatgcatcagcgcctgatcttccgtctcctgaaactggaggtgcaattcatcatcacggggactaatcaccatagcgagaaggaattctgttcatacttgcagtacctggaatacctgagccagaaccgccctccccctaatgcttatgagctgttcgcaaaaggttacgaagactatttgcaatctcccttacagcctctcatggataacctagagtcccagacttacgaagtatttgagaaagatccgataaagtactctcaataccagcaggcaatatataaatgcctgttggatcgcgtgcctgaggaggagaaagacaccaatgtgcaggtcctcatggtactgggcgcaggccgaggacccctggttaatgccagccttagagcggctaagcaggccgacaggcgcatcaagctgtatgctgtcgagaaaaaccccaacgcagtagtgactctcgaaaactggcagtttgaagaatggggaagccaggtcacagtggtctcatcggatatgcgagagtgggtcgctccggagaaggctgatatcattgtcagcgaattgctgggttcattcgcagataatgagctcagtcctgaatgcctcgacggagcccagcatttcttaaaggacgatggagtgtctatccctggggaatataccagctttctggccccaatttccagtagcaagctgtacaatgaagtgagggcatgccgcgagaaggatagagatcccgaagctcagtttgagatgccttatgtggtgagactgcacaatttccaccaactttcggccccacagccctgtttcacttttagtcatcccaatagggatcctatgatcgataataatagatactgtacgctcgagtttcccgtggaagtcaatactgtgctgcacggcttcgcagggtatttcgagaccgtgctgtaccaggatataacgctgagtattcggccagaaactcattctcctggtatgttttcctggttccctatcctgttcccaatcaaacagccaatcaccgtccgagagggtcagacaatttgtgtgaggttttggcggtgtagcaactctaaaaaggtgtggtacgagtgggcggtgaccgcccctgtgtgctctgctattcacaaccccactgggaggtcctacacaatcggcttgtag

SEQ ID NO: 218695 - DNA, 1206 bp, synthetic construct
  misc_feature 1..1206: note = Description of Artificial Sequence: Synthetic coding sequence
  source 1..1206: mol_type = other DNA
atgcttggcattggcacggaaggacctcacgttggcctagtacaggccagtgagcaccccaagatcgaattctatctaaagaactttacatctgccaaggatgtcttattcgcgatcaaagaggtaggattcaggggcggaaatagtaatacagatataacacttgaaaaatacctattcgtgatgctcaaaaggtcagagaatcagcagacatacctcatgaacgccgatgtcgctgagcgcatgagctccacaactgtagacagcgaggagcgcctactccgagggaaggctctgaagcatacagcacaaaagttttttacagtggatgccggagtgcggaagggcattccgaaggtcgtggtggtgttcattgatggatggcctagcgacgacatagaggaagccggaatcgttgcgagagagttcggtgttaatgtgttcatcgtgtccgtggcaaagccaatccccgaggaattaggcatggtgcaagacgtcactttcgtggacaaggccgtttgccgtaataatggctttttcagttaccacatgccgaactggtttggtaccaccaagtacgttaagcctctcgtgcagaaactctgtacccacgagcagatgatgtgttcaaagacatgttataatagcgtaaatatcgcctttctcatagatgggtcctcaagcgtaggagattccaacttcaggctaatgctcgagttcgtgtcaaatatagccaagaccttcgagatcagcgatataggcgctaaaatcgctgctgtgcagtttacatacgaccagcggaccgaatttagctttacagattactccaccaaggagaacgttttagcggtcattaggaacatccgctacatgagtgggggtacagcaacaggggatgcaatcagctttactgtgcgtaacgtcttcgggccaattagagaatccccaaataaaaattttttggtcatcgtgacagatggacagtcctatgacgatgtgcaggggccagccgctgctgctcacgacgccggtatcaccattttctccgttggggtggcatgggcgcctctggacgatctcaaggacatggcttcaaaacccaaggagtctcacgccttcttcacacgcgaatttacggggttggagcccatcgttagtgacgtgatccgcggaatttgtagagacttcctcgaaagccagcagtag

SEQ ID NO: 218696 - DNA, 1653 bp, synthetic construct
  misc_feature 1..1653: note = Description of Artificial Sequence: Synthetic coding sequence
  source 1..1653: mol_type = other DNA
atgtctgccgcttggatcccagctcttggactcggcgtttgccttctgctgcttcccggtcctgccggatccgaaggagctgccccaattgcaatcacctgttttaccaggggccttgatattcggaaagagaaagcagacgtgctgtgccccggtggctgcccgttggaagagttttcagtgtacggcaatatagtgtacgcttctgtctctagtatatgtggagcggctgttcatcgcggagtcatatctaattcaggtggtcccgtgcgcgtgtacagtctgccgggacgcgagaattactcaagcgtcgatgccaacgggatccagtcacaaatgctgtctcggtggagcgcctcctttaccgtcactaaggggaagtccagtacccaggaggcaacaggccaggccgtgtctacagcccatccacccacaggcaagagattaaaaaaaaccccagagaagaaaaccggcaacaaagattgtaaagccgacattgctttcctgatcgacggtagttttaatattggccagcgcaggttcaacttacagaagaacttcgttggcaaagtcgcgcttatgctaggaatcgggaccgaagggccacacgtggggctggtgcaagctagtgagcatccaaagatagagttctatcttaaaaactttaccagtgccaaggacgtactgttcgcgataaaggaagtagggtttagagggggtaattcgaataccggaaaagctttgaaacacacagcgcagaaattctttactgtggatgcaggggttaggaaggggattcccaaggtcgtcgtggtgtttatcgacggatggccaagcgatgatatcgaggaagctggcatcgtcgccagagagttcggcgtcaacgtcttcatcgtcagcgtcgctaagccaatccccgaggagctgggaatggtgcaggatgtgaccttcgtagataaggctgtgtgccggaacaacggctttttttcatatcacatgcccaactggtttgggactaccaagtatgtaaagcctctggtgcagaaactgtgtacacatgagcaaatgatgtgctctaagacgtgttacaactcggttaacattgccttccttatcgatggttcttcttcagtcggcgactcgaacttccggttaatgctggagttcgtcagcaatatcgccaagactttcgaaatctcagatataggagctaagatagccgctgttcagttcacatacgaccagagaactgaattttccttcaccgattattctacgaaagagaacgtcctagctgtcataagaaatatccggtacatgagtggcggtaccgctactggcgatgcgatttcttttacagtgagaaacgtgtttggccctatacgcgagtcaccaaacaagaatttcctggtgatcgtgaccgacggccagtcctacgacgacgtgcagggccctgccgcagcagctcacgatgccggtattacaattttttcagtcggagttgcctgggccccattggacgacttgaaggacatggcctctaagcctaaggagtcgcatgccttctttacaagggagtttaccggactcgagcctatcgtgtccgatgtgattaggggcatctgccgggatttcctcgagtcccagcagtag

SEQ ID NO: 218697 - DNA, 732 bp, synthetic construct
  misc_feature 1..732: note = Description of Artificial Sequence: Synthetic coding sequence
  source 1..732: mol_type = other DNA
atgctcagtaggtggagcgccagtttcactgtgactaaaggcaagagttccactcaggaagctacaggccaggctgtgagcacagctcacccaccaacaggaaagaggctgaaaaagacacctgaaaagaagacaggaaacaaggattgtaaagcggacattgcctttcttatagacggttcctttaacatcggccagagacgtttcaatctacaaaagaactttgtgggcaaagttgcgctaatgttaggaatcggtactgaggggccacacgtcggcctggtccaggcctcagaacatcctaagattgagttctacctgaagaacttcaccagtgctaaggacgtgctctttgcaattaaagaagtgggcttcagggggggtaattctaacacaggaaaagcactcaaacatacagcacagaaatttttcacagtcgatgccggagtgagaaaggggattcctaaggtggttgttgtcttcattgacgggtggccttccgatgatattgaggaggcaggcattgtcgctagagagtttggagtgaatgtgtttatagtgtccgtcgcaaagcctataccagaggagctcggaatggttcaagatgtgactttcgtggacaaggccgtttgtaggaataatggcttctttagttaccatatgccaaactggttcgggactactaagtacgtcagcttgtggtaccgttcctgcgcgctcatgaataaatag

SEQ ID NO: 218698 - DNA, 1278 bp, synthetic construct
  misc_feature 1..1278: note = Description of Artificial Sequence: Synthetic coding sequence
  source 1..1278: mol_type = other DNA
atggggccaaggagacttctgctggtggccgcatgtttctctctttgtgggccactactgagcgcgagaactagggccagaaggccagaatctaaagccaccaatgcgacccttgaccctaggtccttcctgcttaggaatccgaatgacaaatacgaacccttttgggaggatgaggaaaagaacgagtcaggactcaccgaataccgcttggtatccattaacaagtcttcacctctgcaaaaacagttgcctgcgtttatttcagaagacgcaagcggctacctgacctcctcatggctgaccctttttgtgccctccgtatacacaggcgtcttcgtggtgtctctgcctctcaacatcatggctattgtggtattcattctgaagatgaaagtgaaaaaacccgcagtcgtgtacatgcttcacttggccacggcagacgtgcttttcgtcagcgtcttgcccttcaagatctcctactacttcagtgggagcgactggcagtttggatcagagctctgtagattcgtaacagcagcattttactgcaatatgtacgcttctattctgctgatgaccgttatcagcatcgacaggttcctggctgtcgtctacccaatgcaatccctctcttggcgcactcttggcagggcctccttcacctgccttgctatttgggcgctggccattgcaggggtggtgcctcttttactcaaggaacagaccattcaggtgccagggctgaatatcactacctgccacgacgtcctgaatgagacattactggaaggatattatgcctattatttctctgctttttcagccgtctttttcttcgtgccattgatcatatctacagtgtgctacgtgtccatcatacgctgcctgtccagctccgcagtggccaacaggtctaagaaaagcagggcattgttcctcagcgcggcagttttctgcatatttataatttgttttggcccaaccaatgtactactcatcgcccactacagcttcctttcacacacttcaactactgaagctgcttactttgcctacctcctttgtgtctgtgtgtcttctatctcctgttgcatcgacccgctgatctactattatgcctcatctgagtgccagcgctacgtctattctatcttgtgctgtaaggagtctagtgacccttccagctacaatagcagcggccagctgatggcttctaagatggacacttgctcatcaaatcttaacaatagcatatacaaaaagctgcttacatag

SEQ ID NO: 218699 - DNA, 1194 bp, synthetic construct
  misc_feature 1..1194: note = Description of Artificial Sequence: Synthetic coding sequence
  source 1..1194: mol_type = other DNA
atgcgctccccttcagcagcttggctgcttggggctgccatcctgctggctgctagcctgtcatgttctggaaccattcagggtaccagccgcagcagcaaaggcaggtctttaatcggaaaagttgacgggaccagccacgtgacaggtaagggagtaacggttgagacagtctttagcgtggacgaattcagtgccagcgtgttgacagggaagctcaccacggtgtttctccctattgtgtacaccatcgtctttgtggtggggctgcctagcaatggcatggcgctgtgggtctttttatttcgcacaaaaaaaaagcaccccgcagtaatatatatggccaacttggccttagccgatctactgtccgtcatatggttcccgctcaaaatcgcctatcacatacatgggaataattggatctatggcgaggctctatgtaatgtcctgatagggttcttttatggcaacatgtactgttccatcctatttatgacatgtctttctgtccaacggtattgggttatagtaaatcccatggggcactcaagaaaaaaggccaatatcgctataggaataagtctggccatatggctgcttatactattagttacaattcccctgtatgttgttaagcagactatctttattcccgcactgaacatcaccacctgccatgacgtgttgcccgagcagcttctggtgggagatatgttcaactattttttgtccctggctattggggtattcctttttcctgcgtttctgaccgccagcgcctacgtgcttatgatccgcatgctgagatcgagtgctatggatgagaatagtgaaaagaagcggaagagggccattaaacttattgtcacagtcctggctatgtacctaatctgttttaccccatctaacctcctcctggtcgtgcactattttctcatcaaaagtcagggccaatctcacgtgtacgccctttacatcgtggccctgtgtctgtctactcttaacagctgcattgatccatttgtctattatttcgtgtctcatgattttagagatcatgcgaaaaatgcgctgttgtgtcggagcgtgcgcactgtgaagcagatgcaggtcagccttacgtccaagaagcactcacggaaatccagctcctattcctcatccagcaccacagtgaagaccagttactag

SEQ ID NO: 218700 - DNA, 1125 bp, synthetic construct
  misc_feature 1..1125: note = Description of Artificial Sequence: Synthetic coding sequence
  source 1..1125: mol_type = other DNA
atgaaggctcttatttttgcggcagcagggttgcttcttctgctacccactttttgccagtctgggatggaaaatgatacaaataatttagctaaacctacactgccaattaagactttccggggagccccaccgaatagctttgaggaattccctttcagcgccctggaggggtggaccggagcaactatcactgttaagattaagtgtccagaggaatccgcgtctcacctccatgttaagaatgctacaatgggatacctaactagcagtctttctaccaaactgataccagcgatttatctgcttgtgttcgtggttggagtccccgcaaatgctgtgacactgtggatgctctttttcaggacacggtctatctgcaccacagtgttctacaccaatttggccatcgccgactttcttttttgcgtgaccctgccctttaaaatagcttatcatctgaacggaaataattgggtgtttggcgaagtgctttgtagagccacaactgtcattttttacggcaacatgtattgctctattctgctgctagcttgcatatctatcaacaggtatcttgcaatcgtccacccttttacttataggggactgcctaagcacacctatgcactagttacttgcgggcttgtgtgggctaccgtttttctttacatgctgccattcttcatactgaagcaagagtattatctggtccagccggacatcaccacatgccatgacgtgcacaatacctgtgaaagctccagcccgttccagttgtattactttatcagcctggctttcttcggtttcctgattccctttgtgctcatcatctactgctatgcggcaataataagaacacttaacgcgtacgatcaccgctggctgtggtacgttaaagcctcacttttaattcttgtgatttttacaatttgctttgccccatccaatatcatacttatcatacatcacgctaattactattacaataacaccgacggcctttacttcatttacctcattgctttgtgcctaggcagtctgaattcctgcctggacccattcctgtactttttgatgtccaaaacaaggaatcactcaactgcctacctcactaaatag

SEQ ID NO: 218701 - DNA, 1059 bp, synthetic construct
  misc_feature 1..1059: note = Description of Artificial Sequence: Synthetic coding sequence
  source 1..1059: mol_type = other DNA
atggagaatgataccaataatctcgccaagccaacactccccataaagacattccgcggagcaccccctaactcattcgaggaattccctttttcagcgttggaagggtggaccggcgcaacaattacagtgaaaatcaaatgcccggaagaaagcgcaagccacctccacgtgaaaaatgcaactatgggctatctgacctcctccctttctactaagcttataccggctatctacttgcttgtgttcgtcgtcggggttcccgctaacgctgtcacgctctggatgctgtttttccggaccaggtccatctgcacaaccgtattttacaccaaccttgccattgcagactttcttttctgcgtcactttacctttcaaaattgcgtaccacctaaacggaaataactgggttttcggggaggtcctctgtcgagccaccacagtgattttctacggcaatatgtactgttccatccttctgctggcttgcattagtatcaatagatacctcgcaattgttcatccatttacatatcggggtctgcctaaacacacttatgctttggtgacctgcggcctggtgtgggccactgttttcctgtacatgttgcccttctttatcctgaagcaggagtattacctggtgcagccggacatcacaacttgtcacgacgtccacaacacgtgcgagagttctagccccttccagctgtattatttcatctctctagcctttttcggcttcctgatacctttcgtgctgataatttattgctacgctgctattatcagaaccctaaatgcctacgaccaccgctggttatggtatgtgaaggcttcactcctgatcttagtgatcttcaccatatgctttgccccatccaacataatcctcatcatccatcacgcaaactactattacaataataccgacggcctgtacttcatttatttgatcgcgttgtgtctcggttcccttaacagttgtttggatcccttcctgtacttcttgatgagcaaaacccggaatcacagcactgcctacctgactaagtag

SEQ ID NO: 218702 - DNA, 1158 bp, synthetic construct
  misc_feature 1..1158: note = Description of Artificial Sequence: Synthetic coding sequence
  source 1..1158: mol_type = other DNA
atgtgggggcgtttgttgctttggcccttggtcctgggattctccttgtcggggggaacccagacaccatcagtttatgacgaatctgggtctacgggaggaggcgatgatagtacccctagcatcttgcctgcccctagaggataccctggccaggtatgcgccaacgacagcgacacactcgaacttcctgattcctcacgcgcactcctgctggggtgggttcctactaggctagtgcctgcgctgtacggcctggtacttgttgtcggcctgcccgcaaacgggctggctctgtgggtgctggccacacaagcgcctcgactcccctctacaatgttacttatgaacttggctgcagccgacttgctgttggcgttggcgttaccccctagaattgcttatcacttgagaggccagagatggccttttggcgaggcggcttgcaggctggcgacagcagcactgtatggacatatgtacggctcagtgctcctgcttgccgcagtatccctcgaccggtaccttgctttggtgcaccctcttagggccagagccctacggggtcgcagattggccctgggactttgtatggctgcatggttaatggccgctgcactggctctgcccctcaccttacagcgccagacctttcggctagccaggtctgaccgcgtgctgtgccacgacgctttgccgctggatgctcaggcatctcactggcagcccgcttttacatgtcttgcgttactgggttgcttcctaccactgctcgccatgcttttatgttatggggcaactctgcataccctcgctgcctcaggacgacgctatggacacgctctgcggctaacggccgtagtgctcgcgtctgccgttgcctttttcgtaccctccaacctgctgctgctattgcactattccgatccatcaccatctgcctggggcaacctgtatggagcctacgttccgtccctggccttgtccacactgaattcttgcgtagaccccttcatctattactatgtttccgctgaattcagagacaaagttcgagccggtctgtttcagcgcagtcccggagacaccgtcgcctcaaaggcctccgctgagggtggaagccggggaatgggaacacactctagcctcctgcagtag

SEQ ID NO: 218703 - DNA, 1848 bp, synthetic construct
  misc_feature 1..1848: note = Description of Artificial Sequence: Synthetic coding sequence
  source 1..1848: mol_type = other DNA
atgagggcactgctgctgctcggcttcttgctcgtctcgttggaatctacattgtctattccaccatgggaagcccctaaggagcacaagtataaggccgaggagcacactgtcgtcctgaccgtgactggcgagccctgccactttccatttcagtaccatcgccagctgtaccataagtgtacgcacaaaggcaggcccggtcctcaaccttggtgtgcgactactcccaattttgatcaggatcagcgctggggctattgtttagagcccaagaaggttaaagatcactgcagtaagcattcaccttgccagaagggcggaacctgcgttaatatgccaagcggccctcattgcctttgcccccagcacctgactggcaatcactgtcagaaggagaagtgttttgaaccacagctacttagattctttcacaagaacgaaatatggtataggactgaacaggccgctgtagccaggtgccagtgcaagggacccgatgcccattgtcagagactggcttctcaggcatgtcgaaccaacccgtgcctacacggtggacgttgtcttgaagttgaaggccataggttgtgccattgccccgtggggtacactggcgcattctgcgatgttgacaccaaagcaagctgctacgatggacgcggtctatcctaccgcggtctagctaggacgacgctctccggagcgccatgccaaccttgggcgtccgaggccacatatcgcaacgttacagctgaacaggctaggaactggggcctgggaggccacgccttttgccgcaacccagacaacgatatccgcccatggtgctttgtactgaatagggatcgtctctcatgggaatattgtgacctagcacagtgccagactccgacccaagctgcccctccgaccccagtctcccctaggctgcatgttccactcatgcctgcccaaccagcaccccctaagcctcaaccgaccactagaactccacctcaatctcaaacccctggggctcttcccgctaaacgcgagcaaccaccttccttgacccggaacggaccactgagctgtggacagcgcctgaggaagtctcttagcagcatgacccgggtggtgggcggactggttgccttgcgaggcgctcacccatacatcgcagcgctttactggggtcactctttctgtgcgggtagtctgatcgccccttgttgggtcttgaccgctgcccactgtttgcaggacaggcctgcacctgaagaccttactgtggtactggggcaggaaagaaggaatcacagctgtgagccttgccagaccctggccgtgaggagttatagactgcatgaggccttctccccggttagttatcagcatgacctggccctgctgagactgcaggaagatgctgacggctcttgcgcattgctgtccccctacgtacaacccgtttgtctcccatcgggcgcagctcgccctagcgagaccacattatgccaagtggctggttggggtcatcagtttgaaggggctgaggagtacgcttcatttcttcaggaggctcaggtgccgttcctgtctctcgaaagatgctccgctccagacgtgcatgggagttcaatcctccccggaatgctgtgcgccggatttcttgaaggagggaccgatgcctgccagggagatagtggaggccctcttgtttgtgaggatcaggccgcagagcgacggctgacgctccaaggcattatatcctggggtagcggatgtggggaccgcaacaaacccggagtgtatactgacgtagcctactacctagcctggatacgggagcacaccgttagttag

SEQ ID NO: 218704 - DNA, 1986 bp, synthetic construct
  misc_feature 1..1986: note = Description of Artificial Sequence: Synthetic coding sequence
  source 1..1986: mol_type = other DNA
atgcggcttaagaatctgacgttcatcatcatcctgataatttcaggagagttgtatgccgaagagaaaccttgcggcttcccacacgtggaaaatgggagaatcgctcagtactactatacattcaaatctttctattttccaatgagcattgataaaaagctgtctttcttttgccttgccggatataccaccgagagtggcagacaggaagagcaaacgacttgtacaaccgaaggctggtcaccagaacccagatgttttaagaagtgtactaagcccgacctctcaaacggctacatatctgatgtcaaactcctgtacaagatccaggagaatatgcgctatgggtgcgcaagcgggtacaaaacaacaggcggtaaggatgaggaggttgtccagtgcctaagtgatgggtggtcctcccagcctacctgccgcaaggagcacgagacctgtttagcccctgagctgtacaacggaaattactccactacccagaagacttttaaagtcaaggacaaagtgcagtacgaatgcgcgaccggctactataccgctgggggtaagaagactgaggaggtcgaatgtctgacttatggctggagcctcacgccaaagtgcacaaagctgaagtgtagctcactcagattgattgagaatggctacttccatcccgtgaagcagacgtacgaagaaggtgatgttgtgcagttcttctgtcatgaaaattattatctgagtggctcagatctgatacagtgctataacttcggatggtatccagagagccctgtgtgtgagggtcgcaggaacaggtgtccaccaccccctttgccaattaacagcaagattcagacacatagcactacttatcgccacggagaaattgttcacatcgaatgcgagttgaatttcgaaattcacggatcggctgagatccgttgcgaggacggaaagtggacagagccgccaaaatgcatcgaaggccaagagaaggtcgcgtgcgaggagccacctttcatcgagaatggtgcggctaatctccactcaaagatctattacaacggtgacaaagtgacatacgcttgcaagtcaggctatctgctgcatggtagcaatgagatcacgtgtaacaggggtaagtggaccctgccgcctgagtgcgtagaaaacaatgaaaactgcaagcacccacctgtcgtcatgaacggtgccgtggcagatggaattctggcctcttacgctactgggtcctccgtggaatataggtgtaatgaatactacctcttgcgaggaagcaaaatctccagatgcgaacaaggaaaatggagcagcccaccagtatgcctggagccctgcaccgttaacgtggattacatgaaccggaataatatcgagatgaaatggaagtatgagggcaaggtattacatggagacctcatcgatttcgtatgtaaacagggctacgatctgagtccactgacacccctgtctgagctgagcgttcagtgcaatcggggtgaagtgaaataccccctgtgcacgcgcaaggaaagtaagggtatgtgcacatcacctccccttatcaagcatggcgttataatctcttccaccgtagatacctacgagaatggctcttcagtcgagtaccggtgtttcgaccaccacttcctggaaggctcaagggaagcatattgcctggatggaatgtggaccacaccacccctgtgtctggagccctgtaccttatcattcaccgaaatggagaaaaacaacctgctgctcaaatgggattttgataacagacctcacatcctgcacggagagtacatcgagtttatctgtaggggagatacgtaccccgcagaactgtacattacaggatctatcttaaggatgcaatgcgataggggccagctcaagtaccctcggtgcatccctcgccagagcaccttgtcctaccaggaacccctcaggacatag

SEQ ID NO: 218705 - DNA, 3675 bp, synthetic construct
  misc_feature 1..3675: note = Description of Artificial Sequence: Synthetic coding sequence
  source 1..3675: mol_type = other DNA
atgttaaccaagtttgaaaccaagagcgctcgcgtcaagggtctgagctttcatcccaagcgaccctggatccttacttcgttacataacggggtgatccagctatgggactatagaatgtgtaccctgatcgacaagttcgacgaacatgacgggcctgtcagggggatcgattttcacaaacaacagccactgttcgtgtccggtggcgacgattataagataaaagtgtggaactataaactgagacgatgcctgttcacgctgctaggacacctggactatattcgcaccactttttttcaccacgagtacccctggattctgtcggctagcgatgatcagacgatccgggtctggaactggcagagccgcacctgtgtgtgcgttctgacgggccacaaccactacgtcatgtgcgcgcagtttcaccccacggaagaccttgttgtgtccgctagcctggatcaaacagtgcgggtctgggacatctctggcttgagaaagaaaaacctgtcccctggggcagtcgagagtgatgtcaggggcattacaggggtcgatttgttcgggaccacggatgccgtcgtcaagcacgtcctcgagggacatgataggggcgttaactgggccgcatttcacccaacgatgcccctgatagtctccggtgctgacgaccgccaggttaaaatctggcgaatgaacgagtctaaggcgtgggaagttgacacatgccgcggacactacaataatgtgtcgtgcgcagtctttcaccccagacaggagttgatattaagcaatagcgaggataagtccatacgagtctgggatatgtccaaaagaaccggagtgcagaccttcaggcgagaccatgaccggttttgggtgctggctgcgcaccctaacctgaatctcttcgctgccggtcacgacggcggaatgatcgtcttcaaactggagagggagcggccagcatatgcagtgcatggcaacatgttgcattacgttaaggatagatttctcagacagttggactttaatagcagcaaggatgtggcagttatgcagctacgtagcggttctaaattcccagtttttaacatgagttacaaccccgcagaaaatgcagtactgctgtgtacccgggctagtaacctagaaaactccacttacgacttgtatacaatccctaaggacgccgattcacaaaatccggacgcacccgagggaaagcgctcctcggggctaactgctgtctgggtggcaaggaacagatttgccgttcttgatcgaatgcactcactcctcattaagaatcttaagaacgagattacaaaaaaggtgcaggttccaaactgtgacgagattttctacgcaggcaccgggaatttgttgctcagggacgctgactctatcactctgttcgacgttcagcagaaaaggacgctggcctctgtgaaaatttcgaaggtgaaatatgtgatctggagcgccgacatgtcccacgtagccctcctcgctaagcatgctatagtaatatgcaatcggaaactggatgccctttgcaatatacatgagaacatcagagtgaaatccggcgcatgggacgagtctggtgtattcatctatactacaagcaaccacatcaagtatgccgtcacgaccggcgaccatggaatcatcaggaccctggatttgccaatatacgtgacccgggtcaaggggaataacgtctactgtctggacagggagtgtagaccaagagtgttgactatcgacccgaccgaattcaaatttaaactggccctgatcaacaggaagtatgatgaagttctgcatatggttcggaatgccaaacttgtgggtcagtccatcatagcctatttgcagaaaaaagggtatccggaggtggctctgcatttcgtcaaggatgagaagacacgcttttccctggctctggaatgcggtaatatcgagatcgcactggaagctgcgaaagccctggatgacaagaactgttgggagaaactcggagaggtcgcacttctgcagggcaaccaccagatcgtggaaatgtgttaccaacgcactaaaaatttcgacaagttaagttttctttatctgatcactggaaacctggaaaagctcagaaagatgatgaagattgccgaaatacgtaaagacatgtctggccactaccagaacgccctatacctgggcgatgtgagtgaacgagtgcgcatcctcaagaactgtggccagaagtcgctggcatatctcactgcggctacgcatggcctagacgaggaagcggagagtctgaaggaaacgtttgacccagagaaggagaccatccccgatatcgaccccaacgcaaaactgctccagccaccagccccaataatgccactcgataccaattggccactgctgaccgtcagtaaaggatttttcgaaggaacaattgcttccaagggcaagggaggcgctttggcagcggatattgatattgataccgttggtacggaggggtggggggaagacgctgagttgcagttggatgaggacggattcgtggaggccacagagggacttggggacgatgcccttggcaagggtcaagaggagggcggtggctgggacgtagaagaggatctagaactgccgccagagctggacatatctcccggagccgctggcggtgccgaagatggattcttcgttccccctactaaggggacaagccccacacagatttggtgcaataattcccagctgcctgtggaccacattctggccggatctttcgagaccgcaatgcgcttgctgcacgaccaagtaggagtgatccaatttggtccctacaagcagctgttcttgcaaacatacgcaagaggcaggacaacgtatcaggcactgccttgtctgccctctatgtatggatatcctaatcggaactggaaggacgctggcctgaagaatggtgtcccagccgtcggacttaagttgaatgatcttatccagagactgcaattatgttatcagttgaccactgttgggaaattcgaagaggccgtagagaaatttaggagcatcttgttgtccgtgccgctcctggtggtggacaataaacaggagatcgccgaggctcagcaattgattactatttgtagggaatatattgtgggactgtctgtggagaccgagcggaaaaaactccccaaagaaacactggagcagcagaagcgcatctgcgaaatggccgcttactttacccactcaaacctgcagcccgttcacatgattctcgtgctacgaaccgcactgaatttgttttttaagttgaaaaatttcaaaactgcagccacctttgcccgaaggcttcttgaactggggcctaaaccggaagtcgcccagcaaacccgcaagatcctctccgcctgtgagaagaaccccactgacgcgtaccagctgaattacgatatgcacaacccgtttgatatctgcgctgcttcttaccgcccaatctataggggtaagcccgtggagaagtgccccttaagtggagcctgctattcaccggaatttaaaggccagatctgccgagtgacaacagttacagagatcggaaaggatgtgatcggcttgcggattagtcccttgcagtttcgctag

SEQ ID NO: 218706 - DNA, 3702 bp, synthetic construct
  misc_feature 1..3702: note = Description of Artificial Sequence: Synthetic coding sequence
  source 1..3702: mol_type = other DNA
atgttaaccaaattcgaaactaagagtgcacgcgttaagggactgagctttcaccctaagcggccttggatcttgacgtccctgcacaatggggtgatacaactgtgggactatcggatgtgtactttgatagacaagttcgacgagcatgatggacctgtgagggggattgactttcacaaacaacagccactattcgtgagtggaggcgatgattacaagattaaggtctggaattacaaactgaggagatgtttgtttactttgctgggacacctggattatattaggacaacgtttttccaccacgagtacccatggatcctaagcgcttccgacgaccagaccattagggtctggaattggcaatcgcggacttgtgtatgcgtgctcaccggccataaccactacgtgatgtgtgcccagttccatcctactgaagacctggtggtctccgcatctcttgatcagacggttcgggtatgggacataagtggacttcgtaaaaagaacttatcacccggtgcggtggagtctgacgtcagaggcattacaggagtagacctctttggcaccaccgatgcagttgtcaagcacgtgctggaaggccacgatcggggtgtcaattgggccgcttttcacccaactatgcctcttatcgtgtctggggctgacgatcggcaggtcaaaatatggcgcatgaatgaaagtaaggcctgggaggttgacacttgccgcggacattataataatgtaagctgtgcagtgttccacccgcgtcaggagttgattttgtctaacagcgaagacaagtccatccgggtgtgggatatgagtaagcggactggggtgcagaccttccgaagagatcatgatcgattctgggtgctcgctgcccaccctaacctgaatctgttcgcggctggccacgatggtggtatgatcgtgtttaagctcgaacgcgaaagaccagcttacgccgtgcacgggaacatgctgcactacgtaaaggatcgtttcctcaggcagctggattttaattcaagcaaagatgtggccgttatgcaactacgttcggggtcaaagtttccagtgttcaatatgtcttataaccctgccgaaaacgcggttctgctgtgtactcgggcatccaaccttgagaatagcacttatgacttgtacacgatacctaaggatgccgacagccagaatcccgacgcgccagagggaaaacgttcaagcggcctgaccgccgtttgggtggctcggaacagattcgccgtgttggataggatgcattccctgctgatcaagaatttgaagaatgaaatcaccaagaaggttcaggtgcccaattgtgacgaaatcttttatgctgggacaggaaatttactcctccgagacgcagattccatcaccctgtttgatgtgcagcagaagcgcacattagcttcagtgaagattagcaaagtgaaatacgtcatttggagtgccgacatgtcccatgtagcattgcttgcgaagcacgagcatagctgccccttacccctcactgccattgtcatctgcaacagaaagctcgatgccctgtgcaacatccacgaaaacattagagtgaagagtggcgcttgggatgagagcggtgttttcatctacactacaagtaaccatatcaaatacgccgtcaccacaggagaccatggtataatacgcacactggacctccccatctatgtgaccagagtaaaaggaaacaacgtttactgcttggatcgagaatgccgacccagagttctcaccatcgaccccactgaattcaaattcaaacttgccttgatcaaccgtaaatacgatgaggtgcttcacatggtgcgcaatgctaagctcgtcggccagagtattatcgcctatctgcagaaaaagggttatcccgaagtggcattgcatttcgttaaggacgagaaaactagatttagcctggccttggagtgcgggaatattgagattgctttggaagccgcaaaagcgcttgatgacaagaactgttgggagaagctcggcgaggttgccctcctgcagggcaaccaccagatagtggagatgtgttatcaaaggacgaaaaactttgataagctgtctttcttgtacttgatcaccggaaacctggagaaattacgcaagatgatgaagatcgctgaaataaggaaagatatgtccggacactatcaaaatgccctgtatctgggggacgttagcgagcgggtccgaattctgaagaattgcggccaaaagtccctggcttacctaacagccgcaactcacggtctcgatgaggaggcggagtctctgaaagaaaccttcgatccggaaaaggagacgatacctgacatcgaccctaatgccaagctcctccagcctcccgctcccattatgccgttggatactaattggccacttctgacagtgtctaaggggttctttgagggaactattgcctcgaaaggaaaaggaggcgcactcgccgcagacatcgacattgatactgttggcaccgaaggctggggagaagatgccgagctccagctggacgaagacggtttcgtggaggctactgagggcctgggagatgacgcgttggggaagggccaggaggagggcggtggatgggatgtcgaggaagatctggagctccctcccgagctcgatattagccctggcgctgctggcggtgctgaagatggatttttcgtgccccctacgaagggaacatctccaactcaaatctggtgcaacaactcccagctgcccgtggatcacatcctggcgggaagcttcgagacggcaatgaggctactacatgatcaagtgggcgtaatacagtttggtccgtataaacagctgtttctacagacctatgcacgcggaaggactacttaccaggcactgccctgcctgccgtccatgtatggttacccaaacagaaattggaaggacgcaggcctgaagaatggcgttccagcggtagggctgaagttgaacgacctcatccagcggcttcaactgtgttatcaactgactacggtggggaagttcgaagaggcagttgaaaaattccgttctattctcctgtccgtacctctgttggtggtcgataacaagcaggaaatcgctgaggctcagcagctcatcactatctgtcgagaatacatcgtgggcctgagtgtggagacagagcgcaaaaagttgcctaaggagacactggagcagcagaaaagaatttgcgaaatggccgcatactttacacattctaatttgcagccagtgcacatgatcctagtcctccggaccgctctgaacctttttttcaagttaaagaattttaagaccgctgccactttcgccagacgactgctggagctgggacccaagccagaagttgctcaacagactagaaagatcctatcggcatgcgaaaaaaatcctactgacgcctaccagttaaattacgatatgcacaacccctttgacatttgtgcagcctcatacagaccgatttatcgcggaaaaccagtggaaaaatgtcccctctctggggcttgctattccccggaatttaaggggcagatttgtcgggtcactacagtgacagaaattggcaaggatgtgatcggcctgagaattagccccctgcagttccggtag

SEQ ID NO: 218707 - DNA, 2862 bp, synthetic construct
  misc_feature 1..2862: note = Description of Artificial Sequence: Synthetic coding sequence
  source 1..2862: mol_type = other DNA
atgacagccgcagagaacgtttgctacacacttataaacgtgcccatggactctgagccccctagcgaaatctcgctgaaaaatgatctggaaaaaggggacgtgaagtcaaaaaccgaggccctcaagaaagtaatcatcatgatcctcaatggtgagaagctgcccggtctacttatgaccatcatcaggtttgttctcccactgcaggaccacactatcaagaaactgctcttggttttctgggagatagtacccaagactacgccagatgggcgactgctccacgagatgatacttgtgtgcgacgcctaccgaaaagacctacagcaccccaacgaattcatacggggaagcactctacgctttctttgtaagcttaaagaggcagaactgctggagcccttaatgcctgctatccgcgcatgcctggaacaccgacactcctacgtacgtaggaacgcagtcctagccatctatacaatctacagaaacttcgagcacctcatacccgatgctcctgagctgattcatgatttcctggtcaacgaaaaagatgcatcttgcaagcgaaacgcgtttatgatgctcatccacgccgaccaggacagagccctggattatctttcaacgtgcatagatcaggtacagaccttcggagacatcttgcaactcgtgatagtggaacttatttataaagtttgccacgccaatcccagcgaacgtgcccgttttattagatgtatttacaacctgcttcagagctctagtccagcggtgaagtacgaagcggctggcacacttgtgacattaagcagtgctccaacggcaataaaagccgctgcgcagtgctatattgatcttattatcaaggaatccgacaacaacgtaaagctgatagtcctcgaccgactcattgagctgaaagaacaccccgctcacgagagagtgctgcaggaccttgttatggatattttgcgagtcctgagtacccccgacctagaggtgagaaaaaaaacgcttcagctcgctctggatctggtatccagtcgcaatgtggaagagcttgtcattgttctgaagaaagaggtaatcaagaccaacaatgtgtccgaacacgaggacacagacaaatacaggcagctgctggttcgcaccctgcatagctgtagtgtgcggttcccagacatggccgctaatgtcatcccggttctcatggagttcctctctgacaataatgaagcagccgctgctgacgtcctggagttcgtccgtgaggctatacagcggttcgacaacttgagaatgctcatcgtcgagaaaatgctggaagtcttccacgcaatcaaaagtgttaagatctacagaggagccctgtggattctcggtgagtattgttccactaaggaggatattcaatccgttatgacagagattagaagaagtctcggcgagattccgatagtggaatccgagatcaagaaagaggccggagaacttaagcccgaggaggagattaccgttggaccagtacagaagctggtcacagagatggggacatatgctacgcaatcagctttgagttcttcaagacctacgaagaaggaggaggaccgacccccactgcgaggttttctcctggacggcgactttttcgtggctgccagtctggctacaacccttactaaaatcgcactgagatacgtcgccttggtccaggagaaaaaaaagcagaacagctttgtggccgaagctatgctgctgatggcgacgattttacatcttggtaagagtagtttgcctaagaagcctatcactgatgacgatgtggaccgaataagcctgtgtcttaaggtcctgtctgagtgtagcccccttatgaatgacatcttcaacaaggaatgcagacagtctctttctcacatgctgagtgccaaattggaagaggagaagctgtctcaaaaaaaggaatctgagaagaggaatgtgacagtacaacccgatgatcccatatcgttcatgcagctgacagccaaaaatgagatgaactgtaaggaggaccaatttcagctaagcttgcttgccgctatggggaacacccaacgaaaggaagccgctgatcccctcgccagcaagctcaataaggtgacacagctgacaggattcagcgacccagtttacgccgaggcttacgtgcacgtgaaccagtatgacatcgtactggacgtgctcgttgtcaatcagacatctgatactctccagaattgcactcttgaattggctacactgggagatctgaagcttgtggaaaagcccagccccctgaccctcgctccgcacgacttcgccaacatcaaagccaacgtgaaagttgcctctaccgagaatggcattatcttcggcaacatcgtttacgatgtgagcggcgcagcctctgatcgaaactgtgttgttctcagtgatattcacatcgacatcatggattatattcagccagccacttgcacagacgccgaattccggcaaatgtgggccgagtttgaatgggagaacaaggtgacagtaaataccaacatggtggacctgaatgactaccttcagcacatcctgaaatcaacgaatatgaaatgcctgacgcccgaaaaagccctgtccggctactgcggattcatggccgctaatctgtacgccaggtccatctttggcgaggatgctcttgccaacgtaagcattgagaagcctatacatcagggacccgacgccgctgtgactggacatattcgcattcgagctaagtcacaggggatggccctgagcctcggagataaaattaatctctctcagaaaaagacctctatatag

SEQ ID NO: 218708 - DNA, 2862 bp, synthetic construct
  misc_feature 1..2862: note = Description of Artificial Sequence: Synthetic coding sequence
  source 1..2862: mol_type = other DNA
atgactgcagcggagaacgtgtgttatacgctgatcaatgtgccaatggattccgaacccccaagtgagatctccctcaagaacgacctggaaaagggtgatgtgaaatccaaaaccgaggcccttaagaaagttataatcatgatcctcaacggcgagaaactaccaggactcttgatgactatcatccgcttcgtcctcccccttcaggatcacaccatcaagaagctgctccttgtgttttgggaaatcgttccgaaaaccacaccagacggccgtcttctgcacgagatgatcctcgtatgcgatgcctatcgcaaggaccttcagcatcctaatgaattcatccggggaagcaccctgagattcctgtgtaagctaaaagaggcggagttactggaacctctaatgccagccatccgggcatgccttgagcacaggcactcctacgtccgacgaaacgcggtgcttgccatctacacaatatatcggaatttcgagcacctgatacctgatgcaccagagctgattcatgattttctggtaaatgaaaaagatgcaagctgtaaacggaatgcctttatgatgctgattcacgccgaccaggacagagcactcgactacctgagcacatgtattgaccaggtacagaccttcggcgacattctgcagctggtgatcgtcgagctgatctacaaggtatgtcatgccaatcccagtgagcgcgcaagattcattcggtgtatctacaatctgcttcagtccagctctccagctgttaagtacgaagccgctgggactctggtgaccctgagttccgcccctaccgcgattaaagctgcagctcagtgttatattgatctgatcatcaaggaatccgataataatgttaagctcatagtgctggataggctgattgagttgaaagagcatcctgcacatgaaagagtgctccaggatcttgtcatggatattctgcgggtgttgtctacccccgacctcgaggtgcgcaaaaagacacttcaactggcactggacctggtctcctctcgcaacgtcgaggagctggtgattgtattgaaaaaggaggtgattaaaactaacaatgtgagtgagcatgaggacactgataagtacagacagctccttgtgcggacactgcattcttgcagcgtgcgcttccctgatatggctgctaacgtgatacctgtgctcatggaatttctcagcgataacaacgaggcagccgctgccgatgtgctggaattcgttagggaagcaattcaaaggtttgacaatttaaggatgctgattgttgagaagatgctggaagtgttccatgcaattaagtctgtaaagatttatcggggtgcactctggattctgggggaatattgctctaccaaagaggatatccagtccgttatgacagagattcgtcgttccctaggcgagattccaattgtggaatctgaaatcaagaaggaggctggagagctgaaaccagaagaggagatcaccgtagggccagttcagaagttagtaaccgagatgggtacctatgctacgcaaagcgcactctcctcctctcgcccaaccaagaaagaggaagaccggcctccgctacggggttttctgctggatggcgattttttcgttgctgcctctttggctacaacactgacaaaaatcgcactgcggtacgtggcgctggtgcaggagaagaaaaagcagaatagtttcgtcgcagaggcgatgttattgatggccactatacttcacctgggcaaatcatccctgccaaagaagccaatcacagatgacgacgtggacaggatatcgttatgtcttaaagtgttgtcagagtgctcccccctaatgaatgacatttttaacaaggaatgccggcagagcttatcacacatgctctcggctaaattagaagaagaaaagctatcccagaagaaagagtctgagaagcggaacgtcacggtccagccggatgaccctatttcctttatgcagttaaccgcaaagaatgagatgaattgcaaggaggatcagtttcagctgtccctgctggcggctatggggaatacacagcgcaaggaagccgcagacccactcgcctccaaattgaataaagtgactcagttgaccggattcagcgaccctgtgtatgctgaggcctatgtccacgtgaatcaatacgacatcgtcctggatgtgttggtcgtgaaccaaacaagtgacacgttgcagaattgcaccttggagttagcaactctgggtgatttgaagttagtggaaaaaccatctccccttacactggccccacatgactttgccaatataaaggcaaacgtcaaggtggccagcaccgagaatggcatcatctttgggaacatagtctatgacgtatcaggagctgcatcggataggaactgtgtggtcctctctgacatccacatcgatattatggactacatacaaccggcaacttgcacagatgcagaatttaggcaaatgtgggcagaatttgaatgggagaacaaagtgactgtcaatacaaatatggtggacctgaacgactacctgcagcacatactcaagtccacaaacatgaagtgcctaaccccagaaaaggccctatctggttactgtgggtttatggcggctaacttatatgcccgttctattttcggggaagatgcccttgcaaatgtctccattgagaaacccattcaccagggaccggacgccgctgtaaccggacatatcagaataagagcaaaaagccagggcatggctctatctttgggagacaagattaacttgtctcagaagaaaacgtccatttag

SEQ ID NO: 218709 - DNA, 2721 bp, synthetic construct
  misc_feature 1..2721: note = Description of Artificial Sequence: Synthetic coding sequence
  source 1..2721: mol_type = other DNA
atgccactacggctcgacatcaagcgaaagttaactgcacgctctgatcgtgtgaagagcgtggatctgcatccgactgaaccttggatgctcgcctcactttataatggctctgtctgcgtgtggaatcacgagacacagacattggtgaaaactttcgaggtgtgtgacctgcccgtgagagctgctaagttcgtcgcacgcaagaattgggtggtgactggtgctgatgacatgcagatcagggtgttcaattacaatacgctagaaagggtccatatgtttgaagctcacagcgactacatccgatgcatagctgtccatccgacgcagccctttattctcacctcaagtgacgacatgctgatcaaactgtgggattgggataagaagtggtcgtgctctcaggtctttgagggccacacgcattacgtgatgcagatagtgattaatccgaaagataacaatcagttcgcctctgcctctctggacaggaccattaaagtgtggcagctcggatcatcaagtccaaatttcacgttagagggccacgagaagggcgtgaactgtatcgactactactcgggcggagacaagccctatctaatttctggcgcagatgacaggcttgtgaaaatttgggactaccagaataagacatgcgttcagaccttggaaggccacgcccagaacgtgtcatgtgcttcttttcacccggagttgccgatcatcatcaccggttccgaggatgggacagtacgcatttggcacagctccacttaccggttagagtcaactctgaactatgggatggagagggtgtggtgcgtggccagtctccgaggaagcaacaacgtggctctgggttacgacgagggctctataattgtgaagctcggcagagaggagcctgcaatgtccatggatgccaatggtaagatcatctgggctaaacattctgaggtgcagcaggccaacctcaaggctatgggggacgcagagatcaaagacggcgaacggctgcccttagctgtgaaagacatggggtcgtgcgagatctatcctcagacaatccagcataatccgaatggcagatttgtcgtagtgtgcggagatggggagtacatcatctataccgccatggcgctaaggaacaaatccttcggatcagctcaggaattcgcttgggcacacgactccagcgaatatgcaatcagggaatcaaacagcatagttaaaatctttaaaaattttaaggagaagaagtctttcaagcccgacttcggagccgaaagcatttacgggggttttttgctaggagtcagatctgtgaatgggctcgctttctacgactgggacaacactgagttgattcgtcggattgagattcagccaaaacacattttctggtccgatagcggagagttagtctgtatcgccacagaggagagcttttttattctgaaatatctctccgagaaagttctggctgctcaggagactcatgagggggtgacggaagatggcatcgaagatgcttttgaagtcctgggggaaatccaagagatcgttaagactgggctgtgggtgggcgattgctttatttacacatctagtgttaataggcttaactattacgtaggaggcgagatcgtgaccatcgctcaccttgaccggactatgtatctgctgggatatattcccaaggacaatcgtctctatctgggggataaggagcttaacatcatctcctatagtctccttgtgagcgtgctggagtatcaaactgccgtaatgcggcgagattttagcatggcagacaaagtcctacccactattcctaaagagcaacggacgagagttgcacacttcctcgagaaacaagggttcaaacagcaggcactgaccgtctccaccgatcctgagcaccggtttgagctcgcactgcagctgggcgaattaaaaattgcatatcaattggccgtcgaggccgagtcagaacagaagtggaagcagttggctgagctagcaatctctaagtgtcagtttggactagcccaagagtgcctccatcatgctcaggactacggcggtctgctgctgttggcaacggccagtggcaatgctaatatggttaacaagctggctgagggcgctgagcgagatggcaagaataacgttgccttcatgtcttactttctgcagggtaaggtcgacgcctgcttggagctgcttattagaaccggacgacttccggaggccgctttcctggccagaacgtacttgccctctcaggtctcccgggtcgtaaagttgtggcgggagaacttatctaaagttaatcaaaaagcagctgaatcactggcagatcctaccgaatatgagaacttgttcccaggactcaaggaagcatttgttgtggaggagtgggtgaaggaaacacacgctgatctgtggcccgctaaacagtaccccctggtaactccaaatgaggaacggaacgtcatggaggaggggaaagacttccagccctcccgctcaactgcccagcaagaattagacggtaaacccgcaagtcccacacctgtcatcgtggcctcacatacagccaacaaggaagaaaagtccctcctggagttagaggtggacctcgataacctggagctggaggacatcgacacgacagatattaacttagatgaagacattctcgatgattag

SEQ ID NO: 218710 - DNA, 2634 bp, synthetic construct
  misc_feature 1..2634: note = Description of Artificial Sequence: Synthetic coding sequence
  source 1..2634: mol_type = other DNA
atgttagcttcactgtataacggaagtgtatgtgtgtggaaccacgagactcagactctggtgaaaaccttcgaggtttgtgatctcccagtgagagctgccaagtttgttgccagaaaaaactgggttgtgacaggtgcagacgacatgcaaatacgcgtgttcaactacaatacattggaacgggtgcacatgtttgaagcccactctgactacattcgctgcatcgccgtgcacccaacacagccatttatactaacaagctctgatgacatgcttattaaactgtgggactgggacaaaaagtggtcttgcagccaggtgtttgagggacatacacactatgtaatgcagatcgttatcaaccccaaggacaacaaccagttcgcttcagctagcttggatcggactataaaagtgtggcagctgggttcatcctcacctaacttcaccctggaggggcatgagaaaggcgttaactgcatcgattactattccggaggggacaaaccttatctcatcagcggagccgacgatagactcgtgaagatttgggattatcagaacaaaacatgcgttcagaccctggagggtcacgcccagaacgtgtcctgcgcttcattccaccctgagctgcctattattattacagggtccgaggatggcactgtaaggatctggcatagctcgacttataggttagagagcaccctgaactacgggatggaaagggtgtggtgcgttgccagcctgcggggatcaaataacgtcgccctgggatacgacgagggcagtatcatagtgaaactcgggagagaggagcccgctatgtcaatggacgctaatggcaaaatcatttgggccaagcattcggaagtccagcaggccaatcttaaggctatgggagacgcggagatcaaggacggggagaggctccccctagccgtcaaggatatgggcagctgcgagatctatccacagactatacaacacaaccccaacggcaggtttgtggtggtctgcggagacggcgagtacatcatctatacagcgatggcgttgagaaacaagagctttgggtccgcccaggaatttgcttgggcgcatgacagcagtgaatatgccatacgcgaaagtaactcaatcgtaaagatcttcaagaactttaaagagaagaagtcattcaaacctgattttggagcggaatctatctacggtggctttctcctcggggtcaggtctgtcaacggtctagctttctacgactgggataatacagagctaattaggcgtattgagatccagccgaagcatatcttctggtctgattccggggagctggtatgcatagcaactgaggagtcatttttcatcctgaagtatctttctgagaaggtgttggccgcacaggaaactcacgaaggtgtcaccgaggatggcattgaggacgctttcgaagtgctgggggagatccaggagatagtcaaaaccggcttgtgggtgggagattgtttcatctatacctccagcgtgaaccgtctgaattactacgtaggaggcgaaatagtcaccatcgcccatcttgaccgaaccatgtaccttctgggttatattccaaaggacaatcggctgtatctcggggacaaggaacttaacattatctcatacagcctgctggtgagtgtactcgaataccagaccgcagtaatgaggagagatttctctatggcggataaggtgctgcccaccattcccaaggaacaacgtacgcgggtggcgcattttttggaaaagcagggatttaaacagcaggctctgaccgtatcaaccgatcccgaacacagattcgagctcgctcttcagctgggtgagcttaagatagcttaccaactcgctgtggaagctgaaagcgagcaaaagtggaagcagcttgcagagcttgcaataagcaaatgtcaattcggtctcgcccaggaatgcctccatcacgcccaggattatggcggtctgttgcttctggctaccgcctccggcaacgccaatatggtgaacaagctcgccgagggtgcggaacgggacggtaaaaataatgtggcattcatgtcgtactttctgcagggcaaagttgatgcatgcctcgaactgctaattcgaaccggcagactgccagaagccgcttttttggcaaggacctacctcccatcccaagtttcccgggttgtgaagctttggagggagaacctgagcaaagttaaccagaaggcggctgaatctctcgccgacccaaccgagtacgaaaatctgttcccaggtctcaaagaagcatttgtagttgaagaatgggtaaaggaaacccatgcagatctgtggcccgcaaagcagtatccactggtgaccccaaacgaggaacgcaacgtcatggaagaaggtaaggacttccagcctagcaggtccacagcacagcaagagctcgacgggaaaccagcctcacccacacccgtgattgttgcttcccacaccgcaaacaaagaggaaaagtccctgctggaactggaggtggatcttgacaatttggaactggaggatatcgataccaccgatataaacctggatgaagatattttagatgactag

SEQ ID NO: 218711 - DNA, 927 bp, synthetic construct
  misc_feature 1..927: note = Description of Artificial Sequence: Synthetic coding sequence
  source 1..927: mol_type = other DNA
atggccccaccagctcctggcccagccagcggtggatctggggaggtggacgaactgttcgatgtcaagaatgccttctatatcggttcttaccagcaatgcattaacgaagctcagcgcgtcaagctttcctctcctgagagagatgttgaacgcgacgtattcctctatcgcgcttatcttgcacagaggaagtttggggtggtgcttgatgagattaaaccctcttcagcccctgaactgcaggccgtcaggatgtttgctgactacctggcgcacgagagcagaagagactctattgtggcggagctggatcgagagatgtctaggtcagtggacgtgacgaacaccacttttctgctgatggctgcgtcgatctatttgcacgaccaaaatcccgacgcagccctgcgggcacttcaccagggtgattccttagagtgcacagcaatgacagttcagatcctgctgaagctggatagacttgacctcgcgaggaaggaacttaagcgcatgcaagacctggatgaagatgcaacgctgacacagctggctacagcttgggtttcgttggctaccggaggcgaaaaactccaggatgcatactacatcttccaggagatggcagataagtgtagccctactctgttgctcctcaatggccaggcggcttgtcatatggctcagggcaggtgggaggctgcggagggcttgcttcaggaggccctggataaggatagtggatatccagagactctggtgaatttgattgtgcttagtcagcacttagggaagcctcccgaggttacaaaccgatacttgagtcagttgaaggacgcacaccggtcccatccctttattaaggagtatcaggcaaaggagaacgatttcgatcggctggttctccaatatgcgccaagcgcttag

SEQ ID NO: 218712 - DNA, 771 bp, synthetic construct
  misc_feature 1..771: note = Description of Artificial Sequence: Synthetic coding sequence
  source 1..771: mol_type = other DNA
atggctcctcccgcacctgggccagcatcaggaggttccggtgaggtagacgagttgttcgatgtgaaaaatgctttttacattggaagctatcagcagtgcataaatgaggcacagagagtgaagctgtcctctccagaacgggacgtggaacgggatgtattcctctatagggcctatctcgctcagcggaaatttggtgtcgtgttggacgaaatcaagcccagctctgcccctgaacttcaggctgtccggatgtttgctgattatctggcccacgagagtaggagagattccatagtggctgaactagatcgtgagatgtcccgctctgttgatgtcacaaatacaactttcttattgatggccgcttctatttatctgcatgaccaaaaccctgatgcagctcttcgagccctgcaccagggcgattccctggagtgtactgccatgacagtccaaatactcctgaaactggatagactcgacttggccaggaaagagttgaaaagaatgcaggacctggatgaggacgcgacacttactcagcttgccacggcctgggtaagtttagctacggactcaggctaccctgagacactggtgaatctgattgtgttgagccagcacctaggcaagcctcctgaggtgacaaatcggtatctttctcagctcaaggatgctcaccgatcccacccctttatcaaggagtatcaggccaaggaaaacgattttgaccgtctcgtgttacagtacgccccaagtgcgtag

SEQ ID NO: 218713 - DNA, 774 bp, synthetic construct
  misc_feature 1..774: note = Description of Artificial Sequence: Synthetic coding sequence
  source 1..774: mol_type = other DNA
atggcgcctcccgcacccggacctgcctccggagggagcggagaggtggatgaacttttcgatgttaagaatgccttctacattggcagttatcagcaatgcatcaatgaggcccagcgtgtaaaactttcaagtcctgagagagatgtagaacgtgatgtgttcctatacagggcttacttagctcaacgtaagttcggagtcgtgctggatgagatcaagccttcctctgctccagaactgcaggccgtgcgcatgttcgccgactatttagcccatgagagcaggagtaccgcaatgaccgtccagattctgctcaagctagacaggcttgacctagcacggaaagagctcaaaagaatgcaggaccttgatgaagacgcgacacttacccagctcgctacagcgtgggtgtcactggcaacgggaggagagaaactccaggatgcgtattacatttttcaggaaatggcagacaaatgcagccctacactgttactccttaatggacaggcggcatgtcatatggctcaggggcgttgggaggctgccgagggattactgcaggaagcccttgataaagactccggctatcccgaaaccctggtgaacctcattgtactttctcaacatcttgggaaacccccagaggttacgaatcgctatctgtctcaattaaaggacgcgcaccggtctcatccatttattaaggagtaccaggcaaaagaaaatgatttcgatcgcctcgtgttgcaatatgctccctccgcgtag

SEQ ID NO: 218714 - DNA, 924 bp, synthetic construct
  misc_feature 1..924: note = Description of Artificial Sequence: Synthetic coding sequence
  source 1..924: mol_type = other DNA
atggctccgccagcccctgcgggtcttcgaggcagtggggaggtggatgagctgttcgacgtgaagaacgccttttatattgggtcctatcagcaatgcatcaatgaagcacaacgggttaagttgagctcccccgaacgcgacgttgaaagggacgtattcctgtatcgggcatacctggctcaacgaaaattcggtgtggtcctagacgagataaagccctcaagcgcccctgagctgcaggctgtgcggatgtttgctgattacctggcacacgaatcgaggcgtgattctatcgtggcagagctcgatcgcgaaatgagtcgctcagtggacgtgaccaatacaactttcctcctcatggcagcgagtatttacttgcacgaccagaatcccgacgccgctcttagagccctacatcagggcgattctctcgagtgtacagccatgacagttcagatcctgcttaaacttgacaggctggatctggctagaaaggagcttaagcgaatgcaggatctggacgaagacgcgacattaacccaattggcgacagcttgggtgagcttggcgaccggaggcgaaaaactacaagacgcttattacatctttcaggaaatggctgataagtgcagcccgaccttactattactgaatggtcaggccgcttgccacatggctcagggtcggtgggaggcagctgagggtctactccaagaggccctcgataaggattcaggatatccagagaccctcgtaaatctcattgtgctgtcccagcacttaggcaaaccacctgaggtcactaacagatatctgtcccagcttaaggacgcacaccgctctcaccctttcatcaaggagtaccaggcaaaggaaaacgacttcgataggctcgtgctgcaatacgcaccttccgcctag

SEQ ID NO: 218715 - DNA, 741 bp, synthetic construct
  misc_feature 1..741: note = Description of Artificial Sequence: Synthetic coding sequence
  source 1..741: mol_type = other DNA
atgattaagaagttcgataagaaggacgaggagtcagggagtggatctaatcccttccagcatttggagaagtccgcagtgctgcaggaagcacgcattttcaatgaaacacccatcaaccctcgcaggtgtcttcacatcttaacaaagattctgtatctcctgaaccagggcgagcatttcggcaccactgaggccacagaagctttctttgccatgacgaggctcttccagtcaaacgaccagacccttagaaggatgtgttatttaactatcaaagaaatggccactatatccgaggatgtgatcattgttactagctcattaactaaagatatgacaggcaaggaggatgtgtacaggggccctgctatcagggcgctctgtagaattaccgacggtacaatgctgcaggctatagaacgctacatgaagcaggcgatagtggataaggttagctccgtttcgtcatcagcactggtgtcatctctgcacatgatgaaaatctcctacgatgttgtcaaacgctggataaacgaggctcaagaagccgctagctccgataatatcatggtgcagtatcatgcccttggcgtactgtatcatctccggaagaatgataggctggccgttagcaagatgctcaataagtttactaagtctggtctgaagagtcaattcgcctattgcatgcttattaggattgccagtaggctactgaaagaaactgaagatgggtag

SEQ ID NO: 218716 - DNA, 468 bp, synthetic construct
  misc_feature 1..468: note = Description of Artificial Sequence: Synthetic coding sequence
  source 1..468: mol_type = other DNA
tgagcaggaagttttagttgcactatgaagttcacggttcgagactgtgacccgaataccggtgttcctgatgaggacggatacgacgacgagtatgtgctcgaggatctcgaagtcacggtgagtgaccacatccagaaagttctcaagcctaacttcgccgcagcctgggaagaggtcggcgacaccttcgagaaagaggagacattcgctctgtcatcgaccaaaaccctggaggaggctgtaaacaatatcatcacatttcttggaatgcagccatgtgaaagatcagacaaggtaccagaaaataagaattcccatagcctatatctggcgggaatctttcgagggggttatgatttgcttgtcaggtcacgcctagctcttgccgatggtgtcacaatgcaggtcacggtgcgcagcaaggagaggactccggtggacgtcattttggcgagtgttggctag

SEQ ID NO: 218717 - DNA, 741 bp, synthetic construct
  misc_feature 1..741: note = Description of Artificial Sequence: Synthetic coding sequence
  source 1..741: mol_type = other DNA
atgattaagaagttcgataaaaaggatgaggagtcaggatccgggtcaaatccgtttcagcatctcgaaaagagcgcggtcttacaggaagctcgcatctttaacgagaccccaattaatccacgcaggtgcctccacatcttaaccaagattctctatttgctgaaccaaggcgaacacttcggaacgaccgaagccacagaggcattttttgctatgacgcgcctgttccagtcaaatgatcaaacgctgaggagaatgtgttacctgacaatcaaggaaatggctaccatttccgaagacgtgatcatcgtgacatcatctctaactaaggacatgactggtaaggaggatgtctaccggggtcccgctatacgtgcactgtgtcgaataaccgacggcacaatgcttcaggccatagagcgctacatgaagcaggccatcgtcgacaaggtgagttccgtgagtagctctgcccttgtttcttctctccacatgatgaaaattagttatgatgtggtgaagaggtggataaacgaggctcaggaggcagcttcctccgacaacataatggtgcagtatcacgccctgggggtgctgtatcacctgagaaagaacgaccgcctggcagtgtccaagatgctgaataaatttacaaagtccggcctaaagtcccagttcgcttactgtatgttaataaggatcgcttcacgcctgttgaaggagacagaggatggttag

SEQ ID NO: 218718 - DNA, 1080 bp, synthetic construct
  misc_feature 1..1080: note = Description of Artificial Sequence: Synthetic coding sequence
  source 1..1080: mol_type = other DNA
atgtacttcaaacgagctgcaagagcctttccagtactgctgaccggtgccggtaagaccaccttgttgaactacatcctgaccgagcaacacagcaaacgggtcgccgtcatattaaacgaatttggcgaagggagcgccctcgagaaatccctcgcggtgagccagggcggagaattgtacgaagagtggttggagctccgcaacggctgtctatgttgctctgtgaaggacagtgggctgagggcgatcgaaaatttaatgcagaaaaaaggcaagtttgactacatcctgctcgaaaccactggactggctgatcccggagccgtggcttctatgttctgggttgatgccgagctaggtagtgacatttatttagacggtatcatcaccatcgtggactcgaagtacggactgaagcaccttaccgaggaaaaacccgatgggttgattaatgaagcaactcgccaggttgctttggccgatgcaattttgatcaacaagaccgatctggtgccggaagaggacgtgaagaagttgaggaccactattagatctatcaatggtctgggtcagattctggaaactcagagatctagagtagacttgagcaacgtactcgacctgcacgcttttgacagtttatctggcatatcactacaaaaaaagctgcagcatgtgcccggaactcagccccacttggatcagtcgattgtcacaattacatttgaagtccccggtaacgcaaaggaagaacatctgaatatgttcatacagaacctgctctgggaaaaaaatgtcagaaataaggataatcactgtatggaggtgatccggcttaaaggcctggtgtcgattaaagataaaagccagcaagtcattgtgcagggtgtccatgaattgtacgacctggaggagaccccagtatcctggaaagatgacaccgagcgaacgaataggttagtactgctgggacgcaatcttgacaaagatatcttgaaacagctgtttatagccaccgtaactgagaccgagaaacagtggaccactcggttccaggaggatcaggtgtgcacgtag

SEQ ID NO: 218719 - DNA, 1188 bp, synthetic construct
  misc_feature 1..1188: note = Description of Artificial Sequence: Synthetic coding sequence
  source 1..1188: mol_type = other DNA
atgctccctgccgtggggtccgcagatgaagaggaagatcccgcagaagaggattgtcctgagctggttcctatagaaacaacccagagcgaagaggaagagaagtcaggacttggagcaaaaatccctgttacaataataacagggtatctaggcgcagggaaaactacccttctgaattacatccttactgagcagcacagcaagcgtgtggctgtaatcctcaacgagttcggtgaaggaagtgccctagagaagagcctagccgtcagtcagggtggagaactgtatgaggagtggcttgagctgagaaacggctgtctgtgctgctccgtgaaggactccgggctgcgcgctatagaaaacttgatgcaaaagaaaggcaagttcgattacattttactcgaaacgaccggactggctgacccgggagcagtggcttcgatgttctgggtggatgcagagctcggaagcgacatctatctggacgggataatcacaatcgtcgacagtaaatacgggctgaagcacctcaccgaagaaaaacccgacggactgataaatgaggccacacggcaagtcgccttagctgacgcaatccttataaataagaccgacctcgttcccgaggaagatgttaagaaactgaggacaaccataaggtcgattaacggtttgggccagatactcgagacccagcggtcccgtgtagatctctcaaatgtactggaccttcacgcctttgattctttgagcggcattagcctgcaaaaaaagctccagcacgttcccggaacacaaccacacttagatcagagcatcgttactattaccttcgaagtgcccggaaacgccaaggaggaacatctgaatatgttcatccagaatctgctttgggagaagaatgttcgaaacaaagacaaccattgcatggaagtgatccgcttgaaaggcctcgtgtctatcaaagataaaagccagcaggtcatcgtgcagggagtacatgagttgtatgaccttgaagaaaccccagtcagctggaaagacgacactgagcgcacaaaccggctagtgttgcttgggaggaacttagataaagacatactgaagcagctcttcatagccacggtgaccgagacagagaaacagtggaccacacgtttccaggaagaccaagtctgcacttag

SEQ ID NO: 218720 - DNA, 543 bp, synthetic construct
  misc_feature 1..543: note = Description of Artificial Sequence: Synthetic coding sequence
  source 1..543: mol_type = other DNA
atgctgccggctgtgggatctgctgatgaagaggaagaccccgctgaggaggactgccccgagctggtccccatcgaaacaactcagtcagaggaagaggagaaatccggcctcggggctaagatccctgtgactatcattaccggctacctgggtgccggtaagactacactgctcaactatatactgaccgagcagcattcaaagcgggtggccgtgatccttaacgaatttggcgaagggtcagccctggagaagagtcttgcggtttcccagggaggcgagctgtatgaggaatggcttgagttgaggaacgggtgcttgtgctgttctgttaaagattctggtttgcgtgcgatagagaatctgatgcaaaaaaaggggaaatttgactatattttgttagaaaccacggggttggccgatccgggagccgtcgcctccatgttctgggtggacgccgagctgggatcagatatttacctggatggcataataactatcgtagactctaaatacggacttaaagtgaaataccactag

SEQ ID NO: 218721 - DNA, 1044 bp, synthetic construct
  misc_feature 1..1044: note = Description of Artificial Sequence: Synthetic coding sequence
  source 1..1044: mol_type = other DNA
atgctccccgcagtgggaagtgccgacgaagaagaggatcctgcggaggaagattgtcctgaactggttcctattgaaaccacccagtcagaggaggaagagaaaagcggcctgggcgctaagataccagtgacaattatcaccggctacctgggcgctgggaagacaactttattgaactatattctgacagaacaacattccaaacgcgtggcggtgatcttgaatgagttcggcgaaggatctgcgctcgaaaagagtctggctgttagccagggcggtgagctgtatgaagaatggttagagctccggaacggctgcctctgttgttcggtgaaagattccggactgagagcaatcgagaacctgatgcaaaagaaaggtaagtttgattatatccttctcgagaccaccggcctcgccgaccctggcgctgtagcaagcatgttctgggtggacgccgagctgggaagtgacatctacttagatggtataatcaccattgtggacagtaagtatggtctgaaacacctgacggaagagaagccagatggcctgatcaatgaagcaacgcgaagcattaacgggctcggtcagatcctggaaacacagagatcatctcttcagaaaaaacttcaacatgtgccgggtacacagccacatctcgaccagagcattgttacaattacatttgaagtgcctggtaacgctaaggaggaacatctaaatatgttcatccaaaatctgctttgggagaagaacgtcaggaacaaggacaaccattgcatggaggtgattcgactgaagggactcgtgtccatcaaggacaaatcacagcaagtgatcgttcaaggcgtgcacgagctgtacgatttagaagagacccctgtgagttggaaggatgacacagaacggacgaatagactcgtcctactgggcaggaatctggacaaggacatcctgaaacagttgttcattgcaacagttaccgaaaccgagaaacaatggaccactcgcttccaggaggaccaggtttgtacctag

SEQ ID NO: 218722 - DNA, 753 bp, synthetic construct
  misc_feature 1..753: note = Description of Artificial Sequence: Synthetic coding sequence
  source 1..753: mol_type = other DNA
atgctaccagcagtaggcagcgctgacgaagaggaagatcctgctgaggaagactgtcccgagttggtgcccattgaaacaacccagtcagaggaggaggagaagagcggcttaggcgctaagattccagtgaccattatcaccgggtatttgggcgcaggtaagactacactgctgaactacatattgaccgaacagcattctaagagagttgccgtgattctgaacgagtttggggaagggagtgccttagagaaaagtcttgctgtcagccagggcggagagctgtacgaggagtggctggagctgcgaaatggatgtctttgctgtagtgtgaaggattcgggcctacgtgcgattgaaaacctgatgcagaagaagggaaagttcgattatattctccttgaaacaaccgggctggccgaccctggggcagtggcatcaatgttctgggtagatgctgagctgggctcagacatttacctggacggaatcattactattgtggattccaaatacggcctcaaacatctgaccgaggaaaagcctgatggccttattaatgaggccaccagacaagtggcactcgcggatgctatcctgattaacaaaactgatctcgtgcctgaggaagatgtcaagaagttacgtacgacaattaggtatgaaatgatctctgtgttgtccgcctacaggtccatgctgtatacgcaaaacatattctactcagattgctgccccgttgagacctag

SEQ ID NO: 218723 - DNA, 234 bp, synthetic construct
  misc_feature 1..234: note = Description of Artificial Sequence: Synthetic coding sequence
  source 1..234: mol_type = other DNA
atgtatttcaaacgcgctgctagagcatttcccgtgctgttaacaggggctggtaagaccaccttgctgaactatattcttactgagcagcactcgaaacgggttgccgttattcttaacgaattcggcgagggctccgctctcgaaaagtcactagccgtgagccaagggggagaactatatgaggaatggctggagctcagaaacggttgtctgtgctgctccgtcaagtag

SEQ ID NO: 218724 - DNA, 342 bp, synthetic construct
  misc_feature 1..342: note = Description of Artificial Sequence: Synthetic coding sequence
  source 1..342: mol_type = other DNA
atgctgcctgctgttggaagtgccgacgaagaagaggatccggcagaagaggattgtccagaactggtacccatagagaccacccagtctgaggaagaggagaagtccgggctcggagctaaaattcccgtgacgatcatcacgggctatctgggtgccggaaaaacgactctcctgaattatatcttgaccgagcaacactccaagagagtggccgtgattctaaacgagttcggcgagggatctgccctcgaaaaatcactggcagtaagtcagggcggagagctatatgaggagtggctggagctgaggaatggctgcttgtgttgctctgtgaaatag

SEQ ID NO: 218725 - DNA, 1131 bp, synthetic construct
  misc_feature 1..1131: note = Description of Artificial Sequence: Synthetic coding sequence
  source 1..1131: mol_type = other DNA
atgctacccgcagtgggaagcgcagatgaggaagaagatccagcagaggaggactgtcccgaactggtgcccattgagactacccagagcgaggaggaagagaagtctgggctgggggctaagatccccgtgacaatcattacaggatacctcggggcaggtaaaactaccctccttaattatatcctgaccgagcaacactcaaagagggttgcagtgatactgaacgagttcggagagggatccgcactggagaaaagcctcgcggtatcccagggcggagagctctacgaagaatggctcgaactccgtaacgggtgtctgtgctgctccgtgaaagatagcggcctgcgagcaatcgagaatctgatgcagaagaagggcaagttcgattacattcttcttgaaacaaccggtttggctgacccaggcgcagtggcgtctatgttctgggtggacgccgagctgggttccgatatttacctagacgggatcattacgatcgtggactctaaatacggattgaaacaccttactgaagaaaaaccagacgggttgatcaacgaggccacacggcaggtggctcttgcggatgctatcctcattaataagactgatctggttccggaggaggatgtaaagaaactgcggacaacaatccgaagcataaacgggctcgggcagatcctcgagacgcaacggtcctcactgcagaaaaagcttcagcacgtaccaggtacacagccacacctggatcagtccatcgttaccattacctttgaagtgcccggtaacgctaaagaggagcacctcaatatgttcattcagaatcttctgtgggagaagaacgttcggaataaggacaatcactgcatggaagtgatccggcttaaggggctagtgtctatcaaagacaagagtcagcaggtgatcgtgcagggagtacatgagttgtacgacctcgaagagactcccgtgagttggaaagatgacacagaaagaaccaaccgcctcgtgcttttgggcagaaatctagacaaggatatcctgaaacagctctttatcgctacagtaactgagacagaaaaacagtggactacgcgatttcaggaagaccaggtttgcacctag

SEQ ID NO: 218726 - DNA, 483 bp, synthetic construct
  misc_feature 1..483: note = Description of Artificial Sequence: Synthetic coding sequence
  source 1..483: mol_type = other DNA
atgcttcccgctgttggaagtgcagatgaggaggaagacccagccgaggaggactgccctgagttagtccctatcgagacaacccagtctgaggaagaggaaaagagcggcctgggagcaaaaatccctgtgacaataattacaggttaccttggagctggcaagacgaccctgctgaattacatcctgaccgaacaacactcaaagcgagtcgccgtgatcctgaatgagtttggagaaggctcagcccttgaaaagtccctggccgtgagtcaaggtggcgaactttatgaagagtggttagagcttcgcaacggatgtctgtgctgctctgtgaaagatagcggcctgagggctattgagaatttaatgcagaaaaagggtaagtttgactatatcctgctggaaactacaggcctggccgacccgggaataatcacaattgtggatagtaaatatggcttaaaagtgaaataccactag

SEQ ID NO: 218727 - DNA, 441 bp, synthetic construct
  misc_feature 1..441: note = Description of Artificial Sequence: Synthetic coding sequence
  source 1..441: mol_type = other DNA
atgtattttaaaagagctgcgagggctttcccagtactcctcacaggagctgggaaaacaaccctcctgaactatatccttaccgagcaacacagcaagcgcgtggccgtgatacttaacgaatttggcgagggctccgccttagaaaagtctttggctgtgtcccagggaggagagctgtatgaggaatggctcgagcttagaaatggatgtttatgttgttccgtaaaggattccgggcttcgcgcaatagaaaatctcatgcaaaagaagggcaagtttgactacattctgctggagaccacagggcttgctgacccaggagctgtagcctccatgttttgggttgatgcggaactcggctcagacatctacttggacggaatcattactattgtggacagtaaatatggactaaaggctaagaattggactacatag

SEQ ID NO: 218728 - DNA, 1188 bp, synthetic construct
  misc_feature 1..1188: note = Description of Artificial Sequence: Synthetic coding sequence
  source 1..1188: mol_type = other DNA
atgctgcccgcagttggctctgctgatgaggaagaggatcctgcagaggaggattgcccggagttggtgcctatggagaccacgcaatcggaggaggaggagaagtctgggctgggggcaaaaatccctgtgactataatcaccgggtatctcggtgccggtaagaccactttgcttaactacattttgaccgaacagcactctaaacgcgttgctgtgattttgaacgagttcggggagggcagcgccctggagaagtcactggccgtttcccagggcggtgagctgtatgaggagtggctcgaactgcgtaacgggtgcctctgttgttcagtgaaggataacggtctgcgcgctatcgaaaaccttatgcagaaaaagggtaagttcgactacattctgctggagaccaccggtctcgcagatccgggagcagtggcttccatgttctgggtggatgccgagctcggctccgatatctatctggacggcattataacaatcgtggactctaaatacggtcttaaacatctggccgaagagaagccggatggacttataaacgaggcaacacggcaagttgccctggcagacgcaatccttatcaacaagactgatctggtccccgaagaagacgtaaagaagcttcgggctacgataaggtcaataaacggtctggggcagatcctggagacccagcgaagccgagtggacctctccaacgtgcttgacctgcacgcattcgactctctgtcaggtattagcctgcaaaaaaaactgcagcatgttccagggactcaacctcacttagaccagagcatagtaactattacatttgaagtgcctggcaacgccaaggaggaacacctgaacatgtttatccagaacctgctgtgggagaagaatgtgagaaataaggataaccactgtatggaagtcatccgcctgaaaggtttggtgagcattaaggacaagtcccagcaggtgattgttcaaggggtgcacgaactctacgacttagaggagacaccagtttcctggaaggacgacaccgaacggactaatagactagtgctgttgggccgtaacctggacaaggacattcttaagcagctctttatagcaaccgtgactgagaccgagaaacaatggaccactcactttaaagaggaccaggtgtgtacttag

SEQ ID NO: 218729 - DNA, 543 bp, synthetic construct
  misc_feature 1..543: note = Description of Artificial Sequence: Synthetic coding sequence
  source 1..543: mol_type = other DNA
atgctcccggcagtcggtagcgccgacgaggaggaggatcctgccgaagaggactgccctgagctggtgccaatggagaccacacagtccgaagaagaagaaaaatctggactgggggcaaaaattccggtaacgataattaccggctacctcggtgcgggaaaaactacattactaaattatatcttgacggaacagcactctaaaagggttgccgttatcctgaacgaatttggggaaggatcagcactggaaaaaagcttggccgtcagtcagggcggtgagctgtatgaggaatggctggagctccgaaacggctgtctgtgctgcagtgttaaggacaacggtctccgggctatcgaaaacctcatgcaaaagaaaggcaaatttgattatattttgctcgagaccacagggttggccgaccccggtgccgtggcctcgatgttctgggtggacgccgagctcggatccgacatttatctcgatggcataatcacaatagtggactctaaatacgggctgaaggtcaaataccactag

SEQ ID NO: 218730 - DNA, 1131 bp, synthetic construct
  misc_feature 1..1131: note = Description of Artificial Sequence: Synthetic coding sequence
  source 1..1131: mol_type = other DNA
atgctgcccgcagtcggctcagctgacgaagaggaagacccagcggaagaagactgtcccgaactcgtgcccatggaaacgacgcagagcgaggaagaagagaaatcaggcctgggcgctaaaattcccgttactataattacaggatacctcggagccggaaagaccacccttctcaactacatacttaccgagcagcattctaaaagagtggcagtgatcttaaatgagttcggggagggctccgcacttgaaaagagcctcgcggtctctcaaggtggtgagctgtacgaagagtggctggagttaaggaatggttgtctgtgctgtagcgtgaaggataacgggcttcgcgctattgagaatcttatgcagaagaaggggaagtttgactacattttgttggaaaccacaggcctagccgatcccggtgccgtggcctcaatgttctgggtggacgccgaactgggttctgacatatacctggatggtatcattaccatagttgattccaaatatggtctgaagcatctggcagaggaaaagccagacggactgattaacgaggctacccgacaggtggctttggcagacgccatcttgatcaacaaaactgacctggtaccagaggaggatgttaagaaactgcgcgcaacaatcaggagtatcaatggcctcggccagatcctcgagactcagcggagctcactgcagaaaaagttgcagcacgtgcctggcacacagccccatctggaccagagcattgtgacgattaccttcgaggtgccgggtaacgctaaagaggagcatctgaatatgttcattcaaaacctgttgtgggagaaaaatgtccggaataaggataatcattgcatggaggtcatccggctgaaagggctggtttctattaaggacaagtcacagcaggtgatagtgcagggcgtacacgaactgtatgacctggaagaaacacccgtgagctggaaggatgacactgagcggaccaaccggctggtccttctgggcagaaacctcgataaggacatcctgaagcagttgtttatcgctaccgtgactgaaactgaaaagcagtggaccacgcatttcaaagaagaccaggtgtgcacctag

SEQ ID NO: 218731 - DNA, 1080 bp, synthetic construct
  misc_feature 1..1080: note = Description of Artificial Sequence: Synthetic coding sequence
  source 1..1080: mol_type = other DNA
atgtatttcaagcgcgcagcgagggcattcccagtgctgttgacaggggcaggcaaaacaactctgctcaattatatacttacggagcagcactccaagagggtggcagttattctgaatgagttcggcgaaggaagcgccctcgagaagtccctagcagtttctcagggcggtgagctgtacgaggaatggctggaattgaggaatggttgcttatgttgttcagtgaaggataacggattgcgtgccatcgaaaatctgatgcagaaaaagggtaagttcgattacattctgttagagacgactggtcttgcagatccaggcgcagttgcatctatgttctgggtggatgccgagctcggctctgacatctatttagacggaatcataacaatcgtagattccaaatacggactgaaacacctcgccgaggagaaacctgatgggttgatcaacgaagccactcgccaggtggccttggctgacgccatcctcatcaacaagaccgacctcgtgcccgaggaggacgtgaagaaactgagagctactattcgcagcatcaatggcctgggccagatcctagagacccaacggagcagagtcgacctctcaaatgtgcttgacctccacgcattcgatagtctctctggtatcagcctgcaaaaaaaactgcaacatgtgcccggaacacagccccacctcgatcagtctatagtgacaattactttcgaggttcccggtaacgcgaaggaggaacatcttaatatgtttatacaaaacctgctctgggagaaaaacgtaagaaacaaggacaaccattgtatggaggtgatccgacttaaggggctggtttcaattaaagacaaatcccagcaggtaatcgtccaaggggtccacgagctgtatgaccttgaagaaacccccgttagttggaaggacgacaccgagcggactaacaggctcgtgctgctaggccgaaaccttgataaggacattctgaaacagttgttcatagcgactgtaaccgagacagaaaagcagtggactacacacttcaaggaagaccaggtgtgcacctag

SEQ ID NO: 218732 - DNA, 483 bp, synthetic construct
  misc_feature 1..483: note = Description of Artificial Sequence: Synthetic coding sequence
  source 1..483: mol_type = other DNA
atgctgcctgcggtcggcagcgcagatgaagaggaagatccggcagaggaggactgcccagagctggttcctatggaaaccacacagtcagaagaggaggaaaaatccgggctcggagcaaagatccccgttaccattataactggttacctgggagctggaaagacaacactcctcaattacattctcactgagcaacattccaaacgggtcgccgtcatactaaacgagtttggcgaggggagcgcactggagaagtcgctcgctgtctcacaggggggagagctatatgaagaatggctggagctgcgtaacgggtgcctgtgctgttctgtgaaagacaatgggttgagagccattgagaatttgatgcaaaagaagggcaagttcgactatattctacttgaaaccacgggactagcagatcctggaataattaccatagtagacagcaaatatggcctgaaggtcaagtaccactag

SEQ ID NO: 218733 - DNA, 1188 bp, synthetic construct
  misc_feature 1..1188: note = Description of Artificial Sequence: Synthetic coding sequence
  source 1..1188: mol_type = other DNA
atgctgcctgccgtcgggagcgtggacgaggaagaggacccagccgaggaggactgccccgaactcgtacccattgagacgacacagtcagaggaagaggagaaaagtgggcttggcgctaagattccagtcacgattataaccggctatctcggggcaggcaaaacaacccttcttaattacattttgacagaacagcactccaaaagggttgctgtgatcctgaatgaatccggggagggaagcgctctcgaaaagtcgctggctgtttcacagggcggagagctgtatgaggaatggcttgagttacgtaacgggtgtttgtgttgttctgtcaaggataacggactgcgggctatcgagaacctaatgcagaaaaagggcaagttcgacgatatcctcctggaaacaacaggccttgctgaccccggtgctgtagcctctatgttctgggtagacgccgagctcggttcagatatctatctggacggtattatcactatagtggattcgaaatacggtctgaagcacctaacagaagagaagccagatggattgattaacgaagctacacggcaggtggcattggccgacattatcctgatcaataagaccgacctcgtccctgaggaggatgttaagaaactgcgaactactatccgcagtatcaacggtctcggccaaatcctggagacacagcgctcccgagtggacctgtccaatgttctcgatctacatgccttcgacagtctgtcgggcattagcctgcaaaagaaactacagcatgtccccggaacccagcctcatctggaccagtcgatagttactattacattcgaagttccgggaaatgccaaggaagaacatctcaacatgttcattcagaacttgctttgggaaaagaatgttaggaacaaggataaccactgtatggaggtgatccgactaaaaggcctcgtgagcattaaagataagagtcagcaggtgatagtccagggggttcacgaattgtacgacttggaagagacccccgtgtcctggaaggacgatacggagcgtaccaatcggctagtgcttataggtaggaaccttgacaaggacattcttaaacagttatttatagcaactgtcacagaaacagaaaagcagtggactactcatttcaaggaagatcaagtttgtacctag

SEQ ID NO: 218734 - DNA, 258 bp, synthetic construct
  misc_feature 1..258: note = Description of Artificial Sequence: Synthetic coding sequence
  source 1..258: mol_type = other DNA
atggaggtaattcggctcaaagggttagtgagcatcaaggataagtctcagcaagtgatcgtgcaaggcgtgcacgaattgtatgatcttgaggaaacacctgtaagctggaaagatgataccgagagaacaaaccgcctggtgcttatcggaaggaacctggataaggatattcttaaacagctgttcattgccaccgtgaccgaaacagaaaaacagtggaccacccacttcaaagaggatcaggtctgcacctag

SEQ ID NO: 218735 - DNA, 258 bp, synthetic construct
  misc_feature 1..258: note = Description of Artificial Sequence: Synthetic coding sequence
  source 1..258: mol_type = other DNA
atggaggttatcaggttgaaggggttggtgtccatcaaggataagagccagcaggtgatcgtgcaaggagtgcacgaactttatgatttggaggaaacccctgtttcttggaaagacgatactgaacggacaaaccggttagtgttaattgggcgaaatctcgataaggatatactgaaacagcttttcattgctaccgtaaccgagacagaaaagcaatggaccactcattttaaggaagaccaggtttgcacctag

SEQ ID NO: 218736 - DNA, 132 bp, synthetic construct
  misc_feature 1..132: note = Description of Artificial Sequence: Synthetic coding sequence
  source 1..132: mol_type = other DNA
atgttcatccagaacctcctctgggagaagaatgtacggaataaagacaaccattgcatggaggtcatccggttaaaagtccaattcaccgtggccgatttctggacaaagtcttttagttggctcctgtag

SEQ ID NO: 218737 - DNA, 1128 bp, synthetic construct
  misc_feature 1..1128: note = Description of Artificial Sequence: Synthetic coding sequence
  source 1..1128: mol_type = other DNA
atgcttcctgccgtcggatctgttgacgaagaagaggatccagcagaagaggactgtcctgaactggtccctatcgagactacccagtctgaggaggaagaaaaatctggcctgggcgctaagatcccagtgacgattataacgggatacttgggcgctggaaaaaccacactcctgaactacattctgactgaacagcacagcaaacgggtagcagtcattctgaacgaaagcggtgagggctctgctctcgagaagtctctggcggtctcacagggcggtgaactgtacgaagagtggctggaactgagaaatggttgcctttgctgctccgtgaaggacaacggactgcgcgctatcgagaacctgatgcagaaaaaaggaaagttcgacgacattctattagaaaccaccggcctggccgacccagggatcatcacgattgtggattcaaaatacggccttaaacatttgaccgaggagaagcccgacggattgattaatgaggcaaccaggcaggttgcactggcagacatcattctgatcaacaaaactgatttggtacccgaagaggacgtaaagaaattgaggactacaatcaggagtataaacgggctgggtcagattctcgagacacagcgtagccgcgttgatctctctaatgttctggatctacacgccttcgactctctgtccgggattagcctgcaaaaaaagcttcagcatgtgcccggtacacaaccccaccttgaccagtctatcgttaccattacctttgaagtcccgggtaatgctaaagaggagcaccttaacatgttcatacaaaatctactttgggaaaaaaacgttcgaaataaagataatcactgcatggaagttattcgactgaaagggctggtgtctatcaaggacaaatcccagcaggttatcgtccaaggagttcatgaactgtatgatctggaagaaacacccgtgtcatggaaagacgataccgagcgaacaaatcgccttgtactcatcggccgtaaccttgacaaggacatcttaaagcagctctttattgccaccgtcaccgaaacagagaaacaatggacaacccatttcaaagaagatcaggtgtgcacttag

SEQ ID NO: 218738 - DNA, 1080 bp, synthetic construct
  misc_feature 1..1080: note = Description of Artificial Sequence: Synthetic coding sequence
  source 1..1080: mol_type = other DNA
atgtacttcaagagggcaccccgagcttttcctgtgttgctcactggggctggcaagacaacattactcaattacatcctgacagagcagcactctaaaagggtggctgtgatcctgaatgagagcggagaggggtcggcgctggaaaaatctctcgctgtgagccagggtggggaactgtacgaggagtggctggagctgcgtaatggctgcctctgctgtagcgtgaaggataatggactgagggctattgagaacctcatgcagaagaaagggaaattcgacgatattctgctggaaaccacagggctggccgaccccggagctgtggcgtcaatgttttgggtggacgcagaactggggtctgacatttacctggatgggatcatcacaattgttgattccaaatatggattaaagcacctgacagaggagaagccggatggcctcatcaacgaagccactaggcaggtcgcacttgcagatattattctcatcaacaagacagatctggtccccgaggaagatgtaaagaagttgcggacaacgatccgcagcattaacggccttgggcagatcctggaaacacagcgaagcagagtcgatctgtctaacgtacttgatttgcacgcattcgatagcttgtccgggatctctcttcagaaaaagctgcagcacgtgcccggaacccagccccacctggatcagtcaattgtgactatcacttttgaggtgccaggcaacgccaaggaggagcacctgaatatgtttattcagaacctgctttgggagaagaacgtgcggaacaaagataaccactgtatggaggtgataaggctgaaagggctcgtctctataaaggacaaaagtcagcaggtgatcgtccagggcgtgcacgaactgtatgacctagaggagacccccgtcagctggaaagacgataccgaaagaactaatcggttagttctcattggtcgcaatctggataaagatattttgaagcaactgttcatcgccaccgtaacggagacagaaaaacagtggaccacccattttaaagaggatcaggtgtgcacctag

SEQ ID NO: 218739 - DNA, 234 bp, synthetic construct
  misc_feature 1..234: note = Description of Artificial Sequence: Synthetic coding sequence
  source 1..234: mol_type = other DNA
atgtattttaagagagccccacgcgcattcccagttctgctgacaggcgcaggcaaaactaccctgctgaattacatccttactgaacagcactccaagcgggtcgccgtcatattgaacgagtccggcgaaggaagcgcactggagaagagtctcgcagtatcccagggcggtgaactgtacgaagagtggttagaactgaggaacggatgtctgtgctgttccgtgaaatag

SEQ ID NO: 218740 - DNA, 1131 bp, synthetic construct
  misc_feature 1..1131: note = Description of Artificial Sequence: Synthetic coding sequence
  source 1..1131: mol_type = other DNA
atgctccctgcagtgggatccgtcgatgaagaggaggatcccgcagaagaagattgccccgaattggttcctatcgaaactacacagtccgaggaagaggagaagtccggtctgggggcaaaaatccctgtgaccatcattaccggatacctcggcgctggaaagaccaccctgctgaactatatcctaactgagcagcattctaaaagagtcgctgttatcctcaatgagagcggcgaaggctctgcactagaaaagtccctggctgtgagccaggggggtgagctttatgaggaatggcttgaactgcggaacggttgtctgtgttgctctgtgaaggacaatggcctgcgggctattgaaaatctcatgcaaaagaagggaaaatttgatgacatcctcttggaaacaactggcctagcggacccaggcgcagttgcgagcatgttttgggtcgatgctgaactgggtagcgatatatatctggatggcattattacgatcgttgactccaagtacggccttaagcacctgactgaagaaaagcccgatgggctgattaacgaagctacacgccaggttgccctggcggacattatccttatcaacaaaacagacctagttcctgaggaagatgtgaagaagctacggaccacgattcggagcattaacggtcttgggcagattctcgaaacccagcggagtagtctccaaaagaagctgcagcacgtccccggaacccagccgcacctggatcaatcaatcgtgacaatcactttcgaagtcccaggcaacgccaaggaagagcaccttaacatgtttatccagaacctcctttgggagaagaatgtgcgtaacaaggacaaccattgcatggaggtaatccgcctgaaaggcctggtgagtattaaggataagagccagcaggttattgtgcagggagtgcatgagctctacgatttggaagaaacccccgtctcatggaaggatgacaccgagagaacaaataggctggtcctgattgggagaaatctcgacaaagacattctgaagcaactattcatcgccactgtcactgaaacagagaagcaatggaccactcactttaaagaggatcaagtctgtacctag

SEQ ID NO: 218741 - DNA, 225 bp, synthetic construct
  misc_feature 1..225: note = Description of Artificial Sequence: Synthetic coding sequence
  source 1..225: mol_type = other DNA
atgtactttaaacgcgcaccacgggcttttcccgtcctcctgacaggggcaggtaagaccactctactcaattatatccttacagagcagcattctaagcgagtggccgtgatcctgaacgaaagcggtgagggaagcgctttagagaagtcactggctgtgagtcagggcggtgagctttatgaagaatggcttgagctgcgtaacgggtgtctctgttgctag

SEQ ID NO: 218742 - DNA, 543 bp, synthetic construct
  misc_feature 1..543: note = Description of Artificial Sequence: Synthetic coding sequence
  source 1..543: mol_type = other DNA
atgctgccagcagtgggttctgtggatgaagaggaagacccggcagaagaagattgtcccgagctcgttcctattgagaccactcaatccgaggaggaggaaaaaagcggtttgggggcaaagattcctgtcactattattaccggttatctgggggctggtaaaacaacgctgctgaactatatcctgacagaacagcactctaagcgggttgctgtaatactcaacgaatccggcgaggggtccgctctcgaaaaaagtttagcggtgtcccaaggcggtgagctctatgaggaatggttggaactccgaaacggatgcctgtgctgttccgtcaaagacaacggccttagagcaatcgagaatttaatgcagaaaaaaggaaaattcgacgacatactccttgagactaccggtctcgctgatcccggtgccgtcgcgagtatgttctgggttgatgcggagctgggaagtgatatctacctggatgggattattactatagttgacagtaaatacggcctgaaggtgaagtatcactag

SEQ ID NO: 218743 - DNA, 1044 bp, synthetic construct
  misc_feature 1..1044: note = Description of Artificial Sequence: Synthetic coding sequence
  source 1..1044: mol_type = other DNA
atgcttcctgccgtgggaagcgtcgacgaagaggaggatccggctgaagaggattgccctgagctggtgcccattgagactactcaatctgaagaagaggagaaatccggcctcggtgctaagattcctgtgacgattattacgggatacctgggagccggtaaaaccacactcctgaactatatcttgacagagcagcattctaaacgggtggctgtcatcctgaatgagtcaggggaaggatctgctctggaaaagagccttgcagtgtctcagggaggggagttatatgaggagtggctggaactgcgcaatgggtgcctttgttgcagcgttaaggacaatgggctcagagccatagagaacctgatgcagaagaagggaaaatttgatgacatcttgctggaaacaaccggactggcggacccaggcgctgtagcctctatgttttgggtggatgccgaactagggagcgatatttatctcgatggcatcatcacaattgtggactcgaaatacggattgaagcatctcacagaggaaaagccagatggactgatcaacgaagcaacaagaagcattaacggcctgggtcaaatcctagaaacacagcggtcctccctgcaaaagaaactgcaacatgtgcctggaacccagccccacttggaccagtcgattgtaacgatcacttttgaggttcctggtaatgccaaggaagagcacttaaacatgttcatacaaaatctgctctgggagaaaaacgtacgcaacaaagacaatcactgtatggaggttattcgtctgaaagggctggtcagtatcaaagataagtcgcagcaggtcattgtgcaaggggtacacgagctgtacgatctcgaagaaactcctgtctcatggaaggatgatactgagcgtactaacagacttgtcctgatagggaggaatctcgataaagacattttgaagcagctgttcattgcaacagtcacggagacagagaagcagtggaccacccactttaaagaagatcaggtttgtacatag

SEQ ID NO: 218744 - DNA, 987 bp, synthetic construct
  misc_feature 1..987: note = Description of Artificial Sequence: Synthetic coding sequence
  source 1..987: mol_type = other DNA
atgctgggttcccgcgcagctggctttgcacgtggtttgagggccgtggctctggcttggcttccaggttggcggggacgatcctttgcgctggcccgtgccgcaggcgctccacacggcggagatctgcagccacctgcctgccctgagcccaggggccgacagctgtcactatccgccgcagccgtcgtggactcagcgccacggcctctgcaaccctatctgagattgatgagactggataaacccatcggcacctggctcctctatctgccctgtacatggagcatcggactggcagccgagcctggatgcttccccgattggtatatgctgtcactgttcggcactggtgccattcttatgcgcggtgcagggtgtacaataaatgacatgtgggatcaggactatgataagaaggtgactcggactgcgaatagaccaatcgcggcaggcgacatctccacattccagagcttcgtttttctgggtgggcagctgacactggctctgggcgttctactctgccttaactattattcaattgcgctgggggctggatccctcctgttagtaattacgtaccccctcatgaaaagaatctcttattggcctcagctcgccctgggcttgacctttaactggggtgccctcctcggatggtcagccattaaggggagctgtgacccgtccgtgtgcctgcctctgtatttctcaggagtaatgtggacattgatatacgacaccatatacgcacaccaggacaagagagatgacgtgttaattggtctgaaatccacggcattaaggtttggcgagaacacgaaaccttggctctccggattctctgtggctatgctcggggcattgagcctggttggtgttaactctgggcaaactgctccctattatgctgcattgggagcggtgggcgctcatctgacccatcagaagtgggggttggaaattcttccaagactagtttag

SEQ ID NO: 218745 - DNA, 1266 bp, synthetic construct
  misc_feature 1..1266: note = Description of Artificial Sequence: Synthetic coding sequence
  source 1..1266: mol_type = other DNA
atgactccgatctcccaagtccggatgcggaaaggcagcgcgcatacagcagcccagcctggaaggctgggattgcacccagccggtgctaccgcccacgcttgcaggggcatgacaagtataagagctcgacccggtttgaccagtgctatgctcggcagccgcgctgccggatttgcccgagggttgagagccgttgcgttggcatggctgccagggtggcgcggacggtcttttgctttagcgcgtgccgctggtgcccctcatggaggggacctgcaacctccagcatgtcccgagccgcgagggagacaattgagcctgagtgccgctgctgtagtcgactccgctcctagaccactgcagccatatctgaggctaatgcgccttgataaaccaattgggacctggctgctgtacttaccatgtacttggtccattggactggccgcagagcctgggtgttttcccgattggtatatgttaagtctgtttggaaccggcgcaatactgatgcgaggagcgggttgtacaatcaatgacatgtgggaccaagactacgataagaaggtaacaagaacagcgaaccgcccaattgcagccggagatataagtacctttcagtcatttgtgtttttgggtggccagcttaccctcgcgctgggcgtactactgtgcctgaattattactctattgcactcggcgcagggagtctgctgttggtgatcacataccctcttatgaagagaatcagctattggcctcaacttgcgctgggacttaccttcaattggggagcactgttggggtggagtgcaataaaaggctcatgcgatccgtccgtttgcctgccgttgtattttagcggcgtgatgtggacactgatttatgacacaatctacgcacaccaggacaaaagggacgatgtgctcatcggcctcaagtctacagccctgaggttcggagagaacaccaaaccctggctgtccggcttttcggtcgccatgctgggcgcactcagcttggttggcgtcaactctggtcagaccgccccatattatgcggctctgggcgcagtcggcgcacacctgacccaccagatatataccctggacatacatcggcctgaagactgttggaacaagttcatcagtaacaggactcttgggctaattgtgttcttggggatcgtgctgggcaatctgtggaaggaaaaaaagacggataagaccaaaaaaggcatcgagaacaagattgaaaactag

SEQ ID NO: 218746 - DNA, 1155 bp, synthetic construct
  misc_feature 1..1155: note = Description of Artificial Sequence: Synthetic coding sequence
  source 1..1155: mol_type = other DNA
atgaccagcattcgcgcacgacccggattgacttcggctatgctcgggtcaagagctgccggatttgcaaggggcttgcgggctgtcgctctggcttggctccccggatggcgaggcaggtctttcgctttagctagggctgccggtgctccacatggtggggaccttcagccccctgcctgtcccgaacctagagggcgacagttgtcgctgtcagctgcagcagtggttgactcagcgccacgtccccttcagccctacttgcggctcatgaggctcgataagcccattggaacctggcttctgtacctcccttgcacttggagtattgggttggctgcagagccaggttgttttcccgattggtatatgctatccctgtttggaaccggggctattctcatgagaggtgccggttgcacaatcaacgacatgtgggaccaggattatgacaagaaggtcaccagaactgcaaaccgccctatcgcagctggagacatatctacatttcagtccttcgtttttttaggaggacagctaacactggccctgggcgtgcttctttgtctgaattattactcaatcgctctgggggctggttctctactcctggtgatcacatacccactgatgaaaaggatcagctactggccacaactcgcactcgggttgacgttcaactggggggctctgctagggtggtctgctattaagggatcctgcgatccaagtgtgtgcctccctttatacttttctggcgttatgtggacactaatctacgataccatctacgctcaccaggataaacgagacgatgtccttataggcctgaagtctactgcattgaggttcggggaaaatactaaaccgtggctcagcggtttctccgtcgccatgctgggcgcactcagtcttgtgggggtcaattctgggcagacagcaccttattacgcagctttaggtgccgtgggagcccatctgacccatcagatttataccttggacatccatcggcctgaagattgttggaacaaattcatttcgaatcgcacactcgggctgattgtgtttcttggtattgtccttggtaatctttggaaagagaagaaaactgataagacaaagaaggggattgaaaataagatcgagaattag

SEQ ID NO: 218747 - DNA, 798 bp, synthetic construct
  misc_feature 1..798: note = Description of Artificial Sequence: Synthetic coding sequence
  source 1..798: mol_type = other DNA
atggctacactgctgagacccgttctacggcgactctgcggcctcccaggcctccagagaccagcagccgaaatgccactgcgtgccaggtcagatggggcaggtcccttgtactcccaccacctgcctacctctccccttcagaaaggcctcttagcagcgggaagcgcagcgatggcactgtacaatccatatcgtcacgatatggtggccgtcttgggggaaacaacagggcaccgtaccctcaaagtcctcagggaccagatgcgaagggacccagaaggcgctcagatcctacaagagcggcctcggatttctacttctacactagatctaggaaaactacagtcactcccagagggctcgctcggaagagagtacctgagattcctggatgtcaaccgggtgagccccgatactcgagcacccactaggttcgtcgatgatgaggaactagcttatgtaattcagcggtatcgtgaggtacacgatatgttgcacactttgctcgggatgccaaccaacatcctcggggaaattgtcgtcaagtggttcgaagccgtgcagactgggctgccaatgtgcatccttggggcatttttcggaccgatacgactgggcgctcaatctttacaggttttagtgagcgaactgatcccttgggccgtgcaaaacggtagaagagctccttgcgttttgaacctctactacgaaagaagatgggaacagagcctaagagctttaagagaggagttgggaatcaccgcgcctcctatgcacgtgcagggtcttgcctag

SEQ ID NO: 218748 - DNA, 456 bp, synthetic construct
  misc_feature 1..456: note = Description of Artificial Sequence: Synthetic coding sequence
  source 1..456: mol_type = other DNA
atggcaacactgctccgcccagtgctccgcaggctgtgtgggcttcccggactccaaagaccagcagctgagatgccactgagggcccgttcggacggggcaggcccactgtactcacatcacctgcccacctcccccctgcagaagggcctcctggccgcaggttccgccgcaatggccctctacaacccctatagacacgatatggttgccgtactcggcgagacaacaggacatcgaacactcaaagtcctgcgggaccagatgcgacgcgatccagagggagcacagattttgcaggagagacccagaatctctacatcgactctggatcttgggaagcttcagtccctgccagagggctcactgggcagagaataccttcgcttcttggacgtcaatgtcagcttccagttgttatgcatctggcagtcacctgatcgcacggaagagtag

SEQ ID NO: 218749 - DNA, 654 bp, synthetic construct
  misc_feature 1..654: note = Description of Artificial Sequence: Synthetic coding sequence
  source 1..654: mol_type = other DNA
atgtcatgtgcaggcgctgctgcagcgcctaggctgtggagactgcgtcctggtgctagacggagtctgagcgcgtatggcaggcgaacttcggttcgcttcagatcttccggaatgacattggacaacattagtcgcgctgcggtagatcggatcatacgcgtcgaccacgcaggagagtacggagccaaccgaatttatgccggacagatggctgtacttggcagaacctctgtgggcccagttatccagaagatgtgggatcaggagaaggatcacttaaagaaatttaatgaacttatggtgacctttcgcgttcgcccaactgtcctgatgcccttatggaacgtgctgggcttcgcactaggtgccggaaccgcactgctgggaaaggagggcgcaatggcctgcactgtggctgtggaggagtctattgcccaccattacaataaccagatcaggacactcatggaagaggatcccgaaaaatatgaagaactactgcagctgataaagaaattccgggatgaggagcttgagcaccatgacatcgggctggatcacgacgcagaacttgctccagcttacgctgttctcaaatcgatcatccaggcaggatgccgagtggctatctatctcagcgagaggttgtag

SEQ ID NO: 218750 - DNA, 540 bp, synthetic construct
  misc_feature 1..540: note = Description of Artificial Sequence: Synthetic coding sequence
  source 1..540: mol_type = other DNA
atgacactcgacaacattagtagagccgctgtcgaccgaataattcgggttgaccacgctggcgaatacggtgcaaataggatctatgccggtcagatggcggtgctcgggagaacatccgtgggccctgtgatacaaaaaatgtgggatcaggagaaggatcacctcaagaagttcaatgaactcatggtaaccttcagagtgagacccacagtccttatgcctctctggaacgtccttggattcgcgcttggggctggaacagctcttctgggtaaagaaggggcaatggcctgcacggtcgcagtcgaagaaagcattgcccaccactacaacaatcagattaggactctgatggaagaagatcccgagaagtatgaagaactgttacagttgataaaaaagttccgcgacgaagaattggagcaccacgacatcggactggatcacgatgcagaactagcacctgcttacgccgtcctgaaaagcattatccaggccggatgtagggtcgctatctacctttctgagaggctttag

SEQ ID NO: 218751 - DNA, 957 bp, synthetic construct
  misc_feature 1..957: note = Description of Artificial Sequence: Synthetic coding sequence
  source 1..957: mol_type = other DNA
atggccgctgctgcagtctccggggcactaggccgagcaggatggcggctcctgcagctgcgctgtctacctgtggctagatgccggcaggctctggtgccacgggcatttcacgccagcgccgtcgggttacgaagctccgacgaacagaagcagcagccacctaactcattcagtcagcagcactccgagacccagggcgcagaaaagcccgaccctgaatcttcccattcccctcctaggtatactgaccagggaggggaggaagaagaagactatgaaagcgaggaacagttgcaacacagaattcttacagcagctttggagttcgtacccgctcacggatggacagcagaagccattgcggaaggcgctcaatctttgggcctgtctagtgcagctgcttccatgttcggaaaggatggctctgagcttattctgcactttgtcacgcagtgcaacacgaggctaacgcgggtgctggaagaggaacagaagctagtacaactcggacaggctgaaaagagaaagaccgaccaattcttgagagatgccgttgaaaccagactgcggatgttgattccgtacatcgagcattggccacgggctctctctatactcatgctgccacacaatattccttcttcgctgtctttactcaccagcatggttgatgacatgtggcactatgccggtgatcaatccactgacttcaactggtacactaggcgggcaatgctggcggcaatctataatactacagaactggtcatgatgcaagactcctctcctgactttgaagacacatggaggtttctggagaatcgcgtaaatgacgcaatgaacatgggccacacagccaaacaggtgaaatccacaggggaagctctggtccaaggactaatgggagccgcagtgaccctgaagaatttaaccgggctgaaccagcgcagatag

SEQ ID NO: 218752 - DNA, 1743 bp, synthetic construct
  misc_feature 1..1743: note = Description of Artificial Sequence: Synthetic coding sequence
  source 1..1743: mol_type = other DNA
atgttcgcaggcttgcaggatttgggagtggcaaatggtgaggatctgaaagagacattgactaactgcactgagcccttgaaagccatcgaacagttccagacagaaaacggagtcttgctgccttcgcttcagtccgctttgccatttctggatctgcatggaacaccgaggttggagttccaccagagtgtgttcgatgagctgagagataaactgttggagcgggtgagcgcaattgcatccgagggcaaagccgaagaaagatataagaagctggaggatcttctcgaaaagtctttctccctggtgaaaatgccctcattacagcccgtcgttatgtgcgtgatgaagcatcttccaaaagtgcccgagaaaaagttgaaactggttatggcagacaaggaactataccgcgcatgtgccgtggaagtaaaaagacaaatttggcaagacaatcaagccctctttggcgatgaggtttcccccctattaaagcagtacatcctggaaaaggagagcgccttgttttccacagaactgagcgtcctccataactttttctctccctcacctaaaactaggaggcagggagaagtggtacagagactgacccggatggttgggaagaatgtcaagttatatgacatggtgctacagtttctgagaactctgttcctgcggactaggaatgtacactattgcaccctgcgcgctgaattgctgatgtcattgcatgatttggacgtcggggagatatgcacagtagacccatgccacaaatttacatggtgtctcgatgcttgcatacgagaaaggtttgtggactctaagcgtgcacgcgaacttcaaggtttccttgatggggtgaagaaaggccaagaacaggttctcggcgatctttctatgatactttgtgatccttttgccattaacactctagctttgtccacagtgcgccacttgcaggagctggttggacaagagaccttgcctcgcgactcaccagatctccttcttttgctgcgtctcctggccctcgggcagggagcgtgggacatgattgattcccaggtttttaaagagccgaaaatggaagtggagttgattaccagatttctgcctatgctcatgtcttttctggttgacgactacacctttaatgtggaccagaagttgcccgcagaggagaaggcccctgtgagctatccaaacaccttacccgaaagttttacgaagttcctgcaggagcagcgcatggcctgcgaggtgggcttatattacgtgctacacatcaccaagcaacgcaataaaaatgccctgctaaggctcctgcccggtttggtggaaacgtttggtgatctcgcatttggagatatcttcttgcacctattaacgggaaatcttgcactgcttgctgacgaatttgccctggaagatttctgttctagcctattcgatggttttttcctgactgcttccccacggaaagaaaatgtgcacagacatgctctcaggctgctgatacatttacatcctagggtggccccttctaagctggaagccctgcagaaagctcttgagcccactggccaaagtggagaagctgttaaggaactgtatagccaattaggggagaagctggagcagttggaccatcggaaaccatcccccgctcaggcagccgagacaccagccctagaactgcctcttccttctgtgcctgctccagctccgctctag

SEQ ID NO: 218753 - DNA, 501 bp, synthetic construct
  misc_feature 1..501: note = Description of Artificial Sequence: Synthetic coding sequence
  source 1..501: mol_type = other DNA
atggcttccggggtgacggtgaatgacgaggtgatcaaagtgttcaacgatatgaaggtacgaaaaagttccacacaggaggagatcaaaaaacgaaagaaagccgtcctcttctgcctgtctgatgataagcggcagatcatagtcgaagaagccaaacaaatcctggtaggtgacatcggcgacaccgttgaagatccttataccagcttcgtcaagttgctcccacttaatgattgccgctatgccttgtacgatgccacctacgagaccaaggagtccaaaaaggaagatctcgttttcatcttttgggccccagagtctgcgcctttgaagagtaagatgatttacgccagtagcaaggacgcaatcaagaagaagtttaccgggatcaaacacgaatggcaggtgaacggccttgatgatatcaaagacagatctaccctcggagaaaagcttgggggaaacgtggtggtttccctcgagggcaagcctctgtag

SEQ ID NO: 218754 - DNA, 501 bp, synthetic construct
  misc_feature 1..501: note = Description of Artificial Sequence: Synthetic coding sequence
  source 1..501: mol_type = other DNA
atggctagcggtgttacggttaacgatgaggtcatcaaggtatttaatgacatgaaagtgaggaagagtagtacacaggaggagatcaagaagagaaaaaaagccgttctgttttgcctctcagatgacaaacggcaaattatcgtggaagaagcgaaacagattttggtgggggatatcggggacactgtcgaggacccgtacacctcattcgtgaaactgctgccccttaatgattgtaggtacgccctttacgatgcaacatatgagacaaaggaaagcaaaaaagaggacctcgtatttatcttttgggcacccgagtctgctcctttaaagtctaagatgatatacgcctcttccaaggatgcgatcaagaagaagttcacagggatcaagcacgaatggcaagtgaacggccttgacgatatcaaagatcggagcaccctgggcgagaagctaggtggcaacgtcgtagtcagcttggagggaaagcctttgtag

SEQ ID NO: 218755 - DNA, 1722 bp, synthetic construct
  misc_feature 1..1722: note = Description of Artificial Sequence: Synthetic coding sequence
  source 1..1722: mol_type = other DNA
atgaggcgctatgacaggggcctgaagactctcgaaaacctgctggcttcgatccggaaagggaacgccattgatgaagccgacatcccacctcccgtggccatcgggaaaggccctgcatccaccccgacttacagcccagcccctactcagcccgcaccacgcattgcttctgctccggagcccagagtcaccctcgagggaccctccgccacagccccagccagctctccaggattagccaaacctcaaatgcccccagggccatgcagccctgggccattggcccagctgcagtcccgccagagagactacaaactcgcggcactgcacgcaaagcaacagcaactcgcattcttggagggacggaagaaacagcttctgcaggctgctctgcgagccaaacagaaaaacgatgtggaaggcgctaagatgcacctccggcaggccaagggactcgagcccatgttggaggcttcccggaatggcctgccagtggacatcactaaagttccacctgctcccgtcaacaaggatgacttcgctctggtccagcggccaggacctggtctgtctcaagaagccgctcgcagatatggggagctaaccaagttgatccggcagcagcacgagatgtgccttaatcatagcaaccagttcacccagttaggcaatatcactgaaacgaccaaatttgaaaagctagccgaagattgtaagcgttctatggatatcctgaagcaggcgtttgttcgaggcctgcccacgcccactgctcgcttcgaacagcgcacattctcggtaattaagatatttcctgatctctcttctaatgatatgttgctgttcatcgttaaagggattaacctgcctacccccccagggctgtcacccggagacctggacgtgtttgttagatttgacttcccctaccctaatgtggaggaggcccaaaaagataaaaccagcgtgattaagaacaccgactcacccgagttcaaggagcaatttaaactctgtatcaatcgcagccatcgaggttttcgcagagctatccagacaaaagggatcaaattcgaggtcgtacataagggtgggctcttcaaaaccgatagggtactgggcaccgcgcagctgaagttggacgcgcttgagatcgcctgtgaggttagggagattctggaagtattggacggtcgacgccctacgggaggcaggctggaggttatggtgagaatccgagagccactgacagctcagcagcttgaaaccaccacagagcgttggttagttattgatcctgtgcctgcagcagtgccaaccgtggcaggacccaagggaaaggcccctccagtcccggctccagccagagaatctggaaatcgatccgccagaccgctgcattccctgagcgtgctggctttcgatcaggagaggttggaacggaaaatcctcgccctccggcaggccagaaggccggttccccctgaggtcgcacagcagtatcaggatatcatgcaacgcagtcagtggcagagagcacagttagaacaaggaggggtggggattaggagggagtacgcggctcagctggagaggcagcttcagttctataccgaggccgctagacgactgggcaatgacggctcacgggacgccgctaaagaggccctatatcggagaaatttggtcgagtccgaactgcagaggctaaggcgatag

SEQ ID NO: 218756 - DNA, 2856 bp, synthetic construct
  misc_feature 1..2856: note = Description of Artificial Sequence: Synthetic coding sequence
  source 1..2856: mol_type = other DNA
atgcacaaaagaaagggcccacctggaccacctgggaggggagcagctgccgcaagacaattaggtttactagttgacttatcccccgacggtctcatgatccccgaagacggcgctaatgatgaggagctggaagcagaatttctggccctggtcggagggcagccccctgccctagaaaagttgaaagggaaggggcctttgcccatggaagccatcgaaaagatggcgagtttatgtatgagggacccagacgaggatgaggaagaagggacagatgaggacgatttagaagccgatgacgaccttttggccgagttaaatgaagtcctcggcgaagagcagaaggcctctgaaaccccacccccagtcgctcagccaaagcccgaagcgcctcatcccggtctggagaccacccttcaagagcgtctcgccctgtaccagactgccatcgaatctgctcggcaggccggtgactccgcaaaaatgcgcaggtacgataggggactaaagaccctggagaacctgctcgcttctattagaaaaggcaacgccatagatgaagcagatatccctcccccagttgctattggtaaggggcctgccagcaccccgacctactcccctgcccctacccagcccgcaccccgtatagcttctgccccagagccccgtgtcaccctggaggggccatcggcaaccgcgcctgctagctcacccggactggctaaacctcagatgccacctgggccttgttcacctggacctctggcccaattgcagtcgcgccaacgcgattacaaacttgccgcactgcatgccaaacagcagggcgataccaccgccgcagccagacatttccgtgtagcaaaatcgtttgatgccgtgttagaagccctttcccgcggtgaacccgtggacctaagctgtcttccaccaccaccagaccaactccctccggatcctcccagtccaccctctcaaccgcctacgccagcaacggctccctcaacaacagaggtccctcctccaccacgaacactactggaagcactggagcagcggatggaacggtatcaggttgcggcagcgcaggccaagtcgaaaggcgatcaacgcaaagcacgaatgcatgaacgtatagttaaacagtatcaggatgcaatcagggctcataaggctggacgcgcagtggacgttgcagaattaccagtcccacctgggtttcccccaattcaggggcttgaggccacaaagccaacccaacaatctttggtcggcgtacttgaaacggccatgaaactggcaaatcaagatgagggtccagaggacgaagaggatgaggtaccaaaaaaacaaaatagccctgtggctccgaccgctcagccaaaagcccctccatcccgtactccccagtccggcagtgccccaactgcgaaagcacccccaaaggccaccagcacccgcgctcaacagcagttagcattcctggaggggaggaagaagcagctactgcaagcggcattaagggccaagcaaaagaacgacgtggaaggggcaaagatgcacctgcgacaggcaaaaggcctagagccaatgctcgaggcctctcgaaatggcctcccagtggatattactaaggtacctccagcaccagttaacaaagatgactttgctctggttcagcgacctgggccaggtctctctcaggaggccgctcgtagatatggggagctgacgaaacttatccgacagcaacacgaaatgtgtctgaatcattcaaatcaattcacccaactcggaaatatcaccgaaacaaccaaatttgaaaagcttgcagaggactgtaagcgctctatggatatcctgaagcaggcgtttgtgaggggcttgccgacaccaacggcgcgattcgaacagcgcacctttagtgtgataaagatcttccccgatctatccagcaacgatatgcttcttttcattgttaagggcatcaatctacctaccccccctggtctctctcccggtgacctggatgtgtttgtgcgattcgacttcccttaccctaacgttgaagaagcccaaaaggataaaacctccgtcatcaagaatacagatagcccggagttcaaggagcagtttaaattgtgtataaatcgatctcatcgtggcttccgtagagcgatccagactaagggaattaagttcgaggttgttcacaaaggaggtttgtttaagacggaccgtgtgctgggcacagctcagcttaagctcgacgccctggaaatcgcatgtgaggttagggagatcctcgaggtgctggatgggaggcgaccaactggaggacgcttagaagtgatggttaggatcagagaacctcttaccgcgcagcaactggagaccactaccgagagatggctcgtgattgaccccgttcctgccgcagtgccaactcaggtagccggtccaaagggaaaagctcccccagtccctgctcctgcacgcgagtccggaaaccgtagtgctaggcctctccattctttgagtgtacttgcctttgaccaagagcgcctcgaacgaaaaatcctggctcttagacaggcacgacgcccagtgcctcctgaggtagcccagcagtatcaagacattatgcagcgaagccagtggcagcgcgcacagttggagcagggcggagttgggatccggagggaatacgccgctcagctcgagcgccagcttcagttctataccgaggctgccagacgtctgggcaacgatggttccagagacgcagccaaggaagccctctatcgccgtaacctggtcgagtccgagttgcagcgcctccggagatag

SEQ ID NO: 218757 - DNA, 711 bp, synthetic construct
  misc_feature 1..711: note = Description of Artificial Sequence: Synthetic coding sequence
  source 1..711: mol_type = other DNA
tggcatagtcccgacggcttaatgatcccagaggacggagctaatgacgaagaactcgaagccgaattcctagccttagtcggcggacagcctccggctctggaaaagctaaaggggaagggaccgttgcccatggaggcaatcgaaaaaatggctagcctctgtatgcgagaccctgatgaggatgaggaggaggggacagatgaggacgaccttgaggccgacgatgatctcctagcggaattaaacgaggtgcttggcgaggaacagaaggcctccgagactccccctccagtcgcacagccaaagccagaggcccctcaccctgggctggaaaccaccttgcaggagcgacttgccctgtatcagactgctatcgagagcgcgcgacaagccggagactccgccaaaatgcgacgatacgaccggggactcaaaacgttagagaatctgctagctagtattcgcaagggcaacgccatagacgaggcagatattccccctcccgtcgcaattggaaaagggccagcctctactccaacctacagtcctgcaccgacacagcctgctccaaggattgcttccgctcccgagcccagagttacactcgaaggcccatcggctactgcccctgcgagttctccaggactggcaaagccacagatgccacctgggccttgttccccaggtcctctggctcaactccagtag

SEQ ID NO: 218758 - DNA, 1116 bp, synthetic construct
  misc_feature 1..1116: note = Description of Artificial Sequence: Synthetic coding sequence
  source 1..1116: mol_type = other DNA
atgcctcccggaccctgctctccgggaccattggcccagctccagagtcgccagcgtgattacaagctggccgctctacatgccaaacagcagggtgacaccaccgccgctgcacggcacttcagggtggctaaaagctttgatgccgtactggaggcactctccagaggagaacctgttgatctgtcctgcttgccgccaccccctgaccaacttcccccagatccaccttcacccccaagtcagcctccaactcctgccactgcaccctctacaaccgaagttcctcctccacccaggaccttactcgaggccctcgagcagcggatggagcgctatcaggtggccgcagctcaggctaaatccaagggcgaccagcgtaaagccagaatgcatgagcgaatcgtcaagcagtatcaggacgccatcagggctcacaaggcaggaagggcagtggacgttgcggaactgcccgtgcctccaggctttcccccaatccagggtttggaagcaaccaaacccacccagcaatctctcgtgggggtgctcgagaccgctatgaaactggctaaccaagatgagggtcccgaagatgaagaagacgaggtgccaaaaaagcaaaattctcccgtcgcccctacagcacaaccaaaggcaccccctagtcggactcctcagtcaggttcagctcccaccgcgaaggcgccacctaaggccacttccacgagagctcagcagcagctggcttttttagaggggcgtaagaagcagctcttgcaggcagctctgagagctaagcaaaagaacgatgtggagggtgcaaaaatgcaccttcgccaggctaaaggcctggaacccatgctcgaagcttcaagaaacgggcttcccgtggacattaccaaagttccaccagccccagtgaacaaagatgatttcgcactagtgcaaagacccggtcccggtctctcccaagaggcagctcgtaggtacggcgagcttaccaagctgattagacagcagcacgagatgtgcctgaaccattcaaaccagtttacccagctggggaatattaccgaaactacgaaagccaacatggtgaagccctgcttctactag

SEQ ID NO: 218759 - DNA, 4539 bp, synthetic construct
  misc_feature 1..4539: note = Description of Artificial Sequence: Synthetic coding sequence
  source 1..4539: mol_type = other DNA
atggtttccgaaaaatcccaccttggcaacccccaggaacccgtccaggaggaacccaaaactagactgctttctatgacagttagacgagggcctagatcactccctccaatacccagcacgtctcggactggctttgcagaatttagcatgcgtggcagaatgagggaaaagttgcaggccgcacgaagtaaggctgagtccgcactcctgcaggaaatccctaccccgagaccacggcgattacgatctccaagcaaaaaggaactggagactgagtttggtacagagcccggaaaagaggtggagagaactcagcaagaggtggactcccaatcgtatagccgggtcaagtttcacgactccgctaggaaaattaaacccaagccccaggttcccccagggtttccatccgccgaggaggcatacaacttctttacttttaacttcgaccctgaaccagagggcagcgaggaaaagcctaaagcaagacacagggccggaaccaatcaggaggaggaggagggggaggaagaggagccaccggcacagggtggtggtaaggagatggacgaggaagaacttttgaatggcgatgatgctgaagactttttgctgggcctggatcacgtggccgacgacttcgtcgccgtaagaccagccgattacgagtccatccacgacagattgcaaatggagcgagagatgttatttataccaagcaggcaaaccgtgccgacctataagaagcttcctgaaaatgtgcagccaagattcttagaagatgaagggctgtataccggcgtgagaccggaggtggccaggaccaatcaaaatattatggaaaatcggttgttgatgcaagatcctgagcggagatggttcggggatgacggccgtatcctggccctcccaaaccccatcaaacctttcccatcccgccctccagttcttacacaggaacagagcatcaaagccgagctcgagacactctataaaaaagccgtcaagtacgtgcatagctcccagcacgtgataagatcaggagatccccctggcaacttccagcttgacatagatatatctgggttaatattcacccatcacccgtgcttctcacgggagcatgtgctggccgcaaagctggcccagctgtatgatcagtacctggcgcgtcatcagcgtaacaaagccaagtttctgacggataagctacaggcattgcgtaacgccgttcagacagggctggaccctgagaagccacaccaatctttggatactatacagaaaaccatcaacgagtataagtcggagatccgccaaacccgtaagttccgtgatgcagagcaggagaaggatagaaccttgttgaagactataattaaagtgtggaaggaaatgaaaagcctacgggagttccagcgatttacaaatacccctttgaaactggtgctccgtaaggagaaagctgaccagaaggccgacgaagaagcatacgaggcagagattcaggcagagatctccgaactccttgaagaacacactgaagagtatgcgcagaagatggaagagtacagaaccagtttacagcagtggaaggcgtggcggaaagtgcaaagagcaaagaagaaaaagagaaagcaggcagccgaggagcatccaggcgacgaaattgctgagccatatcctgaagaggacctagtgaaaccctcgccccctgagccaaccgacagggcagtgatagagcaggaagtcagggagcgcgcagcacagtcacggcgaaggccctgggagccaacacttgttccagagcttagcttggcagggtcagttacaccaaatgatcagtgcccacgggcagaagtcagtagacgggaagatgtcaaaaagcgctccgtgtatttgaaggttctcttcaataataaagaggttagcagaaccgtgtccaggcccctcggcgctgactttcgcgtacactttgggcaaattttcaacttgcagattgtgaactggccggagagtctgactttacaggtctatgagacagtgggacattccagccctacactgctggccgaggtctttctgccaattccagagaccacggtggtgacgggaagggctcctacagaggaggtagagttcagctccaaccagcatgtgactctggaccacgaaggcgtgggttcgggcgtgccattttcgttcgaggctgatggttctaatcagctcacactgatgacatctggcaaggtatctcactctgtcgcgtgggccatcggggagaatggaatcccccttattccccctctgagtcagcagaacatcggtttcagatccgctctgaaaaaagcagacgccatttcctcaataggtacaagcggcctgaccgacatgaagaagttagcaaaatgggccgcagagagtaaacttgatcccaacgatccgaataatgctccgctcatgcaattaattagtgtggccacttcaggcgagagctatgtacccgattttttccgccttgaacaactacagcaagaattcaatttcgtcagtgaccaggagttaaatcgtagcaaacgctttcggttattgcacctgagatctcaggaagtgcccgaattccgtaattacaaacaggtgccagtctacgatagagaaatcatggaaaaggtgttccaggactacgaaaaacgtctacgggacagaaatgtgattgaaactaaggagcatatcgatacccaccgcgcaattgtcgccaagtatttgcaacaagtgagggaatcggtgataaacagatttctcatcgcaaaacagtactttcttttggctgatatgatcgtggaggaagaggtacctaacattagcattctgggactgtctcttttcaaactcgctgaacagaagaggcctctgcgccctcggaggaaggggcgaaaaaaagtgacagcacagaacctgagcgatggagatattaaattactggtgaacatcgttcgggcatacgacatccctgttagaaagcccgctgtgagcaagttccagcagccctccaggagcagccgaatgttttccgaaaagcacgccgctagtcccagcacatatagtcctactcataatgcagactaccctctgggtcaggtcctcgtgaggccttttgtggaggtgagttttcagcgcacagtgtgccacacaaccaccgctgaaggccctaaccccagttggaacgaagagctggaactgccgtttagagctcccaacggggattactccactgccagcctgcagagtgtgaaagatgttgtgttcatcaatatctttgacgaagtgctgcacgacgtgctcgaagacgaccgagagagggggtcaggaattcacacgcggatcgagaggcattggttagggtgcgtcaaaatgcccttttccacaatctatttccaggcgaggttcgagagtcaggaagatgagaagcttctgcaggctacagaaaagttccaggcagagtgcgctctgaaattccctaacaggcagtgcctgactaccgtcattgacattagtggcaagacagtctttatcactagatatctaaagccccttaacccccctcaggaactgctcaacgtctaccctaacaatctgcaggcgaccgcggaactggtcgccaggtacgtctccctgatcccctttctgccagatacagtgtcatttggcggtatctgcgacctgtggtcaactagtgaccagttccttgacttgctggccggagacgaagaggagcacgccgtcctgctctgtaactattttctgagtctcggcaagaaagcctggctcctcatggggaatgcaatacccgaagggcctacagcctatgtgctgacgtgggaacaggggcgatatttaatttggaacccctgcagcggacatttctacggtcaattcgataccttctgtcctctgaaaaatgtaggctgtctcatcggcccagacaacatctggttcaacatacagcggtacgaatcccctctcagaattaacttcgatgtcacccgtcccaagctttggaagagctttttctcacgttcgctgccataccctggcctgtcaagtgtgcaaccggaggagctgatttatcagcgctccgataaggctgctgctgctgagctgcaggaccgcatagagaaaatccttaaagaaaaaattatggactggagaccacgccaccttactcgctggaatagatattgtacctccacgctgcgtcacttcttaccactcctggaaaagtcccagggtgaggacgtggaagacgaccacagggccgagctcctgaagcagctgggggactatagattctctgggttccctttgcacatgccttattctgaggtaaaaccacttattgacgcagtatacagtaccggagtgcataacatcgacgttccaaatgtcgagtttgctctagccgtctacattcacccctaccctaaaaacgttctgagcgtatggatctacgtagcctcgctgattagaaataggtag

SEQ ID NO: 218760 - DNA, 4863 bp, synthetic construct
  misc_feature 1..4863: note = Description of Artificial Sequence: Synthetic coding sequence
  source 1..4863: mol_type = other DNA
atgaatccacgagaagagaaagtgaaaatcatcaccgaagagtttattgagaacgatgaggatgctgatatgggccgtcaaaacaagaactctaaagtccgccgtcaaccaaggaagaagcagcccccaaccgcggtgcccaaagagatggttagcgagaagagtcatttgggcaatccccaggagcccgtgcaggaagaacccaaaactaggttgcttagtatgactgtccggaggggaccccgaagccttccgcctatcccctctacatcacggaccgggtttgcggagtttagtatgcgcggacgaatgagagagaagctgcaggcagccaggagcaaggctgaatccgcgttacttcaggaaattccaacacccaggccaagaaggctgcgctccccgagcaaaaaggagctggaaacagagttcgggactgagcccggtaaggaggtggaaaggactcaacaggaggtggacagccagtcatacagtcgggttaaatttcacgattcagcaagaaagattaagcctaagccgcaagttccccctggtttcccctcagccgaggaggcctataatttttttacatttaactttgatcccgaacctgagggctctgaggagaagcccaaagccaggcatagggccggaactaatcaggaagaagaggagggggaggaggaggagccccctgcccagggaggcggaaaagagatggatgaggaggagctcctgaatggagacgacgctgaggactttctacttggtttagatcatgtcgccgacgacttcgtggcggtgaggcccgctgattacgagagtatccacgaccgactgcagatggaaagagaaatgctgttcatcccctcccggcaaactgttccgacgtacaagaaactgccagaaaatgtccagcctaggttcttggaggatgagggcctttacactggtgtcagacccgaggtcgcccgtactaaccagaacatcatggagaatcgactcctcatgcaggaccctgagcgcagatggttcggcgatgatggacggatcttggctctccccaatcctattaagcccttcccgagtaggccgccagttctaactcaggagcagtccatcaaagcagaacttgaaaccctctacaagaaagcggtgaaatacgtccactcaagtcagcatgtgattcgatccggagacccaccagggaacttccagctggacattgacatatcaggactcatattcacccaccatccctgctttagccgagagcacgtgctcgcagcaaaattggcgcagctgtacgatcagtatctggctcggcaccagcgaaacaaggcaaaatttctcacagataaactccaggccctgagaaatgctgtccagaccggcctcgaccctgaaaaaccccatcagtcacttgacaccattcagaaaacaatcaacgaatataaatccgagattagacagacacggaagttcagggacgctgagcaggaaaaggaccggacgttgctgaagaccattatcaaggtgtggaaggagatgaaatccctgagggagtttcaacgattcacaaacaccccgctgaaactggtcttgagaaaggagaaagcggatcaaaaagctgacgaagaagcgtatgaagctgagattcaagctgaaatctccgagctcctcgaagaacatactgaagagtacgcgcagaaaatggaagaatatcgaacaagtcttcaacagtggaaagcgtggcgtaaggtgcagagagccaaaaaaaaaaaaaggaaacaggccgcagaagaacaccccggagacgaaatcgccgagccctaccctgaggaggacctcgttaagccttcaccgccagaacccaccgatagggccgtgatcgagcaggaggtgcgggaaagggccgcacagtctagacgcaggccctgggagcctactctggttccagagctgtcattggcgggatctgtcactcccaacgaccagtgcccccgagcagaggtcagtcggcgagaagatgtcaagaagcggagcgtgtatctcaaggtcctattcaacaataaggaggttagtcggaccgtttcccgaccgctgggagcagatttccgagttcatttcggccaaattttcaacctgcagatagtcaattggccagagtccctcactctgcaagtgtatgagaccgttgggcactcatccccaacgctgctggccgaggtcttcctgccaatccccgaaactacagttgtaactgggagggctcctaccgaggaggtggagttttctagcaatcagcatgttacactcgaccatgagggtgtggggagcggggtccccttcagttttgaagccgatggctcaaaccagctcaccctgatgacctctgggaaggtttcccattccgttgcatgggccattggggaaaacgggatccctttaattccaccattgtcacagcagaatattgggttccgatccgccctcaagaaggctgatgcaatttccagcattggcacaagcggcctaacggacatgaaaaagcttgccaaatgggctgctgagagtaaactagaccccaacgacccaaataatgctccattgatgcagttgatctctgtggccacatcgggcgagagctatgttcccgacttttttcggctggagcaattgcaacaggagtttaattttgtctcagaccaggaactgaataggagcaagagatttagattgctccacctgagaagtcaggaggtgcccgaattccgaaactataagcaggtgccggtgtatgatcgcgagattatggagaaagtgtttcaggattacgaaaagcggttacgagaccgcaacgtcatcgagaccaaagagcacatcgatactcatcgagctatagtggcgaaatatctgcagcaggtccgcgagtccgtgatcaatcgatttctgatcgccaagcagtattttctgctcgctgacatgattgtggaggaggaagtgcccaatatatccattctgggtttgtccctatttaagctggctgaacagaaacgaccgcttcggcctcgcagaaaaggcagaaaaaaagtcaccgcacaaaacctgtccgatggagacattaaacttcttgtgaacattgtgcgcgcatatgacataccagtgcggaagccagctgtgagcaaattccagcagccgtcccgctcttcacgtatgttttccgaaaagcatgctgctagccccagtacatactcaccaacgcacaacgcagactatcctctgggccaggtcttagtgaggccattcgtggaggtctccttccagaggaccgtatgtcataccacaactgcagaaggccctaatccctcatggaacgaagagttggaactacctttcagagctccgaatggcgactatagcactgcgagcctgcaaagcgttaaggacgtggtgtttattaacattttcgacgaggtcctacacgacgtcctagaagacgatcgagagagaggctcgggcattcacactagaattgaaagacactggctgggctgcgtgaagatgccttttagcaccatctattttcaggcacgaatagacggcaccttcaagattgacatccctcccgtcctgttgggctatagtaaggagaggaatatgatcctggagagaggttttgactctgtgaggagcctgtcagaaggctcttatattaccctgtttataacaatcgagccgcagcttgtgcctggggagtcaattcgggagaagtttgaatcacaggaggacgagaaactgctgcaggctactgagaagttccaggctgagtgtgcactgaaatttcctaacaggcagtgcctgaccacagtaattgatatctctggaaaaacagtgtttattaccagatatctgaaacccctcaatccacctcaggagttgctgaatgtataccccaataatctgcaggctacagcagagctagtcgcacgatacgtctcactgatccccttcttaccggacaccgtcagcttcggaggcatctgtgacctgtggagtacaagcgaccagttcctcgatctactcgctggtgatgaagaggagcacgccgtcctattgtgcaattacttcctgagcctcggaaaaaaggcatggctgctgatgggcaacgctattcccgagggccctaccgcatacgtgctcacgtgggagcaggggaggtacctcatctggaacccctgctcgggccacttctatgggcaattcgatactttctgtcccctcaaaaacgtcggttgtttaattgggccagacaacatatggtttaacatacaacgatatgagagcccccttcggataaacttcgatgttacacggccaaagttgtggaaaagttttttttcacgctcgctcccctatcccggtctgagctcggtgcaacccgaggagctcatttaccagaggtctgacaaagcggctgctgccgagcttcaagacagaatcgagaaaatcttaaaagagaaaatcatggattggaggcccagacacctgacccggtggaatcgatactgcaccagcaccttaagacatttcctccctctcctggaaaaatcacaaggagaggacgtggaagatgaccacagagccgaattgcttaagcagttaggggactaccgctttagcggcttcccactgcacatgccctattccgaagtcaagccgttaatcgatgccgtatatagcaccggggtgcataatatagacgtacccaatgtggagtttgcattggctgtgtacatccacccctacccaaagaatgtgctcagcgtgtggatctacgtggccagcctgattcgcaataggtag

SEQ ID NO: 218761 - DNA, 4863 bp, synthetic construct
  misc_feature 1..4863: note = Description of Artificial Sequence: Synthetic coding sequence
  source 1..4863: mol_type = other DNA
atgaatccacgagaggagaaggtcaagattattaccgaggaattcatagagaatgacgaggatgccgacatggggcgtcagaataaaaatagcaaggtgcgtaggcagccacgcaaaaagcagcctcctacggctgtacccaaagagatggtttctgagaaaagtcacctgggcaacccccaggaacccgtccaggaagagccgaagacccggttactcagcatgactgtccggagaggcccaaggagcctacctcctatcccatctacaagtagaacgggtttcgcggaattctctatgagaggacgcatgcgcgaaaagctacaggcagcaaggtcaaaggccgaatcagctctcctgcaagagatccctactcctcggcctaggcggctgagatccccatctaaaaaagagctcgagacggagttcggaacagaacccggaaaggaagtggaacggacccagcaagaggtggactctcagagctatagtcgcgtaaaattccacgacagtgctcgcaagataaagcccaaacctcaggtccccccagggttcccttctgctgaggaagcttataatttcttcacctttaactttgatccggaaccagagggctcagaggagaagccgaaggctagacaccgcgcaggaaccaatcaggaggaggaggaaggcgaggaggaggagcccccagcccaaggcggaggaaaagaaatggacgaggaggaactgctgaacggagatgacgcagaggactttctgctgggactggaccacgtggcagacgacttcgtggcggtgaggcccgcagattatgaaagtatccatgatcgtcttcaaatggagagggaaatgctgtttatcccgtctagacagacagtgccaacctacaagaagttacctgaaaatgtgcagccacgatttctagaggacgagggcctgtacaccggagtccggccagaggtggcacgtaccaaccagaacatcatggagaaccggctgcttatgcaggatcctgagaggcgatggttcggggacgatgggaggatcttagccctgccaaatccgataaagcctttcccctcccggccacccgtgttaacacaggagcagtcaataaaagcggaactggagaccttatacaaaaaggcagtgaaatatgtgcacagttcacagcatgtaattcggtcaggggatcccccagggaactttcagctcgacatcgatatctctggattgatctttacccaccacccttgtttcagtagagagcatgttctggcagccaagttggcgcagttgtatgaccagtaccttgcacggcatcagcgtaacaaggcgaagttccttacagataaactacaggctctccgcaatgcagtgcagacagggctcgatcctgaaaaaccacaccaaagtctggacaccatccagaagacgatcaacgagtataagtccgaaattcgacagactcggaagtttcgcgatgctgaacaagagaaagaccggactctcttaaaaaccattataaaggtgtggaaagaaatgaagtctcttagggagtttcagaggtttaccaatactcctctcaagctagtactgaggaaagagaaagccgatcaaaaggcggatgaggaggcatacgaggccgagatacaagcagaaattagtgagcttctcgaagagcacacagaggaatacgcccaaaagatggaggagtatcgcacaagtctccagcaatggaaagcatggcgcaaagttcagcgcgctaagaagaaaaaaaggaagcaagccgctgaagagcacccaggcgacgaaatagctgagccttaccccgaagaggatctggttaaaccatcccccccagagcctacagatcgcgctgtgattgaacaggaagttagggaacgggcagcacagtctaggaggcgaccctgggagcccaccctggttcccgagctcagtctcgctggctccgtcacccctaatgaccagtgtccgagagccgaagtgtctaggcgcgaggatgttaagaagaggagtgtctacctgaaagtgctcttcaacaataaagaggtgagcaggacagttagccgaccactaggagctgactttcgtgtacacttcggacagattttcaacttacagatagtcaactggccggaatcactgacccttcaggtgtatgaaacagtaggacactcgtctcctaccttactcgcagaagtgttcctccctattccagaaacaaccgtggtgacaggccgtgcaccaacagaagaagtcgagtttagttcaaatcaacatgtgacactggaccacgaaggtgttgggtcgggagtgcctttctccttcgaggccgacgggtctaaccaactgactttaatgacttccgggaaggtgtcccactctgtggcttgggctatcggagagaacggcatccccctcataccgcctctgagccagcagaatatagggttcaggagtgccctgaagaaggcggatgctataagctcgattggcactagcggcttgacagacatgaagaagttggccaagtgggctgccgagagcaagttggacccaaacgaccctaacaacgccccactgatgcagctgattagcgtcgctacttccggcgagtcttatgtgcccgattttttcagactagagcagctccaacaggaatttaattttgtgtcagaccaggaacttaataggagtaagaggtttagacttttacacttaaggagccaggaggttcctgaatttcggaattacaagcaggtgcctgtgtatgatcgtgagatcatggagaaggtgttccaggactacgaaaagcgcctgcgcgaccgcaacgtgatcgagaccaaagagcacattgacacccatagagccatcgtcgctaaatacctacagcaggttagagagtctgtcataaatagatttctgattgctaaacagtatttcctcctggcagatatgatcgtggaggaagaggtccctaacatctcgattttggggctaagcctgtttaagctcgccgagcagaagcggccacttcggcctagacggaagggcagaaagaaagtgacagcacagaatttgtctgacggagacatcaagctgctggtgaatatagtcagggcgtacgatattcccgtccgtaaaccagcagtgtctaaattccagcaacctagtagatcatcacggatgttctctgagaaacatgcagccagtcccagcacctacagcccaacccacaatgctgattatcctctaggtcaggtgctggtgcgcccatttgtcgaggtgtcatttcaaaggacagtgtgccacaccacgactgcagaaggccctaatccatcttggaatgaagaactggagctgccctttcgtgcaccaaacggcgattactccaccgcgtcacttcagtccgtgaaagacgtggtctttatcaatattttcgacgaggtcctccacgacgtgctggaggacgatcgtgagagaggatctgggattcatactaggattgagaggcactggttaggctgcgttaaaatgccgtttagcacgatttacttccaggctagaattgatggcacatttaaaattgatatcccgcctgttctcctgggctactcaaaggagcggaatatgatcctggagaggggtttcgattccgttaggtccttgtctgagggaagctacattaccctattcataaccatcgaacctcagttggtgcctggtgagtcgattagagagaagttcgagtcgcaggaggatgaaaaacttctgcaggcaacagagaagttccaggctgagtgcgccctcaagtttcccaatcgacagtgcttgaccactgtgatcgacatttccggcaagaccgtattcatcactcggtacctgaagcctctcaaccctccacaagaattgctgaacgtgtacccgaacaatctacaagccacagctgaactggtggcacggtacgtgagcctgataccattcctgccagacaccgtgtcttttggcggaatttgtgacttatggtcaacatcagaccaatttttggaccttctggccggtgacgaggaagagcacgccgtgctgctctgcaactacttcctgagtctcggcaagaaagcttggctcttgatgggaaatgctatccctgagggtcctactgcctacgtgttaacttgggagcaggggagatacttgatctggaatccttgttccggacacttttacgggcagtttgataccttttgtccgctgaaaaacgttgggtgtctcatcggtccagataacatctggtttaatattcaacgttatgagagccctttacgaatcaacttcgacgtgacccgaccaaaactatggaaaagcttttttagtcgatcactgccataccctggcctctctagcgtccagccagaggagctgatttaccaacgcagtgacaaggcggctgctgctgagttgcaggaccggatagagaaaatactgaaagaaaagataatggattggcgccctcgtcatttaactcggtggaatcggtattgtacttctacactgagacactttctgcccctccttgaaaagtcacagggagaggatgtagaggacgatcatcgagcggaactgctgaagcagctcggggactaccgtttttcagggtttcccctacacatgccctactccgaggttaaacctctgatagacgcagtgtatagtactggtgtccacaacatcgacgtcccaaacgtggagtttgcactggcagtgtacattcatccttacccaaaaaacgtgctgtccgtttggatatacgtggcctcactgattagaaatcgatag

SEQ ID NO: 218762 - DNA, 4539 bp, synthetic construct
  misc_feature 1..4539: note = Description of Artificial Sequence: Synthetic coding sequence
  source 1..4539: mol_type = other DNA
atggtttccgagaagtcgcatttggggaatccccaggagcccgtgcaggaagaacctaagaccaggctattaagtatgacagttagacgcggaccacggagcctgcctcccattccttcaacatcccgaacaggctttgccgagttcagtatgaggggccgaatgagggaaaaactgcaggctgcgagatccaaagccgagtcagctttgctacaggagattcccaccccccgacctaggcggttgaggtctccatccaagaaggagttggagacagagttcggtactgagcccggaaaggaggtggaaaggactcagcaggaggtggactctcagtcgtattccagagtgaagtttcacgacagcgcaagaaaaatcaaaccaaaacctcaggtaccgcctggcttcccttccgcagaggaggcgtacaacttctttacatttaattttgatcccgagcccgaaggatcggaggaaaaacctaaggcaagacaccgtgcaggcaccaaccaggaagaagaggaaggtgaggaggaggagccacctgcccagggcggtggaaaggaaatggatgaggaagaacttttgaacggggatgacgccgaagacttcttgctggggctggaccacgtggccgatgacttcgtcgcagtcagaccggctgattatgagtcgattcatgatcggttgcagatggagagagaaatgctgttcatcccatcccgccaaacggtacccacctataagaaactgccagagaatgtgcaaccccgttttttggaggacgagggactctacacaggtgttcgccctgaagttgctaggacaaaccaaaacatcatggaaaatcggctgctgatgcaggacccggagcgccgttggtttggcgatgacggacgtattctcgcccttcccaatcctattaagccctttcctagcagacctccagtcctgacccaagagcagagcatcaaggcagagctcgagaccctgtataaaaaggcggtgaaatacgtgcattcgtctcaacatgtaatccggagcggtgatcccccagggaatttccaattagatatcgacatcagtggcctgatcttcacccatcatccttgtttctcaagggagcatgtgctagccgctaaactggcccagctgtatgatcagtacttggcccgacaccaaaggaacaaggcgaagttcctcaccgacaagctgcaggcgctgcgaaacgctgtgcagactgggctagaccccgaaaaacctcatcagtcccttgatacgatccagaaaaccataaatgagtacaagagcgagatccgccagactagaaaattccgagatgctgagcaggagaaagatagaacactgttgaaaacaattatcaaggtgtggaaagagatgaaaagtctgagagaattccagcgatttactaatacaccactgaaactcgttctccggaaagaaaaggccgaccagaaagcggacgaggaggcttacgaagctgaaatccaggctgagattagcgaactgctggaggagcacactgaggagtacgcacaaaagatggaggaatataggacctccctccagcagtggaaagcatggcggaaggttcaacgcgctaagaaaaaaaagcgaaaacaggccgctgaggagcaccctggcgacgaaatcgctgaaccctatccggaggaggacctggtaaagccttcacctccagagcccactgaccgggctgtgatcgaacaggaggtacgggaacgcgctgcgcagtctaggagacgtccttgggagccaactctcgtgccggaactttctctggcgggaagcgtgacgcctaacgatcagtgtccgagagcagaagtgtcccgcagggaggacgtgaagaaacgcagtgtctacctaaaagtccttttcaataacaaggaagtgtctcgcaccgtcagccggccattaggcgcagattttcgcgttcacttcggacagatctttaacctgcagatcgtgaattggcctgaaagtttgactttacaggtctatgaaacagtcggccactccagcccaaccttgctcgccgaggtctttttgccaatacctgagacgacagtggtgactggtcgggctccaaccgaagaagtcgagttctctagtaaccagcacgtgactctggaccatgagggtgtgggaagtggcgtaccctttagctttgaggccgatggatcgaaccagctcaccctaatgacttccgggaaggtgagccactcagttgcctgggctattggtgagaacggtatccccctgattcctcctttgtctcagcagaatattggcttcaggtctgccctgaagaaggctgatgcgatatcgtcaatcggtactagtggccttacagatatgaagaagctggccaagtgggcagctgagtcaaaacttgatccaaacgatccaaataatgccccactgatgcaacttatctcagtggccactagtggagaatcatacgtgccagatttctttcggttggagcagctgcaacaagaattcaattttgttagcgatcaggagctgaatcgtagtaagcgatttcgattgctgcacctgcgttcccaggaggttcctgagttccggaattacaagcaagtccccgtttacgacagggagattatggagaaagtatttcaggactatgagaaaaggctgcgtgataggaacgttatcgaaacaaaagagcacatcgacacccatagagctatcgtggctaaatacctgcaacaggtgcgggagagcgtgataaacagatttcttattgctaagcaatacttcctgctggcggatatgatcgtagaggaggaggtgccaaacatttccatcctggggctgtcactattcaagttagctgagcagaaaagaccattgcgccctagacggaaggggcgaaagaaggttacggcacagaatcttagtgatggtgatattaagctgctagttaatatcgtgcgggcttatgacatcccggtgagaaagccagccgtgagcaagttccagcagccctcccgatcttctcggatgttctccgagaaacacgccgcatcaccaagtacatacagtcccacccacaacgccgactatcctcttgggcaggtccttgttcggcctttcgtcgaagtgagcttccagcggaccgtatgtcatacaacaacagccgaagggccaaatccaagttggaacgaggagttggaactgccatttcgagcccctaacggggactactcaacagcatcccttcagagcgtgaaagatgtcgtgtttataaatatttttgacgaagtcctgcacgacgtactggaagacgatagagagcgtggatcaggcatccatacaagaattgagcgccactggttaggttgcgtaaaaatgccattctccaccatttactttcaagctcgattcgaaagccaagaagatgagaagcttcttcaagcaacggaaaaatttcaggctgagtgtgctctgaaatttccaaaccggcagtgccttactacagtaattgatatctccggaaagacggtgttcatcactcgatacctcaaaccgctgaaccctccacaggagctgctaaacgtctaccctaataacctacaagcgacagccgaactcgttgcaagatacgttagtctgatcccgtttctgccagatacagtgtcttttggaggtatctgcgacctatggtccacgtctgaccagtttctagacttactggccggtgacgaagaagagcacgccgttctcctgtgtaactacttcctatcgttgggcaagaaggcttggctcctgatggggaacgcgatacccgagggaccaactgcctatgtcctaacatgggagcaggggagatatttaatctggaacccatgttccggacacttctacggccagttcgacacgttctgtccgctcaagaacgtgggatgtctgatcgggcctgataacatatggtttaatattcagaggtacgaaagccctttgcgcatcaacttcgatgttacacggcctaagctctggaagagttttttttctaggtctctcccctaccctggcttgagctcagttcagcctgaagaactgatttatcaaaggagcgacaaagctgccgcagctgagctgcaggaccgcatcgagaagatactcaaggaaaaaattatggattggcggccacggcatctgaccaggtggaatagatactgtactagcactctcaggcacttcctgccactcctggagaagagccagggagaggacgtggaagacgaccacagggcagagctgctgaagcagctcggggactacaggtttagtggcttccctctgcatatgccctactccgaggtgaagcctttaatagatgcagtgtatagcactggtgtgcacaacatcgatgttcccaatgtggagttcgcattagccgtgtacattcacccatatcctaaaaacgtccttagtgtgtggatctacgtggcctcactgatcaggaataggtag

SEQ ID NO: 218763 - DNA, 369 bp, synthetic construct
  misc_feature 1..369: note = Description of Artificial Sequence: Synthetic coding sequence
  source 1..369: mol_type = other DNA
atgaaccccagggaggaaaaagtgaagataatcacagaagagttcatcgaaaacgacgaagatgccgacatgggccgacagaacaagaatagcaaggtacgaagacagcctaggaagaagcagaagccgacgcccttctccagagcctgctggcagatcttgccacatctctctgctggcgttcctcttctcggttgggaacatcccgtgcagggcaaaagctttcaagctacaaactgctgtccccagggcaatggagtgcgaaagattcccccatggcagcccccaggggcatgtgccggaggcgcacaggatccaccccctgagtacgacagccccgagaggcctaccgagcgggctggctgttag

SEQ ID NO: 218764 - DNA, 4863 bp, synthetic construct
  misc_feature 1..4863: note = Description of Artificial Sequence: Synthetic coding sequence
  source 1..4863: mol_type = other DNA
atgaacccaagggaggaaaaagtgaagatcataaccgaggagtttattgaaaatgacgaggacgccgacatgggtagacagaataaaaatagcaaagttcggagacagccaaggaagaaacagcctcctactgctgttcctaaggagatggtgtccgagaagtctcatctaggcaatcctcaggaacctgtccaggaggaacccaagactcgccttctctcaatgaccgtgaggagaggccctcgtagcctgcctcctataccgagtaccagtcgcacaggctttgctgagtttagcatgaggggacgaatgcgagaaaaacttcaagccgcacggtccaaggctgaaagtgcgctgttgcaggaaatacccaccccaagaccacgtaggttgagaagcccctcgaagaaagagctggaaacagaatttggcactgaacccggaaaagaggtggagcgcacccagcaggaggtggattcccagagctacagtagggttaaatttcacgactctgcccgaaaaatcaaacctaagccacaagtgccaccgggatttcctagtgctgaagaggcctataattttttcactttcaactttgacccggagcctgaagggtctgaggagaaacccaaggcgaggcaccgggcagggacgaaccaagaggaggaagagggtgaggaggaagaacctcctgctcaaggcggagggaaggaaatggatgaagaggagctgctcaatggggatgacgcagaagactttcttctgggtctggatcacgtggcggacgattttgtggccgtacgtccagctgactacgagtcaatccacgatcgcctgcaaatggaacgcgaaatgctttttattcctagccggcagaccgtccctacttacaaaaagcttccggaaaacgtgcaacccagatttctcgaagatgaggggctgtacaccggcgtgaggcccgaggtagcccgaaccaatcagaacattatggagaacaggctgctgatgcaggaccccgaaagacgttggttcggtgacgacggccgtattctggctttaccgaatcccatcaaaccattcccctccagacccccagtcctgacccaggagcagtctataaaagcagaactcgagactctatacaaaaaggcagttaaatatgtgcattcatctcagcatgttattagatcaggggacccccctggaaactttcagttagatatagatattagtggtctgatcttcactcatcatccatgtttctctagagaacatgtgttggctgctaagctagctcaactttatgaccaatacttggccagacaccagcgcaacaaggcgaaatttctcactgataagctgcaggcactaagaaacgccgtccagacaggtctagatccagagaagccccatcagtccctagacactatccagaaaaccataaatgagtataagagcgagattcgacagacacgcaaattccgtgatgcagagcaggagaaagataggacactgctgaaaaccattatcaaggtttggaaagaaatgaagagtcttcgcgagttccagaggttcacaaatacccccctgaagctggttctcaggaaggaaaaggccgaccagaaagccgacgaagaggcttacgaagccgagattcaagccgagatcagcgagttgctggaagaacacactgaagagtacgcacaaaaaatggaggaatataggacaagcctccagcagtggaaggcttggcggaaagtgcagagggctaagaaaaaaaaacgcaaacaggccgcagaagagcacccaggagatgagatcgccgaaccatacccagaagaagatctggttaaacccagccccccagaaccaactgatagggctgtgatcgagcaggaggtgcgggaaagggctgcccagtctcgacgccgaccctgggaacccacacttgtcccagagttatcattggctggtagcgtgaccccaaacgatcagtgcccgagggccgaggtgagccgcagggaagacgtgaaaaagagaagcgtctatttaaaagtcctgttcaataacaaagaggtttctaggaccgtgtcacgacctttaggggctgattttagggttcattttgggcaaatttttaacctgcagatcgtgaactggcctgaatccttgaccttacaggtttatgaaacggtcggccacagctcacccacactcctggcagaggtctttttgccaatacccgaaaccaccgttgtgaccgggagggctccaaccgaggaggttgagttctcctccaaccaacatgtgacgctggatcatgagggagtcgggagtggcgttccattttcttttgaggcggacggatctaaccaactgaccctgatgacatctggcaaggtgagccatagcgtcgcctgggcgatcggcgaaaacggcatccccctgatccctcccttgagccaacagaatattggattccggagcgcactcaaaaaggccgacgccatctctagtatcggcacatcagggttgacggacatgaagaagcttgccaaatgggccgctgagtcgaagttagatcctaatgaccccaataacgctccactcatgcaactcatctccgtcgccacttctggcgagtcatacgtgccagatttctttcggttagagcagctgcagcaggagtttaactttgtctcagatcaggagctgaaccgctctaagcgattcaggctccttcaccttaggtcccaggaagtgccggagttcagaaattacaagcaggtgcctgtatatgaccgagaaattatggagaaagtgttccaggactacgaaaagcgccttagagataggaacgtgatcgagacaaaggaacacatagacacacatcgggctatcgttgctaaatacctacagcaggtgcgggagagtgtgatcaatcggtttctgatcgccaaacagtactttctcctcgcggatatgatcgtggaggaggaagtgcctaacatctccatcctgggcttgtcactcttcaagttagctgagcagaagaggccattgagacccaggcggaagggccgtaagaaagtaaccgcacaaaatctgagcgacggggacatcaagcttctcgtgaatatcgtcagagcatatgatataccagtcaggaaacccgctgtttccaagtttcagcagccgtccagaagctcacgtatgtttagtgaaaagcatgccgcttctccttccacttatagtccaacccacaatgcggactaccccctcgggcaggtgctcgtgcgcccttttgtcgaggtgagcttccaacggaccgtctgtcatacaaccaccgcggaaggcccaaatccttcctggaacgaggagctcgaactgcccttccgggctcctaatggtgactatagcactgcctcactgcagtctgtgaaagatgtcgtgttcatcaatatcttcgatgaggtgctgcacgatgtgctagaagacgacagggagagggggtcagggatccataccaggatcgaaagacactggctgggctgcgtgaagatgccattttctacgatctatttccaggccaggatagacggaaccttcaaaatcgacatcccccctgtcttgcttggttactcaaaagaaaggaacatgatccttgagcgaggctttgactcggtccgtagtctaagcgaaggaagttatatcaccctgttcataaccattgagccccaattagtacctggggagtccattcgggaaaagttcgaatctcaggaagatgaaaagctacttcaagccactgagaagtttcaagctgaatgtgctttaaaattccccaatcgtcaatgtctcactacagtgatcgatatctccggaaagactgttttcatcacacgctatcttaaaccactgaatccccctcaggagctgcttaacgtctaccccaataatcttcaagctacagcagagctagtggccaggtatgtttcactcattccgttcctgcctgacacagtgagctttggcggaatatgtgacctgtggagcacctctgatcaatttctggatctgctggccggtgacgaggaagaacacgccgtcttgctgtgtaattatttcctttccttgggcaagaaggcctggctgttaatgggtaatgcgattcctgagggacccaccgcctatgtactgacttgggaacagggaaggtatctaatctggaacccgtgtagtggccacttctatggccagttcgatactttctgcccactcaaaaacgttggatgtctgattggccctgacaacatttggttcaacattcagcgttacgagtcccctctgagaatcaactttgacgtaaccagacccaaactctggaagagctttttttccagaagcttgccatacccagggctaagttccgtccagcccgaggaacttatttatcaaaggtcggataaagctgccgcagcagaactgcaggacaggatcgagaaaattctcaaggaaaaaatcatggattggaggcccagacatctgactaggtggaatcgctactgtacaagcaccctgaggcatttccttcctcttctggagaagtcccagggggaagacgtggaggatgaccatcgcgctgagctgcttaagcagctgggcgactacaggttctctggcttcccgctccatatgccctattctgaagtcaaaccgctaattgacgcggtgtattctaccggagtccataacattgatgttccaaacgtggagtttgcgctggcagtgtatatccacccttaccctaagaacgtgttatccgtgtggatttacgtagcttccctgattcgaaaccggtag

SEQ ID NO: 218765 - DNA, 369 bp, synthetic construct
  misc_feature 1..369: note = Description of Artificial Sequence: Synthetic coding sequence
  source 1..369: mol_type = other DNA
atgaatccaagggaagaaaaagtcaagattatcaccgaggagtttatagagaacgatgaggatgccgacatgggcagacagaataagaatagtaaggttcgtcggcaaccacgcaagaagcaaaagcccacccccttttctagggcttgctggcagatactgcctcatttaagcgcaggcgtcccgctgcttggttgggagcaccctgtgcagggtaagtcatttcaagcgactaattgctgccctcaaggtaacggcgtgcgaaaaatcccaccctggcagcccccaggcgcatgcgccggtggagcccaagatcctccgccagagtatgactctcctgaacgacctactgaacgggctggatgctag

SEQ ID NO: 218766 - DNA, 4539 bp, synthetic construct
  misc_feature 1..4539: note = Description of Artificial Sequence: Synthetic coding sequence
  source 1..4539: mol_type = other DNA
atggtgtcagaaaagtcccatctcggcaacccacaggaacccgtacaagaagagcccaagaccaggctgctgagcatgacggtccggcgaggaccaagatccctacctcctataccttctaccagtcgcacagggttcgccgaattctcaatgcgtgggcgtatgagggaaaaactccaggcagcacggtcaaaggcagaaagcgcactcctgcaggagatccctacaccacgtcctcggaggttacgtagtccctccaaaaaagaactggagacagaattcggcacagaacctggtaaggaggtggagcggacacagcaggaggtggactctcaatcctactccagggtgaagttccacgatagcgccaggaagattaagccgaagcctcaggtgcctcccggatttccatctgccgaggaggcatacaactttttcacattcaacttcgatccggaaccagaaggtagcgaagagaaaccgaaagcgcgacacagagctgggacaaaccaagaggaagaggaaggcgaggaagaggagcccccagcccagggtggcggaaaggagatggacgaggaggagttgctgaacggtgatgatgctgaggatttcctgctcgggctcgatcacgtcgcagacgacttcgtggcggtcaggcccgcagactatgagagtatccacgatagattacagatggagcgcgaaatgctattcattccttccaggcagaccgtacctacatataagaagttacctgagaacgtgcagccccgtttcttggaggatgaggggctgtacaccggcgtacgacccgaggttgcacggacgaatcagaatatcatggagaataggttgctgatgcaggatccagaacggagatggttcggtgatgacgggaggatactcgccctgcccaatcctatcaaacctttccccagccggcctcccgttctgacccaggaacagagcatcaaggccgaacttgagacgctgtataagaaagccgttaagtacgtgcactcatcacagcacgtaattagatcaggagaccccccagggaatttccagctagatattgatatatccggcctcatatttacccatcatccctgcttcagtcgcgagcacgttctggccgctaaacttgcccagttatacgaccagtatctcgcccgtcaccaaagaaacaaggctaagttcctcaccgataaattacaagcattacgcaatgcagtccagactggactcgatcccgaaaagcctcaccaatctttagataccattcaaaaaaccattaatgagtacaaaagcgagatcagacaaaccagaaaatttcgtgatgcagagcaggaaaaagatcggacgctgctgaaaactatcattaaggtctggaaggaaatgaagagcctccgggagtttcaacgcttcaccaatactccgctgaagcttgtgctgcggaaagagaaagctgatcagaaggccgacgaggaggcttacgaagcagagatacaggctgaaatctccgaattgcttgaggagcacaccgaggagtacgcgcaaaagatggaagagtatcggacttcactacagcagtggaaagcctggagaaaggtgcaaagagccaagaagaaaaaacgcaagcaagccgcagaggagcaccctggcgacgagattgccgagccttatccagaggaggatttggtaaaaccgtccccccctgaacctacagatagagcagtgatcgagcaggaagtgcgagagcgtgccgcacagtcgcggagaagaccctgggaaccaacattagttccagaattgagcttggcaggcagcgttacacctaacgatcagtgccccagggccgaagtctcacgaagagaagatgtcaagaagcgttccgtgtatctgaaagtgctgtttaacaacaaggaagtgtctagaactgtaagcagaccactgggcgctgactttcgggtgcacttcggccagatcttcaacctccagatcgtaaactggccagaatcattgacattgcaggtgtatgaaaccgtggggcactcctcacctacgctcttggccgaggtctttctccccattcccgaaacaacagtcgtgacgggcagggcgcctaccgaagaggttgagtttagttctaaccagcatgtgacactggatcatgagggggttggaagcggcgtcccattctcgttcgaggccgatggttccaaccagctgacactgatgacatccggcaaggtcagccattccgttgcctgggccataggagagaatggtatccccctgattccaccacttagtcagcagaacatcggtttccggagcgctctgaagaaggccgatgccattagcagtatcgggacatctgggctgaccgatatgaagaagctggccaaatgggccgcagaaagcaaacttgacccgaatgaccctaacaatgcaccattaatgcagctgatttcagtcgccacctctggagagtcatatgtcccagacttctttcggctggaacagttgcagcaggagttcaactttgtgagcgaccaggagctcaatcgctccaagcgctttagattgttgcacctgcggtcccaggaagtgcctgagttcaggaactataaacaggttcctgtgtatgatcgtgagattatggagaaggtgttccaagactatgagaaaagactgcgtgatcgcaatgtcatcgaaacaaaagaacacatcgacacacatcgagctatcgtggctaagtacctccagcaagtgagagagtctgttatcaacaggtttctgatagcaaagcagtacttcctgctggccgacatgatagtggaagaggaggtgcctaatatctctatactgggcctgagtctgttcaagctggctgagcagaagaggccactacggcctaggcgaaaaggccgaaagaaggtgacggcccagaatctgagcgatggcgacatcaagcttcttgtcaatattgtcagggcatacgatattccagttaggaagccagcggtttctaagtttcagcagccatccagatcctcccgtatgttttcagagaaacacgctgcaagcccttcaacctattcacctacccacaacgctgattatcctctagggcaggtcctggtgaggcccttcgtggaggtgtcttttcaacggacagtatgccatacaactaccgcagaggggccaaatccgagttggaatgaggagttggagctaccctttcgggctcccaacggcgactattcaaccgccagtctacagtctgtcaaggatgttgtctttatcaacattttcgatgaagtgttgcacgatgtgctggaggatgatcgggagagaggtagtggcatacacaccaggattgagcgccactggttgggctgcgtcaagatgcctttctctactatttacttccaagccagatttgaatcccaagaagatgagaaactgctgcaggccactgaaaaatttcaggcggaatgcgcactgaagttccccaaccgccagtgccttaccactgttatcgatatctccggcaaaaccgtctttattacacgataccttaaacccttaaaccctccgcaggaactgcttaacgtgtaccccaacaacctccaggccacagctgagctggtagcccgatacgtaagtttaatcccctttctgcccgatacagtctcctttgggggtatctgtgatctttggtcgactagcgatcagttccttgaccttctggctggtgacgaggaggaacatgccgtactgctctgtaactacttcctgagtttaggcaagaaagcatggctcctgatggggaacgctatcccagagggccctacagcatacgttctaacctgggaacagggaagatatctcatctggaacccatgttctggtcacttctatgggcaatttgacaccttttgccctctgaagaacgtcggctgcctgataggacccgacaatatttggtttaatattcagagatatgagtccccattgcggattaatttcgatgtcacacggcctaaactgtggaaaagctttttttctcgcagtttgccctatcccggtttatcttccgtgcaacctgaggagctgatctaccagcggtctgacaaggccgcagctgctgaactgcaggataggatcgagaagattctgaaagagaagataatggattggcgccctaggcatttgacaaggtggaatcggtattgcacctcgactctgaggcatttcttgcccttgctggaaaagagccagggagaagatgtcgaggatgaccatcgggctgagctgctaaagcagctgggggactaccggttttccggattcccgttgcatatgccttacagcgaagtgaaacctctaattgatgccgtgtactccacgggtgtccacaatatagacgtgcccaacgtggagttcgctctggcggtgtacatacacccatatcccaagaacgtgctaagcgtctggatctacgtcgcctcactgatcagaaaccggtag

SEQ ID NO: 218767 - DNA, 369 bp, synthetic construct
  misc_feature 1..369: note = Description of Artificial Sequence: Synthetic coding sequence
  source 1..369: mol_type = other DNA
atgaacccaagggaggaaaaggtgaaaatcatcacagaagaattcatcgaaaatgatgaggatgctgacatgggcagacaaaacaagaactctaaggtgaggagacaaccgagaaaaaaacagaaacccacccccttcagccgggcatgctggcagattctgcctcaccttagtgccggagtgcctctgctgggctgggaacaccccgtgcagggaaagtcttttcaggcaacgaattgctgtccacaaggcaacggcgtgaggaaaatcccgccttggcaaccccctggagcctgtgccggtggagcccaagaccccccaccagagtatgacagccctgagaggcctacagaaagggccggatgctag

SEQ ID NO: 218768 - DNA, 1767 bp, synthetic construct
  misc_feature 1..1767: note = Description of Artificial Sequence: Synthetic coding sequence
  source 1..1767: mol_type = other DNA
atgaatccacgagaggaaaaggtgaaaataatcactgaggaattcatcgaaaacgacgaggatgcggacatgggacgacagaataaaaactccaaggtcagacgtcagcccaggaagaagcaacccccaacagctgttcccaaagagatggtgtcagagaagagtcatctgggaaacccccaggaaccagtgcaggaagagcccaagacaaggctcctttcaatgacagtgcgccgtggaccaagatctctgcccccaattccttcaacctcccggacaggcttcgcagaattctccatgagggggcgaatgcgggagaagcttcaggcagcacgctcgaaagccgagagcgctctgctccaggagattcccacacccagacctagacgcctgcgctcccctagcaagaaggagcttgaaaccgagtttggaacggagcccggtaaagaagtggaacgtacccagcaggaagtcgactcgcagagctattccagagtgaagttccatgacagcgcaagaaagatcaagcctaaaccacaggtccccccaggttttccgtccgcagaggaagcatacaatttcttcacttttaatttcgatcccgaacctgagggcagcgaggagaaacccaaagcgcgacatcgtgcagggacaaaccaagaggaagaggagggcgaggaagaagaacctcccgcacagggtggtgggaaggagatggacgaagaagaacttcttaacggcgatgatgcggaagacttccttctgggcctggatcacgtggccgacgatttcgtagccgttagacccgctgattacgagagcatccatgaccggcttcagatggagagggagatgctgtttattccatctaggcagaccgtgccaacttataaaaagctgcccgaaaacgttcagccgcgattcctcgaggacgagggcctgtacaccggagtcagacccgaggtggctaggacaaatcagaacatcatggagaatcggctacttatgcaggacccagagaggcggtggttcggcgacgacgggaggattctggctctacctaatccaataaagccattcccgtcaagacccccagtgctgacccaggagcaatccatcaaggccgaactagagaccctttacaaaaaagcggtgaagtatgtgcattcgtctcagcacgtgatccggtccggagatccacccggaaacttccagttggatattgatatcagcgggctgatattcactcaccacccttgtttctcaagggaacatgtgcttgccgctaaacttgctcagttgtatgatcagtatctggcaagacatcagcggaataaagctaaatttctgacagacaagcttcaggcccttcggaacgccgtgcagacaggactggaccctgagaagccccatcaaagcctggatacaattcagaaaaccatcaatgaatacaagagcgagattaggcagactcgcaaattccgcgacgctgagcaagaaaaggacagaaccctcctcaagacgatcattaaggtatggaaggaaatgaaatctcttcgcgaattccagaggtttactaacacacctctgaaactcgtgctcaggaaggaaaaggccgatcagaaggccgatgaagaggcttatgaggccgagatacaggccgagatttccgaattactagaggagcacacggaagaatacgctcagaaaatggaggaatatcgcacttccttgcaacagtggaaggcttggagaaaggtgcaatag

SEQ ID NO: 218769 - DNA, 336 bp, synthetic construct
  misc_feature 1..336: note = Description of Artificial Sequence: Synthetic coding sequence
  source 1..336: mol_type = other DNA
atgaaccccagggaagaaaaggtgaagatcatcactgaagagttcattgaaaacgatgaggacgcggacatgggtcgccagaataaaaactccaaggtacgccgtcagcctaggaaaaagcagccacctactgccgtgccaaaagagatggtcagtgagaagagccacctcggaaaccctcaagagccggtacaggaggagcctaagacacggctcttgtctatgactgtcaggcggggacctaggcgcgagttggtcgtgaaaaagtccttaggcaggcccggaacggttacgcacgtgtgtaacccaagcactctggagggacggggtggttag

SEQ ID NO: 218770 - DNA, 882 bp, synthetic construct
  misc_feature 1..882: note = Description of Artificial Sequence: Synthetic coding sequence
  source 1..882: mol_type = other DNA
atggccctggtcagtgctgattccagaattgccgaacttctgaccgaacttcaccagcttattaaacaaacccaggaggaaaggtcccgatccgagcacaacctggtcaacatacagaagacccatgaacggatgcagacggagaataagatatctccatactataggacaaagctcaggggactttatacaaccgccaaagcagacgccgaagcagaatgtaatattctaaggaaggctctggacaaaatcgccgagattaagtcgctgcttgaggagcggaggatcgctgccaaaatagctggcctgtataatgactcagaacctcctcgcaagaccatgcggagaggagtgctgatgacccttttgcagcagtccgccatgactctaccattgtggattggtaagccgggtgataagccaccacctctctgtggggcaattccagcgtctggtgattacgtggcgaggccaggagacaaggtcgcggcaagagtcaaagccgtggacggggacgagcagtggatcctggctgaagtggtctcctatagtcatgcaactaataaatacgaggtggacgatatcgacgaagaaggtaaggagagacacacactgtcccggaggagagttattcctctgccgcagtggaaggcgaaccctgaaacagacccagaggccctcttccagaaggaacaactggtgcttgccttgtatccccagactacatgtttttatagagctcttattcacgcacctccacagcgacctcaggatgactatagcgttctctttgaggacacaagctatgcagatggctactctccgccactaaacgtagcccagcggtacgtcgttgcttgcaaagagcccaagaagaagtag

SEQ ID NO: 218771 - DNA, 843 bp, synthetic construct
  misc_feature 1..843: note = Description of Artificial Sequence: Synthetic coding sequence
  source 1..843: mol_type = other DNA
atgaatgacaggtcaagcagacgcagaaccatgaaagacgatgaaacatttgagatttctatccccttcgacgaggctccacacctggacccacaaattttctatagcctgagtccctccaggcggaactttgaagagccccctgaagccgcttcttcagccttggccttgatgaacagtgtaaagacgcagctgcacatggctctcgagcggaattcctggctgcaaaagaggatcgaagacctcgaagaggagcgcgatttcctgcggtgccagcttgacaagtttatcagttctgccaggatggaagcggaggaccactgcagaatgaagcctgggcctcggagaatggaaggcgatagccggggaggagccggaggagaggctagcgatccggaaagcgctgctagcagcctgagcggggcttccgaagaaggtagtgcctccgagcgcagaagacaaaaacaaaagggaggagccagcagacggaggttcggcaaacccaaggcacgcgagagacagagggttaaggacgctgacggggtcctttgcaggtataaaaagattcttggaaccttccagaagctgaagagcatgtctagggcctttgagcaccaccgcgttgatagaaacacagtggcactcaccactcctatagcggaactacttatcgtggccccagagaaactggctgaagtcggagagttcgatcccagcaaggaaaggttgctagagtattctaggcgctgttttctcgcacttgacgatgaaacgctcaaaaaggttcaggccctgaaaaagagtaaactcttgcttcccattacttataggttcaagcgctag

SEQ ID NO: 218772 - DNA, 495 bp, synthetic construct
  misc_feature 1..495: note = Description of Artificial Sequence: Synthetic coding sequence
  source 1..495: mol_type = other DNA
atgatgctgacacaagcccctagtagcgtggtgcgatctaggaacagccgtaaccacaccgtgaactccgggggatcctgtcttagcgccagtacagtggctattcccgcaatcaacgactcatcagcagcaatgagcgcttgctctaccatcagcgctcagccagcttcctccatggatacacaaatgcactcccccaagaaacaggagagggttaacaagagggtgatttgggggatcgaggtggccgaagaattacactggaaggggtgggagctgggcaaagaaacaacccgtaatcttgtgttaaagaaccgcagtttaaaactgcaaaagatgaaatacagatatcagtacaaaggctctcgaacacagtgtcatagtctagagcccaggaaacaagcactcttcaaaacgaagcagaataaacagaaaaaaccgctaacctgtcatattaaggcaagcgaatgcttgaaatacgtgcaatatgagtag

SEQ ID NO: 218773 - DNA, 495 bp, synthetic construct
  misc_feature 1..495: note = Description of Artificial Sequence: Synthetic coding sequence
  source 1..495: mol_type = other DNA
atgatgctaactcaggcacccagctctgtcgtccgcagtagaaattctaggaaccacactgtgaactccggtggcagttgtctgagtgctagcactgtggctattcctgccataaacgattcctcggcagccatgtccgcctgttctaccatcagcgcacagcccgcttccagtatggacacccaaatgcactcacctaaaaagcaggaacgcgtcaacaaaagagtcatctgggggatcgaggtcgcggaggagctgcactggaagggatgggaactgggcaaggagaccactaggaacctagtgctaaagaatagatccctcaaactccaaaagatgaaataccgttaccagtataaaggcagccgaactcagtgtcacagcctggagccgcgaaagcaggcgctgtttaagaccaagcagaacaagcagaaaaagcccctcacctgtcatatcaaggcctccgaatgcctgaagtacgtgcaatacgagtag

SEQ ID NO: 218774 - DNA, 5777 bp, synthetic construct
  misc_feature 1..5777: note = Description of Artificial Sequence: Synthetic coding sequence
  source 1..5777: mol_type = other DNA
atgtttactttgacagggtgccgcttggtggagaagacccaaaaagtggagaatcctagtgtaagctttgcaagtagctttccattgatccctttactgctgaggggtaaaagtgttcagaaaaaacaggcagagtccaaaagccagattaagttgcacacgcagagtgccccattcggactctgccccaaggatatgatgctgacacaggcccctagttccgtcgtgaggagcagaaattcccgcaatcacacagttaattcaggaggttcgtgtcttagtgcgagtactgttgcaataccggcaattaacgacagtagcgccgcaatgagcgcttgttccaccataagcgctcaaccggctagttccatggacactcagatgcacagcccgaagaagcaggagcgggttaataagagggttatttgggggattgaggtcgccgaggagctccactggaaaggctgggaactggggaaggaaacgactcgtaatctggtgctgaagaaccgcagtcttaaactacagaaaatgaaataccggcctccaaagacgaaattcttcttcacagttattcctcagcctatcttcttgagtcctggaattactctgactctgcccatcgtgttcagaccccttgaggctaaagaatatatggaccagctatggtttgagaaggctgagggcatgttttgcgttgggctgagggcaactctcccttgtcaccgcttgatctgtcggccaccgtccctccagctgcccatgtgcgccgtaggcgacaccacggaagctttcttttgcctcgacaatgtaggggatctgcccacctttttcacctgggagttttcctcaccctttcagatgttgccagccactggcctgcttgagcctggccaggcgtcccagataaaagtcacctttcaaccccttaccgccgtcatctacgaggttcaggccacatgctggtacggcgcaggctctcgccagcggtccagtattcagctccaggccgtggcaaagtgcgctcagcttctggtttccattaaacacaagtgcccagaggatcaggacgcggagggtttccaaaaactgctgtatttcggcagtgtggcggttggatgcacctcagaacgccagataaggctgcataatccctcagctgtgaacgctccgtttcggatcgagatcagccccgatgagctggctgaggaccaagccttttcgtgccctactgctcacggaattgtcttgcccggtgagaaaaagtgtgtctcagtgtttttccatccaaaaactctggacactagaacagtcgactattgtagtattatgccatcggggtgtgcctcaaagaccttacttaaggtggtcggcttttgcagaggccctgcggtatccttgcagcactactgtgtgaatttctcgtgggtcaacctgggggaacgctccgagcagcccctgtggattgagaatcaatccgattgcaccgcccattttcagtttgccattgactgcctggagtctgtgttcacaattcgtccggcttttggtacattggtgggcaaggccagaatgaccttgcactgcgctttccaacccacccacccaatcatctgctttaggagagttgcgtgcctgatccaccaccaggaccctctgtttctggatctgatgggcacgtgccactctgatagcaccaaacctgccattttaaagccacaacatcttacctggtacaggacccatctggcacgagggctgactctgtaccccccagatatcttagatgctatgctgaaggaaaaaaagctggcccaggatcaaaatggggcactgatgatccctatccaggacctcgaagatatgccagccccacaatatccttatatccccccaatgaccgaatttttctttgatggcactagtgatattactatttttcctccacccatcagcgtcgaacctgtcgaggtggatttcggagcatgtcccggacctgaagcacctaatccagtgccattgtgcctgatgaaccatactaagggaaagataatggtagtgtggacaaggcgctccgactgcccattctgggtgacgccagagtcctgtgatgtccctcctttgaaaagcatggccatgagactccattttcagcctccccatcctaactgtttgtacaccgtggaactggaagcattcgcaatatataaggtgctccagagttactcaaatatcgaagaggactgtacaatgtgcccttcttggtgtttaactgtgagagctaggggacactcctattttgctgggttcgagcaccatattccccagtacagtcttgatgtccccaagttattcccagctgtgtcatcgggagagccaacatatcgctctcttttgctagtgaataaagattgcaagctcctgactttttccttggcccctcagcgcggaagcgacgtgattctgagaccaacttctggcctggtggcccctggcgctcatcagattatattaatttgcacatatcccgagggcagtagctggaagcagcacacattttatctgcagtgtaatgcatccccacagtaccttaaggaggtgagtatgtattcacgggaggaacccctgcaactgaagttagatactcataaatcgctatatttcaagcccacatgggttggatgctcatcaacgtcgccgtttacctttaggaacccctctcgcctcccccttcaatttgaatggcgagtcagtgaacagcaccgaaagctgctcgccgtgcagccatcacgaggacttattcagcccaacgagaggttgacactgacttggactttctcaccgttggaagagacgaagtatctcttccaagtgggcatgtgggtctgggaggccggactcagccctaatgcaaatccggctgctactacacattatatgctgcgactcgtgggcgtcggactgacctcctccctctccgcaaaggaaaaagagttggctttcggcaacgtgttagtaaattccaaacagagtcgattcctcgtcctgttgaacgatgggaactgcactctgtactatcgcttgtacctggagcaggggagccctgaggctgtggataaccaccctctcgctctccaattagaccgcaccgaagggtcaatgcctccacggagtcaagacactatctgcttgacagcgtgtcccaagcaacggtcccagtatagctggactatcacctactcactgctgtcccacagagacaataaggcaggggagaagcaggagctgtgctgtgtgagcctcgtagccgtttaccctctactctcaatactcgacgtgagtagcatgggctcagctgaggggattacccgtaagcacctgtggcgactttttagtctagacctgctgaactcttacctggaacgtgatcccaccccctgcgaattaacgtacaaggtacccacccgccatagcatgtcccagatccctcctgtactgacccccctgcgcctcgattttaacttcggggcagcaccttttaaagcccctccatctgtcgtgttcttggcattaaagaattcaggcgtggtctcattagattgggcttttttacttcctagtgaccagcgaatagatgtcgaactctgggcggaacaggccgagctgaattctaccgagctacaccagatgcgcgttcaggacaactgtctatttagcattagccccaaagctgggtcactgtccccagggcaggaacagatggtcgagttgaaatactctcacctgtttattggtactgaccacctgcccgtgctatttaaggtatctcatggacgtgagatcttactgaactttatcggggttaccgttaaaccggaacagaaatatgtgcactttactagcacaacccatcagttcattcccattcccatcggggacaccctccctccacggcagatatacgaactatacaatggaggaagtgtccccgtgacctacgaagtacagaccgatgtcctgagccaggtacaggaaaagaatttcgaccatccaattttttgctgtttgaaccccaaaggcgaaatacagcctgggtccacggctagagtcctttggatcttctccccgattgaggccaagacttataccgtcgatgtgcctatacatatactgggctggaactccgccctcatccactttcagggcgtggggtacaatccacatatgatgggggatacggctcccttccacaacatatcctcatgggacaatagctcgattcacagccgactcgtagtccccggacaaaatgtctttctgtctcaatcccatataagtcttgggaacatcccagtacaaagtaagtgttcacggctattgttccttaataatattagcaagaacgaggagatagcttttagctggcagccatcaccgctagatttcggcgaggtttctgtgtccccgatgatcggcgtagtggctcctgaggagaccgtacccttcgtggtaacactacgagcatccgtccatgcttccttctattcagcagatctggtgtgcaaactttactcccagcaattgatgagacagtatcacaaagaattgcaggaatggaaagatgaaaaggtgaggcaagaggttgaattcacaatcactgacatgaaggttaaaaaacgcacctgctgtactgcctgcgaacccgcacgcaagtacaagactctccctcccatcaaaaatcaacagtcagtttctcggcctgcatcctggaagctccagacacctaaggaagaggtttcctggccatgtcctcagccaccaagccccggaatgctctgtctgggactgacagccagagcacatgccacagattacttcttagcgaatttcttcagtgagttcccctgtcattttcttcacagagagcttcccaaaaggaaggcgcctcgagaggagagtgaaacatccgaggaaaaatccccaaataaatggggccctgtgtctaagcaaaaaaagcagctgctcgttgacatactcaccaccataattagaggactgctcgaggacaaaaattttcacgaggcggtggatcaatcactggtggaacaggtgccctattttagacagttctggaacgaacagtccacaaagttcatggaccagaagaacagtctatatctgatgcccatcttgccggtgcccagctcaagttgggaggacggcaaaggcaaacagcctaaggaggataggcctgagcactatcctgggctggggaaaaaagaggagggagaagaagaaaaaggggaagaagaggaagaggaactggaagaagaggaagaggaagaggaggagaccgaagaggaagagttgggaaaagaagagattgaggaaaaagaggaagagagagacgagaaggaagagaaagtctcatgggccggtatcggacctactccccaaccagagagccaagaaagcatgcagtggcaatggcaacaacagctcaatgtgatggtaaaggaagagcaggagcaggacgaaaaagaggctattaggcggctcccagcctttgcaaatctgcaggaagctttgttggaaaacatgattcagaatatcctagtggaggcatccaggggcgaggtagttcttaccagccggcctcgtgtgattgccctgccgccattctgcgtgccaagaagtctgaccccggatactcttctgcctactcagcaggcggaggttctgcaccctgtcgtgcctcttcctaccgatttgcctta

SEQ ID NO: 218775 - DNA, 2190 bp, synthetic construct
  misc_feature 1..2190: note = Description of Artificial Sequence: Synthetic coding sequence
  source 1..2190: mol_type = other DNA
atgctgacacaagcccctagtagtgtggtacggagccgtaactcaaggaaccacactgttaacagtggcggatcttgtctgtccgcaagtacagtcgccatacctgccatcaacgatagcagcgctgctatgagcgcctgcagcaccatttccgcacagcccgctagttccatggacacacagatgcactcacccaaaaagcaggagcgtgttaacaagcgcgttatttgggggattgaagtggcagaagaactccactggaaggggtgggaactgggaaaagaaactacccggaacctggtgttaaagaatcggtccctcaagctgcagaagatgaaatacagacccccaaaaaccaagttcttctttacagttatcccacagcccatcttcctgagtccgggaatcactctgactctccccatcgttttccggcctctggaggctaaggaatacatggaccagctgtggtttgagaaggccgagggcatgttttgtgtgggcctgcgcgcaacactcccctgtcaccgcttaatctgtaggccacccagtctccagctgccaatgtgcgcggttggtgatacaacagaggccttcttctgtcttgacaatgtaggagacctaccgaccttcttcacctgggagtttagtagcccctttcagatgctgcccgctaccggactcctggaacccggacaggcgtcacagattaaggtcacattccagcccctgacagccgtcatctacgaagttcaagcgacgtgttggtacggcgcagggagccgacaaagatcctcaattcaattgcaagcagtggccaagtgcgcccagctgctcgtttctattaagcataaatgcccagaggatcaggatgccgaaggctttcagaaattgctgtacttcggctcagtcgccgtcggctgtacatcggagagacagatccgactgcataatcctagtgctgtgaacgcacccttcaggatcgaaatcagccctgacgaattggcagaagatcaagcctttagctgccctactgcccatgggatcgttttacctggcgagaaaaaatgtgtgagtgtttttttccatccaaaaacactagatacccgcacagttgattattgcagcatcatgccctccggctgcgccagcaagacactcctaaaagtcgttggcttttgccgcggaccagcagtgtcactccaacactattgtgtcaacttcagttgggtcaacctgggcgaaagaagcgaacagcctctgtggattgagaaccagagtgactgtaccgcccattttcagtttgcaatcgactgtctggagtcagtctttacaatccgacccgcttttggcacactggttggtaaagcaagaatgacactgcactgtgcctttcagcccacacacccaatcatatgtttccgtcgggtggcgtgtctcatccaccaccaagatcccctgtttctagatcttatgggcacatgtcatagcgactctacgaaacctgcaattctcaagccacagcaccttacatggtataggacccacctcgccagggggttgacactgtaccctcctgatatactggatgcaatgctaaaagagaaaaagctagctcaggatcagaacggggctctgatgatcccaatacaggacctcgaggacatgcctgctccccagtacccctacatccctccgatgaccgaatttttctttgatggtactagtgacatcaccatctttcctccacccatatccgtcgagcctgttgaagtggatttcggtgcttgccctggacctgaggcccctaaccccgttccactatgccttatgaatcataccaagggaaagataatggtggtgtggactcggcgttcggattgtcctttctgggtgaccccagagtcttgcgatgttccacctttgaaaagcatggctatgaggctgcactttcaaccgcctcaccctaattgcctctacacagttgaattggaggcgtttgccatttacaaagtgtgcgctaggaacgaacgagaggaatgcggggttagtgctaggagcctgagcggactcgtaggttggcaggaagtaacagagggctcttttcgcctccaccccctgcgggcacggctgtcactggggtggaccgttacaccgatgtcccttagtcctcctaaacttctggcgtag

SEQ ID NO: 218776 - DNA, 5777 bp, synthetic construct
  misc_feature 1..5777: note = Description of Artificial Sequence: Synthetic coding sequence
  source 1..5777: mol_type = other DNA
atgttcacactcacgggttgtcggcttgttgaaaaaacccaaaaggttgagaatccaagtgtctcatttgcaagctcctttccgctgatcccgcttcttctcaggggcaagagcgtacagaaaaaacaggccgaaagtaagtcccagattaagctccacactcaatccgcccctttcgggctttgccccaaagacatgatgctgacacaggcaccgtccagcgtcgtgcggagccggaatagcaggaatcatacagtgaattcagggggttcgtgcctaagcgccagtacagtggctattcccgctatcaatgactcctcagcagccatgtccgcctgcagcacgatctctgcccagcctgcctcgagcatggatactcagatgcatagtccaaaaaagcaggagcgtgttaataagcgcgtcatatggggtatcgaggtggcggaagaactccattggaaaggttgggaattgggaaaggagactactcgcaacctggtactgaagaacaggtcactgaaactccagaaaatgaaataccgccctccgaaaactaagtttttcttcaccgtcattccccagccgattttcctgtctccaggaatcactttgaccttgcccatcgtgttcagacccctagaagccaaggagtacatggaccaactatggttcgagaaagccgaaggaatgttttgtgtaggcttgcgagctactctaccctgtcaccgattgatctgcaggcctccatcactgcagctgcctatgtgcgccgtcggagacaccaccgaggcctttttctgtctggataatgttggagaccttcctacattctttacgtgggagttctctagtccttttcagatgctccctgctacaggcttactcgagcctgggcaggcatcccagataaaggtgacattccagcctctgacagcggtaatctacgaggtccaggccacttgttggtatggtgccggatcccggcagcgatcaagcattcagttgcaggccgtggctaagtgcgctcagctgctcgtttctatcaagcacaaatgccccgaggaccaggatgccgagggctttcagaaactgttgtactttggaagtgttgctgtgggctgtacatctgagaggcaaatcagactccacaaccccagcgccgtcaacgcaccgttccgtatcgagatctcccccgatgagctggctgaagatcaagctttttcctgccctactgcccacgggatcgtactacctggtgaaaagaagtgtgtctctgtgttttttcatccaaaaacactggatacaagaacagtggattactgttcaattatgccaagtgggtgcgcttccaagactcttctgaaggtggtcgggttctgcaggggcccagcagtcagtctgcaacactactgcgtcaatttctcctgggtaaacctgggggagcgctctgagcagccactgtggatcgagaaccagtcagattgcaccgctcacttccagtttgctatagactgcctggagagtgtatttacaatccgccctgcttttggcactttggtcgggaaagcgagaatgaccttacattgcgcgttccagcccacccatcccattatttgctttcgccgtgtggcgtgtctgattcaccatcaggatccattgtttctggatttgatggggacatgccactcggattctacaaaacctgccatattaaagccacagcaccttacgtggtatagaacccacctggcgcgtgggctgactttgtaccccccagacattctagatgccatgctgaaggagaaaaagctggcccaggatcagaacggtgctctaatgattcctatccaggacctcgaagatatgccagcccctcagtatccctacattccccctatgaccgaattcttttttgatggcacgtccgacataacaatcttccccccacccattagcgtggaacctgtggaggtggactttggcgcttgccctggaccagaggcacctaatccagttcctttgtgtctcatgaaccatacgaaaggaaagatcatggtagtgtggacacgcagatctgattgtcccttttgggtcactccagagagctgcgacgtcccacccctgaaatctatggccatgcgcctccacttccagcccccacaccctaactgcctgtacaccgttgagttggaggccttcgcaatttacaaggtcctgcagagctattccaacattgaggaggattgcactatgtgtccatcatggtgcctgacggtcagggctcgaggtcactcctattttgccggatttgaacatcacatcccgcagtactcgttggacgttcccaagcttttccctgctgtatcgagtggcgagcccacctatcggagtcttctactcgtgaataaggattgtaagctgttaactttttcccttgctccccagcggggaagcgatgtcatactcagaccaactagtgggctagtggcgccaggtgcacatcagataatacttatatgtacatatcccgaagggtcgtcgtggaagcagcacactttttatctgcagtgcaacgcgtcaccgcagtacctcaaggaggtgagcatgtatagccgagaggagcctcttcaacttaagctcgatacgcacaaaagcctgtatttcaagcctacatgggtgggttgcagtagcacaagcccctttaccttccgcaaccccagccggttacccttgcagttcgaatggcgggtctctgagcaacatcgaaaattgctcgcggtccaaccaagtaggggactgatccagccaaacgagagattgaccttaacctggacattctcccctttggaggagacaaagtacttgtttcaagttggaatgtgggtgtgggaagccggtctttctccaaacgctaaccctgccgcaaccacacattatatgctccgactggtcggcgttgggttaacctctagtctatctgcaaaggagaaggagttggccttcgggaatgtgttggtgaatagcaaacagagccggtttttagtgctcctgaatgacgggaattgcactctgtattatcgcctttatctggagcaggggagccccgaggccgtggataatcaccctctcgcactgcagttagatcgcacagaaggatccatgccaccgagatctcaggataccatttgtctcaccgcatgtcccaagcagagaagccaatactcttggactatcacatatagcctgctgtcgcaccgagacaacaaggccggagaaaaacaggagctttgctgtgtttctcttgtggcagtgtatcctctcctctccattttggacgtgagctccatgggcagcgcagaaggaattacccggaaacacctttggcgccttttttctctggatctgctcaattcttatttagagagagacccgaccccgtgcgagctgacctataaggtaccgacccggcacagcatgtctcagataccccctgtgttgaccccattgagactggactttaattttggggctgccccattcaaggcacctccctccgtcgtgtttctcgcgctgaagaattctggcgtggtgtcccttgactgggcctttcttctccctagcgatcagagaatcgacgttgaattgtgggccgagcaggccgaactgaatagcaccgaattgcatcagatgcgagtgcaggataactgcctgtttagcatatctcccaaagccggtagcctctcacctggacaggagcaaatggtagaactgaaatactcccatctttttatcggcacagatcacctgcccgtcctattcaaagtaagtcacggacgggaaattcttctgaacttcattggagtcactgttaagcctgagcagaaatacgttcattttacgtctacaactcatcagtttattcccatcccgatcggcgatacacttccccctcggcagatttacgagttatataacggcggatccgtccccgtgacatacgaggtccagacagacgtcctgagccaggttcaggaaaagaatttcgatcacccaatcttttgttgcctgaacccaaaaggcgagattcagccgggtagcaccgcgagggtgctgtggatattcagcccaatagaggccaaaacctacaccgtggatgttcctatccatattctgggctggaatagcgctctgattcacttccagggggtcggatacaatccccatatgatgggcgataccgcgccatttcataacattagttcctgggataattcatccatccactctcggctggtagtgcctggacagaacgtgttcctctcccagagtcatatttcattgggcaatatacccgtgcaaagtaagtgctctaggttgctgttccttaacaacatctccaagaacgaggaaattgcattctcctggcagccctcacccctggatttcggggaagtgtctgtgtccccaatgatcggcgtggtcgctcccgaagagaccgtccccttcgtggtcactctgagagcttctgttcacgcaagtttttactctgccgacctggtgtgtaaactatacagccagcagctaatgcggcagtaccacaaagaactgcaggagtggaaggatgagaaggtgcgtcaggaagtggaattcaccataaccgatatgaaagtgaagaagcgaacgtgctgtaccgcttgtgaaccagcccgaaaatacaaaactctgccgccaatcaagaatcagcagtcagtgagcagaccagcttcttggaaactccagacaccaaaggaagaggtgtcgtggccatgcccccagcctccgtctcctggcatgttgtgtctgggccttactgctagggctcatgcgaccgactacttcctggccaacttcttcagcgagtttccttgccattttcttcatcgagaactgcccaagaggaaggccccaagagaggaatcggagacatccgaggagaaatcaccgaacaaatggggccctgtgagcaaacagaagaaacagctcctcgtagacatccttaccactatcattcgcggtctccttgaggataaaaatttccacgaggccgtcgaccagtctttggtggaacaagtgccatatttccggcaattctggaacgagcaaagcaccaaattcatggaccagaagaacagcctctacctcatgcccattctgccagtccccagtagctcttgggaagatgggaaagggaaacagcccaaagaagatagacccgaacattatccaggccttggaaaaaaggaggagggcgaggaagaaaagggagaagaagaagaagaggagctggaggaagaggaagaagaagaggaggaaacagaggaggaggagctgggaaaggaagagatcgaagaaaaagaggaagaacgagatgagaaggaagagaaagtgagttgggctggaattgggcctacaccgcaacctgagtcacaggagtccatgcagtggcaatggcagcagcaactgaatgtaatggtaaaagaagaacaggagcaggatgaaaaagaggccattcgtcggctaccagcttttgccaatctccaggaagctctgctggagaatatgatccagaacatcctcgttgaggcctctcggggagaggtggtcctcacgtcacgcccaagggtgatcgccctaccaccattttgcgtcccacgtagtctaacccccgacaccctgcttccaacccagcaggcagaagtcctgcatccagtggtgccgctaccaactgatctgccata

SEQ ID NO: 218777 - DNA, 5777 bp, synthetic construct
  misc_feature 1..5777: note = Description of Artificial Sequence: Synthetic coding sequence
  source 1..5777: mol_type = other DNA
atgttcactctgactggttgccgactcgtcgagaaaactcaaaaggtagagaacccgtccgttagctttgcatccagcttcccactaattcccctgttattgcgtggaaagtcagtacagaagaagcaggccgagagcaaatcacaaatcaagctccatacacagtcagcaccctttggactctgccccaaggacatgatgcttacccaggccccatcttcagtcgtgcgcagcagaaactccagaaaccacactgtcaactccggcggatcctgcttgtccgctagtacagtcgcaatccctgcaattaacgattcctccgctgcgatgagtgcttgctccacaattagcgctcagcccgctagcagtatggacacacagatgcacagtcccaagaaacaggaaagggtgaataaaagggtcatttgggggattgaggtggctgaagagctccactggaaaggttgggaactcggcaaggaaaccacgcggaacctcgtgcttaaaaatagatccctgaagctgcagaagatgaaataccgccctccaaagactaaatttttcttcaccgtgatccctcagcctatcttcttgtcacccggaatcacgctgactctcccaatcgtatttcggccactcgaagcaaaggaatacatggatcagttgtggtttgagaaagccgaaggtatgttttgcgtgggcttgcgggctactcttccctgtcatcggttaatctgtaggccgccttctctacagttaccgatgtgcgccgttggagacaccacagaggcatttttttgtctcgataacgtcggcgatctacccaccttttttacctgggaatttagtagcccttttcagatgctgccagccaccgggctgctagagcccggacaggcttctcaaatcaaagtaacttttcagcccctcactgccgtgatatatgaagtccaggccacctgttggtacggagctggcagcaggcagagaagctcgatccagctacaggccgtggctaagtgtgcgcaattactggtgagcattaagcacaagtgtcctgaggaccaggatgcggaggggtttcagaaactcctgtattttggttctgtcgctgtgggatgcacttcagagagacagattaggttacataatccatctgctgtgaacgctccattcaggattgagatctctcctgatgaactagctgaagaccaggctttcagttgtccaactgcccacggtattgtgttgcccggtgagaaaaagtgtgtgtctgttttctttcacccaaagactctcgatacgcggacagtagattattgctcaatcatgccctctggttgtgcctccaagaccttactaaaggtggtgggattttgccggggtcctgccgtgtccctgcaacattactgcgtaaacttctcttgggtgaaccttggtgaaagaagtgaacaaccactgtggatcgagaaccagagcgactgcacagcacacttccagttcgcaatagactgccttgaatcggtgtttacaatccgcccagcttttggtaccctcgtgggcaaagccaggatgaccttacattgtgccttccagcccacgcaccctatcatctgcttcaggcgggtggcttgtttaatccaccatcaggaccccttgtttttggatctgatgggtacttgccatagcgactctacgaagcccgcaatcctaaagccccagcatcttacctggtacaggacacatctcgcccgaggactgacactatatcctccagatatcttggacgccatgttaaaagagaaaaagctggcacaggaccaaaacggcgctttgatgatccccattcaagacctagaggacatgcccgcacctcagtacccatatattccgcctatgaccgagtttttcttcgatggaacgtcagatatcaccatattcccccctccaatctctgtcgagccagtggaagtcgactttggcgcttgccccggacccgaagcccctaatcccgtccctctatgccttatgaatcacacaaaaggaaaaatcatggtggtctggactaggagaagcgactgtcctttctgggtcactccagagtcatgcgatgtgcctccactgaagtccatggcgatgagacttcattttcaaccacctcatcccaactgcctttataccgtggagctcgaggcctttgcaatctataaggtgctgcagtcgtactctaatatcgaagaagactgcaccatgtgcccatcttggtgcctgacggtgcgagcacgcggtcatagttactttgcgggtttcgaacaccacatacctcaatactcactggacgtgccaaagctgttcccagctgtttcgtcaggcgaaccaacttaccgaagcttgttgcttgtaaataaagactgtaaattgctgaccttttcactggcaccacagagagggtcagatgttattctcagacctacaagtggcctggtggcccctggagctcatcagattattctcatctgtacctacccagaaggaagttcctggaagcagcacaccttctacctccagtgcaacgcctctccacagtacctgaaagaggtcagtatgtacagtcgcgaagaacccctgcagctgaagttagatacgcataagtccctttatttcaaacccacttgggtgggttgctctagtacatcaccattcacgtttagaaatccgagcagactgcctctccagttcgagtggagggtgtcggagcaacaccgaaagctcctggctgttcaaccgtcgcgcggactgatacagccaaacgagcggctcactcttacatggacgttctctccactcgaagaaaccaaatatctgttccaggtgggtatgtgggtgtgggaagcaggcctcagccccaatgcaaacccagccgctaccactcattatatgctgcggttggtgggggtggggctcacctcgtcgctcagcgctaaagagaaagaactggcctttggcaatgtgttggtgaatagcaagcagtcgcgctttttagtcctgctgaacgatggaaattgtaccctgtattatcggctgtatttggaacagggatcacccgaggcagtcgataaccatccactggccttgcagctcgaccgaactgaggggtcaatgccccctcgcagtcaagataccatatgcttgactgcctgtcccaagcagcgttcccagtacagttggaccattacctacagcctgctctcccacagagataataaggcaggagagaagcaggaactttgttgtgtgagccttgtggccgtgtatcccctgctcagcatcctggatgtgagtagcatgggctctgccgagggcataacacggaagcacctatggcggctgttctcgctggacctcctcaattcctatttggagagggatcccacgccctgcgaactgacatacaaggtgcctacccgccactctatgtcccagatccctcctgtcctgactccgctgaggctagatttcaactttggtgctgccccattcaaggctccccctagcgtcgtgtttcttgctctgaagaattccggcgtagtttcgctagattgggcttttttattgccaagcgatcagcgcattgacgtggaattatgggcagaacaggccgaactcaactccaccgagctgcatcagatgcgcgtccaggacaactgcctcttctctatcagcccaaaggccggatccctgtcaccgggacaggaacagatggtcgaattgaaatactcacaccttttcatcggaacggaccacctgccagttctgtttaaggtgtcacacggtcgagagatcctcctgaatttcataggtgtgaccgtcaaacctgagcaaaagtacgtgcatttcacctctacaactcatcaatttattcctatacccattggcgacaccctgcccccacgtcaaatttacgagctctataacggcggaagcgtgcccgtcacatacgaggtgcaaaccgatgttctgtctcaggttcaggaaaagaactttgaccacccaatcttctgttgtctcaaccccaaaggcgaaatccagccgggatcaacagccagagtactgtggattttcagccctatcgaagcaaagacttacaccgtcgacgtgccaatccacattttggggtggaattcagcactgattcacttccagggagtgggatacaatccccacatgatgggggatactgcaccttttcacaatatcagctcttgggacaactcctctattcactctagactggtcgtgcccggtcagaacgtctttttaagccagagccatatcagcctgggcaacatcccagtccagagtaagtgcagtaggctgctgtttcttaacaatatctccaaaaacgaggaaatcgcttttagctggcagccatcaccgctagactttggagaggtatcagtttcacctatgatcggagttgttgcgcctgaggagactgttccttttgttgtgactctgagagccagtgtgcacgcttccttctactccgccgatctcgtgtgtaagctatactcccagcagttgatgcgccaatatcataaggaactgcaagagtggaaggacgagaaggtgagacaggaggtggagttcacaattacagatatgaaggtgaagaagcggacttgctgcacagcgtgtgagccagccagaaagtacaaaacgttgccccctatcaagaaccagcagtccgtctcccggccagcctcctggaaactgcagaccccaaaagaggaggtatcatggccctgtccacagcccccttcccccggaatgctgtgcttaggattgacggcgagagcccatgcaacagattactttctggccaattttttttcagaattcccatgccacttcctgcatcgagagctcccaaaacggaaggctccacgggaagaatccgagaccagtgaggaaaaatctcccaacaagtggggtccagtgtccaagcagaagaagcagctcttagtagatatcctcaccactattatccggggtctgctagaggacaaaaacttccacgaggccgtggatcagtcactggttgagcaggtgccgtattttcggcaattctggaatgaacagtctactaaatttatggaccagaagaattccctataccttatgcccattctgcccgttccctccagcagttgggaggacggcaaaggaaagcagcccaaggaggacaggcccgaacactaccccggtctcgggaagaaagaggagggcgaggaggagaaaggcgaggaggaagaggaagagctggaggaagaggaggaagaggaagaggagaccgaggaggaggaactgggaaaagaggagattgaagaaaaggaagaagaaagggatgagaaagaagaaaaggtgagctgggcgggtattggacccacacctcagccggaatcacaagaaagtatgcaatggcagtggcaacaacagttaaatgtaatggttaaagaagaacaggaacaggacgagaaggaagccatccgtagactgcccgcttttgccaacctccaggaagcactcctagagaacatgatccagaacatccttgtcgaggcatctcgcggtgaagtggtgcttacatctcgtcccagggtgatcgcattaccccctttttgcgtgccaagaagccttacacccgacacattacttccgacacaacaggccgaggtcctgcatcctgtggtgcctttacccactgacctgccata

SEQ ID NO: 218778 - DNA, 816 bp, synthetic construct
  misc_feature 1..816: note = Description of Artificial Sequence: Synthetic coding sequence
  source 1..816: mol_type = other DNA
atgaccctacattgcgcatttcagcccactcaccccattatctgctttcgtagagtcgcttgccttatccatcaccaagacccactcttcctggatttaatgggcacttgtcactcagactctactaaaccagccattctgaaacctcagcacctaacatggtatagaacccatctggcacgtgggctgacgttatacccccctgatatactcgacgccatgttaaaagaaaagaagctggcccaggatcagaatggggctctcatgatccccatccaagacctagaggacatgcctgccccacagtatccatatatcccacctatgaccgagtttttctttgacggaacttctgatataacaattttcccaccacctatctctgtcgagccagttgaggtggatttcggtgcttgtcctggcccagaagccccaaacccagtgcctttgtgtctgatgaaccacaccaaaggcaagattatggtcgtgtggactaggcggtcagactgtccattttgggtcacccctgaaagctgtgacgttcccccattaaagagcatggcgatgcggttacattttcagcctccccacccaaattgcctttataccgtcgagcttgaggcctttgccatttataaagtgtgcgcaagaaatgagcgcgaagaatgtggggtcagcgccaggtctttatctgggctcgtaggctggcaggaagtcaccgaggggtcgttccggttgcatcctttacgggctagactgagccttggctggacggtgacacccatgagtctaagtccaccaaaactgctggcctag

SEQ ID NO: 218779 - DNA, 543 bp, synthetic construct
  misc_feature 1..543: note = Description of Artificial Sequence: Synthetic coding sequence
  source 1..543: mol_type = other DNA
atggccgcactcgacctaagagcagaattggatagcctcgtgctccaattactgggggatttggaagagttagaaggcaaaaggaccgtgctcaacgccagagttgaggaagggtggctgtctctagcaaaggctagatacgccatgggcgctaagtctgtggggcctcttcagtatgctagtcacatggaacctcaggtgtgcctgcacgcctccgaggcccaggaaggtcttcagaaatttaaggtggtaagagccggagtacatgctcctgaagaggtgggcccacgcgaggccggactccggaggcgaaagggccctaccaaaacccctgaaccagagagctctgaagcccctcaggatcccctgaactggttcggcattttggtaccccattcattgcgtcaggcacaggcttcattcagagatgggctgcaactggcagctgacatcgctagcctccaaaataggatagactgggggaggtctcagctgcgcggtctgcaggagaagctgaagcagttggagcccggtgccgcttag

SEQ ID NO: 218780 - DNA, 567 bp, synthetic construct
  misc_feature 1..567: note = Description of Artificial Sequence: Synthetic coding sequence
  source 1..567: mol_type = other DNA
atggggactcctcttgatggtgggagtcgggtccccatagggtgtcctgccaaactccgaagggtgacacgcaaaaaggttgcccctgacctcgaaggctggcttagtctcgccaaagctcgatacgccatgggcgcaaagtctgtgggcccacttcaatatgcctctcacatggaaccgcaggtgtgtctgcatgcctccgaagctcaggaagggttacagaagttcaaagttgttcgggctggcgtgcatgcccctgaggaggttgggccacgcgaagctggattacgccgaagaaaaggacccactaagacaccggagcccgaaagctctgaggctccccaggaccctctgaattggttcggaatcctggttccgcatagccttagacaagcccaggcctcctttcgggatggtgtgttagaagctaagaagaggaagtgctttctggagcgggtgatacagtgtgtagtgagccccgctgctgagcaggaagcagaggacgaatcttgccccgaggattgggccgctgccgtgccagccgaaacttcggccaaagctatctag

SEQ ID NO: 218781 - DNA, 855 bp, synthetic construct
  misc_feature 1..855: note = Description of Artificial Sequence: Synthetic coding sequence
  source 1..855: mol_type = other DNA
atgtccgataacaaagaacgaaaatcccagggttttcccaaagaagacaatcaggatacatcaagcctggctgatgccgtcgagaaggttgcaaagcagcagcagagtcaggccagtgaaattgaaaagaataaaaaggtcctctttaatctgaagaatgagcttcacgagctggaaaaagagatcgccgctatcagcgccgagaccaaagaaacagaaagacagatctaccagcaggactccgccatagagaacactaaactgcattgtgacagtttagaaacacagattaagagccttcactctgagaacgtgaaactgaagtttgatattgagacagcccaggaagacttcgaagagcatatgattaaatacaacgcatactacgctaaaattaaggcacacaaaaactctctcggtgaggtcgagagcaaatggtcctttatgaccgaactgcacgagaagcgagacttcgttaaaaagctaaaaacgatgaaggaggagctgatgcaggacctgcagaacccgggtgggaaccggatcacacaggtccaggaggacatcactaatcttaaagacaagatcattactgtaaaggagagtattattgaaaagacttgcttcctggaggaagagaagaaaactcatgaaaagcttcgtaaagagatagaatctttggccccatctccccgtctggaatgctccagcgcgatctccgcacactgcaaactgtgtctgcctggatcacgacattcaccggcttcagctagtggggtggctggaactaccggcgcatgccaccatacacaattgattttttgcatttttagcagagacggcgtgtctccatgctag

SEQ ID NO: 218782 - DNA, 822 bp, synthetic construct
  misc_feature 1..822: note = Description of Artificial Sequence: Synthetic coding sequence
  source 1..822: mol_type = other DNA
atgagcgacaataaggagcgtaagtcacagggcttccctaaagaggataatcaggacacttctagtttggctgacgctgtggagaaggtagccaaacaacagcagagtcaggcctcagagatagaaaaaaacaaaaaggtgttgttcaacctgaaaaacgagctccacgagctagagaaggagatcgctgcaatctccgcggagaccaaggaaaccgagagacagatttatcagcaggactcagcaatcgagaatacaaagctgcattgcgacagtctggagacccagattaagtctctgcactcggaaaatgtaaaactcaaatttgacattgagaccgcacaagaggactttgaggagcacatgattaagtacaacgcttactacgccaagataaaggcacacaagaactcgctgggcgaagtggagtctaaatggtcgtttatgaccgaactgcacgaaaagcgggattttgtcaagaaacttaagaccatgaaagaagagctgatgcaggatttgcagaacccaggaggcaatcgcatcacccaagtgcaggaggatatcaccaacttgaaagataagataattaccgtaaaggaatccattattgaaaagacgtgctttctcgaggaggagaagaaaacgcacgagaaactgagaaaggagattgaggtgcagcacaaaaggtacgatgcaattctgaaaaggctccactgccaggttaacaagctacaatctaatcgacggcagtggcagtggaatattcagcagctggagaagaccgcagccgaactccgaaaatgcatcggcatgcaagaatag

SEQ ID NO: 218783 - DNA, 1536 bp, synthetic construct
  misc_feature 1..1536: note = Description of Artificial Sequence: Synthetic coding sequence
  source 1..1536: mol_type = other DNA
atgtctaaagtcgctcgaagttccagcgaatcagatgtccagctgtgggagactgaggaagacgacatgacagagggggacctgggctatggcctgggaagaaagccgggaggaatttacgaaatcgagttcagccaccggtcccggaagcgaagtgacggtaagaattttagcccacccccatttccccgaaaaggcgaggagcgtaacgaggcatcatttcagtattccaagcacaaatctcagcaagacacattccctcaggtcagcaggatcagcaactacaggaggcagagttcaactgttgactccaatagtgagctgtccaacgaggagcttaggcagtgcttaaatgagacactcgaagaagtggagatgttgaagacagaattggaggcaagtcagcgccagttgaggggtaaggaagaggccttgaagattctgcagtcaatggccatcctgggaaaggctactagccatacccaggctgttttgcagaaaacaatggagcaaaatcggtctctggagaaggagatcaacgcattacagtgggaaatagagttcgatcataatcgatttaagaatatcgaggaaagttggatccagaagtacgatcggctgaactgtgaaaacgcagtcctgaaggagaacttgaaggtgaagaccgaagaaataaagatgttgaagtccgacaacgcggtactgaatcaacgctacctcgaggcattggcaatgctggacataaagcagcagaaaatggcccaggagaatatgtgttgcgacaagagcggctttgctgaggcaagtggtctcgaactggccgtgttgggcgcatgcctgtgccatgggcctgggggtaatccttgtagttgtgctcgtatggcagccagcaccaggaaactcctgttgcagctgaaacaggagctggagattctgcaaaaaagtaaagaagaggcctacgtgatggccgatgcctttcgtattgcgttcgagcagcagctcatgcggaagaatgaccaggccctccagttgacccagatggacaaaatgcacaagaaggctacaaagtggatgaactggaaacacttgaaggaagatggctttccatccccgaggagtaagaaaacgttcggtcagagactcctgggtatgctgccttcagaaaatagctctaaacgtatggaagaccaggattccccacaggaagtcctgaaaatgctcatcgatctcttgaacgacaaagaagaggccctggcccaccagcgaaaggtatcctacatgctggctcgggctcttgaggataaggacacagccagcaatgagaataaggagaaaaatcctattaaggagaacttcccatttaataacccttggagaaaaactagcgagttttccgttctcggggaccccattcatagctccgtatgtattctaaattccgttggatgcatttgcagtatccagcattcccagattgaccccaactacagaactctcaagcgctcccactcattgcccagctcaatcattttctag

SEQ ID NO: 218784 - DNA, 1536 bp, synthetic construct
  misc_feature 1..1536: note = Description of Artificial Sequence: Synthetic coding sequence
  source 1..1536: mol_type = other DNA
atgtctaaggtggcaagatctagctcagagagcgatgtccagctgtgggaaactgaagaggatgatatgaccgaaggagacctgggatacggtctgggccgaaagccgggaggcatctatgaaatcgaattttctcacaggtcacggaaacggtcagacggtaagaatttctcccctccgccttttcccaggaagggcgaagagcgtaacgaggcctctttccagtacagcaagcacaaatcgcaacaagatacattcccccaagtcagccgtattagcaattacagacgtcagtcctcgactgtggactcgaacagtgaactctctaacgaagagctgaggcaatgcttgaatgaaacactggaggaggtagagatgctaaagacagaactagaggctagtcaaagacaattgaggggcaaggaggaagcactcaaaatcctgcagtccatggcaatacttggaaaagccaccagccacacccaggctgtcctgcagaagaccatggagcagaataggtccttggaaaaggaaatcaatgctttacagtgggaaattgagttcgaccacaacagattcaaaaacattgaggagagctggattcaaaaatacgacagactgaactgcgagaatgccgtcctgaaagaaaacttaaaagtaaagaccgaagagattaaaatgctcaagagcgacaacgccgtgttaaaccagaggtacttggaagccctggctatgctagacatcaagcagcagaagatggcacaggagaacatgtgttgtgataagtcaggcttcgccgaggcctcaggcttagaacttgcagtcctgggtgcctgtctatgccatggcccaggtggtaacccatgcagttgtgccaggatggcggcttcaactagaaagctgttgctgcaactcaagcaggagctcgaaatactgcaaaagagtaaggaagaggcttacgtcatggccgatgctttcaggatcgcctttgagcagcagttgatgcgaaagaatgatcaggccctccagttgacccaaatggacaagatgcataagaaggccacaaagtggatgaactggaagcacctgaaagaagacggatttccctctccacggtctaaaaagacctttggccaaaggctgttggggatgctgccctcagagaattcaagcaaaaggatggaagatcaggattcacctcaggaagtcctgaagatgttgattgacctccttaacgataaagaggaagccctcgcgcaccaaagaaaagtttcatacatgctcgcccgagccctggaagataaagacaccgcttccaatgagaataaagaaaaaaatcccatcaaggagaactttccctttaacaacccctggaggaagacgagtgagttcagtgtattgggcgatccaatccacagttcggtatgtattctgaactctgtgggctgcatctgctctatccagcacagccagatcgatcccaattatcgcactctgaaaaggtcccattctttaccctcttccattatcttctag

SEQ ID NO: 218785 - DNA, 1161 bp, synthetic construct
  misc_feature 1..1161: note = Description of Artificial Sequence: Synthetic coding sequence
  source 1..1161: mol_type = other DNA
atgctcaagacggaactggaggcatcacagaggcagctgcggggaaaggaagaggccctaaaaatcctccaaagcatggccatcctgggtaaagctactagccatacacaggccgtactccagaaaaccatggagcagaacaggtcactggaaaaagaaataaatgctttgcagtgggaaatagagtttgatcacaataggttcaaaaacatcgaggaatcctggatacagaagtacgaccggctgaactgtgagaatgccgtattaaaagagaatctgaaagtcaagaccgaggagattaagatgctaaagtcagataacgccgtactgaatcagcggtatttagaggccctggcaatgttagacataaaacagcagaagatggcccaggaaaatatgtgctgcgacaagtcaggctttgctgaggcgtctggcctagagctggcagtgttgggggcttgtctgtgtcacgggccaggaggcaatccatgttcctgcgcaagaatggccgcatcgactaggaagctcctgttgcaactgaaacaagagctggagatcctgcagaagagcaaagaggaagcctatgtaatggccgacgccttcaggatcgctttcgagcaacaactgatgagaaagaacgaccaggctctgcagctgacccagatggataagatgcacaaaaaggctaccaaatggatgaactggaagcacttaaaagaggatggctttccttctcccagatctaaaaagaccttcggccagcggcttctgggcatgcttccaagcgaaaattcatctaagagaatggaagatcaggacagtccccaagaggtgcttaagatgttgatcgatctcttgaatgataaggaggaggcgcttgcccaccagcggaaggtctcctacatgttagcccgtgctctggaggacaaagataccgccagcaacgagaacaaggaaaagaatccaatcaaagagaacttccccttcaacaatccttggaggaagacctccgagttctctgttctgggtgacccaattcactcttccgtatgtattctcaacagcgtcggctgtatctgctccatccagcattcccagatcgaccctaactaccggaccctcaagcggagccacagcctgccttcttccataatcttctag

SEQ ID NO: 218786 - DNA, 3465 bp, synthetic construct
  misc_feature 1..3465: note = Description of Artificial Sequence: Synthetic coding sequence
  source 1..3465: mol_type = other DNA
atgcaggctatggagggagaggtcttactccccgcattgtacgaagaagaagaagaagaggaagaagaggaggaggaggtcgaggaagaggaagagcaagtgcagaagggtgggagcgttggcagcctgtctgtgaataaacacagaggcctgtccctgactgagacagaactagaagaacttcgagcacaggttcttcagctcgtcgctgagctcgaggagaccagggagcttgctgggcagcacgaagatgattccctcgaactgcagggcctcttggaggatgaacgcctcgcgtctgctcaacaggcggaggtcttcactaaacagattcaacagctacagggcgagctgcgctcccttcgtgaagagatttcgctgctggagcacgagaaagagtccgaactgaaggaaatcgaacaggaattacacctagcacaggctgagattcagtctctgaggcaggctgctgaggactctgccacggaacatgagtcagacatcgcaagtctacaagaggacctttgccgcatgcagaatgagctggaggatatggaaaggatccgtggggattatgaaatggaaatagcgagcttgcgggcagaaatggaaatgaagtcttcggagccgtcaggctctttggggcttagcgactactcaggccttcaagaggaattgcaggagttgcgggagcgttaccatttccttaacgaggaatatcgtgccctacaggagtcgaatagctccctgacaggacagcttgcagacctggaaagcgaacgcacacagcgcgcaacggaaaggtggctacagagccagacgctgagcatgacttctgccgagtcccaaacaagcgagatggattttttagagcctgaccccgagatgcagctcctgcggcaacagttgagggacgcagaggaacagatgcacggcatgaaaaacaagtgccaagagctgtgctgcgaactggaggagctccagcaccatcgccaggtctcagaggaggaacagcgaagacttcagagggagctgaagtgtgcccaaaatgaagtattacgtttccagacaagccattccgtgacccagaacgaggaacttaaaagccggctttgcaccctgcagaagaaatacgatacttctcaggacgaacagaacgaactcttgaagatgcagctgcagctacagacagaacttcgacagctgaaggtcatgaaaagcactctggttgagaaccagtctgaaaaagagcttctgtgtcgtttgcagaaactgcaccttcaacaccagaatgtgacatgcgaaaaggaaaaactgctggaaagacaacagcagcttcaggaggagctacagtgccatgaggccgagctgcagcacctgagggatacggttgcctctttcaaggaatcaaatgagaaggacacagagacgcatgctcaactacaggagatgaagcagctttaccaggcatccaaagacgagctcgagagacagaaacatatgtatgatcagctggagcaggatctgctcctgtgccagctcgagctcaaggagctgaaggcctctcatcccatccctgaggataaaggcaagtgcgcgaataaatgtgataccctgctgagccgcttgacggaactgcaggaaaagtacaaagcatctcagaaagaaatgggccagttacagatggaacagtgcgaattactggaggatcagcgacggatgcaggaggaacaggggcaactccaggaggaattgcacaggttgactctgcctctgcctaagagcggcctgctgctgaagagtcaggagctgctgaccaaactggaagatctgtgcgagttacagctgctgtatcagggcatgcaggaggaacagaaaaagctgatccaaaatcaggattgcgttctcaaggaacagctcgaaatccacgaggaactgcggaggttcaaggagtcgcatttccaggaggtgctggagaatccagacgattcaaaattagcgaaatcttcaaagtgcaatcgtaacaagcagtccaaattactcatggagcagatgcaagccttgcaggtaatgtatgacgctgggcaggccaaacaagagctactccagcaggaacagggaaggcttctcgaagagaggaaaagattgcaggccgacttgcaactctgtctggaagagatgcaattgctgcaggtgcagagtccaagtatcaagatgtcattggaatcatacggtaaaagttacggttcaatggtccctagtaatgaaaactgcagaaagacatacgacactacggttgatgacaacgaatcctactacaaatcctatacgagcactcaaactagctctaaatctttcttgaagtcgtacgattccagcacatctgcatccgaggcgtacggcaaaagctattgtactacctccaattcctcgatcacatacaagaagagttacgggagcacgtcctcaagtgatacttgccaaaaatcttttgtctctagttgtactgatgaggaaccagctgagccagaggacatggagcgcttcgaggaaatggtcgtaaaagtcttgatcaagctacaggcagtgcaggcaatgtaccagatatctcaggaagaacatagccagctccaggaacaaatggagaaactattggctaagcaaaaagacctgaaagaggagcttgacgcttgtgagcgagagttcaaggagtgtatggagtgtcttgaaaaacccatggcgcctcaaaacgataaaaacgagattaaagaactccagaccaagctccgcgaactacaattgcagtaccaggccagtatggatgaacagggccgactcctggtggttcaagagcagcttgaagggcagctccaatgttgccaggaagaattgcgccagcttcgggagaagagacccagcgtggtcaaggaagcgaggggcaagaatgcgaacaaaaacatgaataagaatgcaaacggcgtaaagatgaaaaaagtgactaagccctgttctgacaccagtgagtctgatctggagacaaggaagagcctcgaagttgtgctatactacaaggcctcacaaagaaaactggatgggttagccaaggaagaagagaagaaagaggaaatggaagaggaaaagaaacaggtcaaagaagaagccaaggaacagtgcggagacgaattggtcgcggagcccgcagatcctgaagaggctaagtcaactgaagatcaggaggaaaatgaagaggataaggaagaagaagaaaaagaggaagactctgaggaagaggaagatgacgcggattcatctctggagagccctgaggagaacaatcccctcagactctcggaaagtaagaagtccagtcctaccccaaatcctcctatcttttcattgccattggttgggcttgtggttattagtgctctactgtggtgctggtgggctgaaacaagctcttag

SEQ ID NO: 218787 - DNA, 2874 bp, synthetic construct
  misc_feature 1..2874: note = Description of Artificial Sequence: Synthetic coding sequence
  source 1..2874: mol_type = other DNA
ctcagagcccttgaaggcgaggtgctcttgcccgcattatatgaggaggaggaagaggaggaggaagaagaggaggaagtggaagaggaggaggagcaggtacaaaaaggcggaagtgtcggaagcctatcggttaataagcaccggggactgtcactgaccgaaacagaactggaagaactccgggcacaggtactgcagcttgttgcagagttagaggaaacccgtgagcttgctggccagcacgaagatgatagcctagaactccaagggctgctggaggatgagaggctggcctctgcccagcaggcagaggtcttcaccaaacagattcagcagctgcagggagagttacgatcgctgcgtgaggagataagtcttctggagcatgaaaaagagagcgagctgaaggaaatagaacaagaattacacctggcacaggctgagattcaatctctgcgtcaggccgcagaagactcagcaacagagcacgagtccgatatcgcgtctctgcaggaagacctctgccgcatgcagaatgaactggaggacatggaaaggatccgaggagactacgagatggaaatagccagtctgagggctgaaatggagatgaaatcctcagaacctagcgggagcctaggcctctctgactacagtgggctccaggaagagctgcaggagctccgcgagagatatcattttctcaatgaggaatatcgcgcactgcaggaaagcaatagctccctaactggccaactggccgatttggaaagtgagcgcacccagcgggctactgagcggtggttgcaatctcaaacgctgtccatgactagcgctgaatcgcagacatctgagatggactttctcgaacctgatccagaaatgcagctgctgaggcagcagcttcgggacgcagaagagcagatgcatgggatgaagaacaagtgccaggaactttgttgcgaactggaagagctccagcatcatcggcaggttagcgaagaagagcagaggaggctacagcgtgagctgaagtgcgcacaaaacgaagtgttacggttccagactagccactctgtgacccagaatgaagagctgaaaagtaggctttgcacccttcagaagaagtatgatacatcccaggatgagcagaatgagctcctgaagatgcagctgcagctgcagactgagcttcggcagcttaaagttatgaagagtactctcgtggagaaccaatcagagaaggaattgctatgtaggttgcagaagttgcacctccagcatcagaacgtcacatgtgaaaaggaaaaactcctagaaaggcagcagcagctgcaggaggaacttcaatgccacgaagctgaacttcagcatcttcgagacacagttgccagtttcaaggagtcaaatgagaaggacaccgagacccatgctcagctgcaggagatgaagcagctctaccaggccagcaaggacgaattggagcgccagaaacatatgtatgatcagctcgagcaagatttgcttctttgccaacttgaattgaaagagctgaaagcatcccatcccatcccggaagacaaggggaagtgcgctaacaagtgtgataccctgctgagtcggctcacagaactgcaagagaaatataaggccagccaaaaggagatgggtcagctccagatggaacagtgtgaactgcttgaggaccaaaggcgaatgcaggaagagcagggccagctgcaggaggagctccatcgacttacacttccactccccaaatcgggcctgctgctgaaatcccaggagttgttgacaaagttggaggatctttgcgagctgcagctgctgtaccagggaatgcaagaggaacaaaaaaagcttatccagaaccaggactgtgtgctcaaggaacagcttgagatccatgaagagctgcggagattcaaagagtcacacttccaggaggtgctggagaaccccgacgatagcaagctcgccaaaagctccaagtgtaatcggaacaagcagagcaaactcttgatggagcagatgcaggcactgcaggtgatgtatgacgccggacaagccaagcaggaactgctgcagcaggagcagggcagactcctggaagagagaaaaaggctgcaggccgacctgcagctttgtctggaagaaatgcagctgctgcaggtacagtctccttcgatcaaaatgtcacttgaatcatatggcaaatcttatgggagcatggtcccttctaacgagaattgcaggaagacatacgatacaactgtagatgacaatgaatcctactataagagctatacgtccactcagacctcatctaagagtttcctgaagtcctacgactcctctacgagcgcctccgaggcttacggcaaatcctattgtaccacctcaaattccagcattacctataaaaagtcatacggatctacctcttcttccgatacatgtcagaaaagcttcgtgagcagctgtaccgacgaggaacctgccgagccagaagatatggagagatttgaggagatggtggtcaaggtcctaatcaagctgcaggctgtgcaggccatgtatcagatctcccaagaggagcactcacagttgcaggaacagatggagaaactgctcgccaagcaaaaggatctcaaggaagagcttgacgcctgcgaacgggagttcaaagaatgtatggaatgtttggaaaaacctatggccccacagaacgacaagaatgagaacatgtttggcctgtggaagccgatggtgtttttggctattgccgcagtggcactatacgttctgccaaacatgagacagcaggagagcgaattctgtttgatggagtag

SEQ ID NO: 218788 - DNA, 1305 bp, synthetic construct
  misc_feature 1..1305: note = Description of Artificial Sequence: Synthetic coding sequence
  source 1..1305: mol_type = other DNA
atggaggccggagcaggcgcaggggcaggcgcagccggttggtcatgcccagggcctgggccaaccgtgaccacactcggatcctacgaggccagcgagggctgtgaacgcaagaaagggcagaggtggggctccctcgagagacgcggaatgcaggcgatggaaggtgaggtcctgctccccgcactgtatgaagaggaggaggaagaagaggaagaagaagaagaggtcgaagaggaggaggagcaggtacagaagggaggatccgtgggctccctatccgtgaacaagcaccgtgggctgtccctaactgaaactgagctggaggaattgagagcccaggtgctacagctcgtggcagagcttgaagaaaccagagagcttgctggacagcatgaagacgacagcctggagctgcaggggctcctcgaagacgagcgcttagccagcgcacagcaggctgaagtgtttacaaagcagattcagcagctgcagggcgagctcaggagtctcagagaggagatctctttgttggaacacgaaaaggaatctgagctgaaagaaatcgagcaagaactgcacttggcacaggccgaaatacagagtctgagacaggccgcagaagattctgccactgaacacgaaagtgatatcgcctcactccaggaggacctgtgccgcatgcagaacgagctggaagacatggaaagaattcggggagattacgagatggaaatcgcatccttgcgggctgagatggagatgaagagctctgagccctcggaggaacttcaggaattgagagaacgttatcacttccttaatgaagaataccgagccctgcaggaatccaattccagtctcaccggacagctggcggacttggagagtgaaagaacacagagggccaccgagagatggttgcaatcgcaaacattatccatgacaagcgccgagagtcagacatcggagatggacttcctggaacccgatcccgaaatgcagctcctgcggcagcagctgagagacgctgaagaacaaatgcatggaatgaaaaacaagtgtcaggaattatgttgcgaactcgaggaactgcaacatcacagacaggtatctgaagaggaacagcgcaggctgcagcgggaactgaaatgcgcccagaatgaggttctcaggttccagacctcacacagtgtaacacagagcagccccactcccaacccaccaatctttagcctacccctagtgggcctggtggtaatctccgcactgctctggtgttggtgggccgagacatcctcatag

SEQ ID NO: 218789 - DNA, 3474 bp, synthetic construct
  misc_feature 1..3474: note = Description of Artificial Sequence: Synthetic coding sequence
  source 1..3474: mol_type = other DNA
ctacgcgcacttgagggggaggtgctgctgcccgctctttacgaggaagaggaagaggaggaagaggaagaagaggaggtggaggaggaggaagagcaggtccagaagggaggaagcgtgggttctttatcagttaataaacatagaggtttatctcttactgagaccgaactggaggaactgagggcgcaggtgcttcagttggttgccgagcttgaggaaacccgggagctggccggacagcacgaagacgactccctcgagttacagggactgctagaggatgaaagactggcttcagctcagcaagccgaagtgtttactaaacagattcagcagctacaaggcgagttaaggagtctacgagaggagatctctcttcttgagcatgaaaaggagagcgagctaaaagagattgagcaggagctccacctcgcgcaggcagagatacagtcactacggcaggcagctgaggacagcgcaacagagcacgaatctgacatcgctagtctacaggaggacctctgccgcatgcagaacgagctggaggacatggaacgtattcgcggagattatgagatggagatagccagtttgagagccgagatggagatgaaatcttcggagcccagcgggagcctgggtttatccgattatagtggactgcaggaggagcttcaggaacttcgagagcgataccactttctgaatgaagagtaccgagctctgcaggaatccaatagctctctcactggacagctcgcagatcttgagtcggaacgaacccagcgagcaaccgagaggtggttgcagtcacaaactcttagcatgactagcgcagagagtcaaactagtgagatggattttttggaaccagatccagagatgcagctcctgagacagcagctgcgcgatgccgaagagcagatgcatggtatgaaaaacaaatgccaggagttatgttgcgagttggaggagctccagcaccaccggcaggtgtcggaagaggaacagcgccgtctgcagcgagagcttaaatgcgcccagaatgaggtgctgcgcttccagacttcgcactccgtaactcagaatgaggaactgaagtcgaggttgtgcactttacagaaaaagtacgacaccagccaggacgagcaaaatgagctcctaaaaatgcagctgcagctccaaacggagctaaggcaactaaaggtgatgaaatctacgctggtggaaaaccagtctgaaaaagaactgctctgtagactccagaagttgcaccttcaacaccagaacgttacatgcgaaaaagagaagcttcttgagcgccaacagcagctccaggaggaactgcagtgtcatgaagcggagcttcaacatctgagggacaccgtagcgagctttaaggaaagcaacgaaaaggacacagaaactcatgcgcaactgcaggagatgaagcagctgtaccaagcatctaaagatgaattggagcgacagaaacacatgtacgatcaactcgagcaggatctcctgctctgtcagctggagttgaaagaactgaaagcatctcaccccatccccgaggataaaggcaagtgcgcaaacaaatgcgatactttgctatctcgcttgacagaacttcaggagaaatataaggcctcccagaaggagatgggacagctccagatggaacagtgtgaactgctggaggaccaacgcaggatgcaggaggagcaaggccagctgcaggaggagttacacagactgactctgccactgccgaagtctggtctgctgctgaagtcacaggagcttctgactaaactcgaagacctctgtgaacttcagcttctgtaccaaggcatgcaagaagagcagaagaaactgatccagaaccaggactgtgtactcaaagagcaactagagatccatgaggaactgagaagattcaaggaatctcatttccaggaggttcttgagaacccggacgattccaaactggcgaagagtagtaagtgcaatcgaaacaagcagagcaaactcctcatggagcagatgcaggcactccaggtaatgtacgacgctggacaggccaagcaagaactcctacagcaggagcagggccgactgctcgaggagcgcaagcgtttacaagccgacctccagctgtgccttgaggagatgcagctgcttcaggtccagagtccttcaattaaaatgagcctcgaatcttatggcaaaagctatggctccatggtgcctagcaacgagaattgtagaaagacatacgacaccacagtggacgacaacgagtcttactacaagtcttatacctccacccagacatcaagcaaatcttttctcaaatcatacgacagctccacttcggcttctgaagcctatggaaagtcctactgtacgaccagtaactcatccatcacatacaagaaatcgtatggctccacatccagctccgacacttgccagaagagctttgtgtcaagttgtaccgacgaggaacccgctgaacccgaggatatggagcggtttgaagagatggtggtgaaggtactgatcaagctccaggcggtgcaggcgatgtaccagatctcccaagaagagcacagccagcttcaggagcagatggagaaactgttggctaagcagaaggatttgaaagaagagctcgatgcgtgtgaacgagaatttaaagagtgtatggagtgccttgaaaagcctatggctccccaaaatgataagaatgagatcaaggagctgcagaccaaactgagagagttacaactgcagtatcaagcatcaatggacgagcaggggcgtctgctggtcgtacaagagcaactggaaggacagctgcaatgctgccaggaagagttacgccagctcagggaaaagcggccatcagtggtcaaggaagcgagaggaaagaacgcaaacaaaaacatgaataaaaacgctaacggcgttaagatgaagaaagtgacaaagccctgctctgatacttccgaatcggatctggagacccggaaatcattggaggttgtgctgtactataaggctagccagcggaagcttgatggtctggcaaaagaggaagagaaaaaagaagagatggaggaggaaaaaaaacaggtgaaggaagaagctaaagaacagtgcggcgacgagctggtcgccgaaccagcggaccccgaagaagccaaaagcacagaggaccaggaggagaacgaagaagacaaggaagaggaagagaaagaagaggattccgaggaggaggaggacgacgccgatagctctttagagtcacctgaggaaaataaccctctgaggctcagcgagagcaagaaaaacatgtttgggttgtggaagccaatggtctttctagctatcgcagcagttgcactgtatgtgcttccgaatatgcgccaacaagaatcagagttttgtctgatggaatag

SEQ ID NO: 218790 - DNA, 309 bp, synthetic construct
  misc_feature 1..309: note = Description of Artificial Sequence: Synthetic coding sequence
  source 1..309: mol_type = other DNA
atgcaagctatggagggcgaggttctgctcccggcactgtatgaggaggaggaggaggaggaagaagaggaggaagaagtggaagaagaagaggagcaagtccagaaagggggttccgtcgggtcactctctgttaataagcatcgaggattgtcactgactgagaccgaattggaagagttaagggcccaggtgttgcaattggttgctgagctggaggagacaagagaactggcaggtcaacacgaggacgactcactggaactccagggtctgctcgaggatgagagactagcctctgctcagtag

SEQ ID NO: 218791 - DNA, 1341 bp, synthetic construct
  misc_feature 1..1341: note = Description of Artificial Sequence: Synthetic coding sequence
  source 1..1341: mol_type = other DNA
atggaggccggagctggcgcaggagcaggagctgctggttggtcttgtcccggtcccggacctacagtgaccacactgggcagttatgaggcctccgaagggtgtgagcggaaaaaagggcaaagatgggggtctcttgagcgccgaggcatgcaggcaatggagggggaggtgctgctgccagcgctctatgaagaggaagaggaagaagaagaggaggaagaggaagtggaagaggaagaggagcaggttcagaaagggggttctgtgggctctttgtccgtcaacaagcaccgtgggctttctctgacagaaaccgagttagaggaactgagagcacaggtcttgcagctcgtggccgaacttgaagaaactagggagttagctggccagcacgaggacgattccctcgagctccagggactgttggaagatgaacgtctcgcctctgcacagcaggccgaagtgtttactaagcagatccagcaactgcaaggcgagctgcgatccctacgtgaggagattagtttactggagcacgaaaaagaatctgagcttaaggagatcgaacaggagctacacctggcgcaagccgaaatccaatccctgcggcaggccgcagaggattccgctactgagcatgagtcagatatcgcctcacttcaggaggacctctgccgaatgcagaacgaactcgaggacatggagaggattcgtggcgattacgagatggaaattgcgagcctgagggcagaaatggagatgaagtccagtgaacccagtgggagtttaggcctttcagactactccgggctacaggaagagctgcaggagctgagagaaaggtaccacttccttaatgaggagtacagagctttacaggagtctaactctagcctcactggtcagttagcggatctcgaaagtgagagaacccaacgtgccacagagcgttggttgcagtcgcagactctttctatgacatccgctgaatcacagacaagcgaaatggacttcctggagcccgaccctgaaatgcagctgctgagacagcagctgagggacgctgaggagcagatgcacggcatgaagaataaatgccaagagctatgctgcgagttagaggagctccagcatcatcggcaggtcagtgaagaggagcaaaggcgtctacagcgggaacttaagtgtgcccagaacgaagtgcttagatttcagacgtcgcacagcgtcacgcagtctagccccactcccaacccccctatttttagcctccctctggttgggttggtggtaatttctgccctactctggtgctggtgggcggaaaccagcagttag

SEQ ID NO: 218792 - DNA, 21 bp, synthetic construct
  misc_feature 1..21: note = Description of Artificial Sequence: Synthetic coding sequence
  source 1..21: mol_type = other DNA
atgcaggctatggaagggtag

SEQ ID NO: 218793 - DNA, 414 bp, synthetic construct
  misc_feature 1..414: note = Description of Artificial Sequence: Synthetic coding sequence
  source 1..414: mol_type = other DNA
atgcaggcaatggagggtgaagtcctgttacccgctctatacgaagaagaggaggaagaagaagaggaggaggaagaggtcgaggaagaagaagaacaggtgcagaaggggggtagcgtggggtccctatccgtgaacaaacatagaggattgagcctgaccgagacggagctggaggagctccgtgcccaggtccttcagttagtggccgagctggaagaaacccgggaactggctggacaacatgaggacgacagtttagaactacaaggcttacttgaggatgagcggctggccagtgcccagcaagctgaggtgtttactaaacagattcagcagctgcagggagagctgcgctctctacgggaggaaatttcactcctggaacatgaaaaggagagcgaattgaaatag

SEQ ID NO: 218794 - DNA, 192 bp, synthetic construct
  misc_feature 1..192: note = Description of Artificial Sequence: Synthetic coding sequence
  source 1..192: mol_type = other DNA
atgcaggccatggaaggggaagtgttgctgccagcgctgtacgaagaagaggaggaggaagaagaggaggaagaggaggtggaagaagaggaagagcaggtccaaaagggagggagcgtcggatctcttagcgtcaataagcaccggggactgtcacttacggagacggaactggaggagctgagggcctag

SEQ ID NO: 218795 - DNA, 870 bp, synthetic construct
  misc_feature 1..870: note = Description of Artificial Sequence: Synthetic coding sequence
  source 1..870: mol_type = other DNA
atggccggagcgggaagaggagctgccgtctcccgggttcaagccggacccggatctcctcggcgagcaaggggaaggcagcaagtgcagccgctcggaaaacaaaggcctgcaccatggccaggacttaggtcaaaagagaagaagaaggttaactgtaagcctaaaaaccaggacgagcaggagataccattccgactgagagaaatcatgagatcccgtcaggagatgaagaatcccattagcaacaagaaaagaaaaaaggcagcccaagtgacctttcgcaagactctggagaaagaggccaagggggaggagcctgatattgccgtgcccaaattcaaacaacgcaagggagaaagcgatggtgcttatatccaccggatgcaacaagaggcccagcatgtgttattcctgtcgaagaatcaggccatcaggcagccagaggtgcaggctgcccctaaagagaaatccgagcagaagaaggccaaaaaagcttttcagaagaggcggctcgataaggtgcggagaaagaaagaagaaaaggccgctgacaggctggagcaagagctactgcgtgacaccgttaagttcggtgaggtggtgcttcaaccccctgaactcacagccagaccacagcgtagtgtcagtaaggaccaaccaggaaggagaagtcagatgctacgcatgctactcagtcccggaggtgtgtcccagcctcttactgcaagtttggcaagacaacggattgttgaggaggagagagagagggctgttcaggcctatagagccctgaaacaaaggcagcagcagctgcatggtgaacggcctcatcttactagccgaaagaagcccgagcctcagctttag

SEQ ID NO: 218796 - DNA, 1656 bp, synthetic construct
  misc_feature 1..1656: note = Description of Artificial Sequence: Synthetic coding sequence
  source 1..1656: mol_type = other DNA
atgcctctgagcaccgccggaatcttgagctctagtagcgcagctagtaatcgctcgagaaacaaggccaggtataggacaaaggccgtaagtagcgaggtggacgaatccctctttggcgacataaagtccccagcgcagggacagtctgacagccccatcgtgctgttaagagacaagcacacactgcagaaaactctcaccgcactaggattagaccggaagccggagacaattcagcttatcacaagggacatggtgagagagttgatcgtgcccacagaggacccttcaggagaaagtctgattatctcacctgaggaatttgagagaatcaagtgggcctcccacgtcctaactcgggaagagttggaagcccgtgatcaagccttcaagaaggagaaggaggcaaccatggacgctgtgatgaccagaaaaaagataatgaagcagaaggagatggtttggaacaacaacaagaaactgagcgacctggaggaagttgcgaaagaacgcgcacagaacctgctccagcgagctaataagctgaggatggaacaggaagaggaactgaaggacatgtctaagattatcctgaacgcgaagtgtcatgccattagagacgcccaaatcctggagaaacagcagattcaaaaggaactggacacagaggagaagcgcctcgaccagatgatggaggtggagcgtcagaagtctatccagcgtcaggaagagcttgagaggaagcggagagaggaaagaattagaggcaggcgacagatagtggagcagatggagaaaaaccaagaagaacgcagcctgctggccgagcagcgggagcaggagaaagagcagatgctggagtacatggaacaactccaggaagaggacctcaaagacatggagcgacgtcagcagcaaaaactgaaaatgcaggcagagatcaagaggattaatgacgaaaaccagaagcagaaagcagaattgctcgctcaggagaagttagctgatcagatggttatggagttcacaaaaaaaaagatggctagggaggccgaatttgaggcggagcaggaacggatccggagagaaaaggagaaagaaatcgcgagactcagggctatgcaggagaaggcccaggattaccaggcagagcaagatgccctgagagccaagcgaaatcaggaggttgccgatagggaatggagacgaaaggaaaaggagaacgcgcgaaaaaagatggagactgaagcagagctccggaaaagtcgcctcgagcaagtcgcattcaaggagcacgcactcgctgtccaggttcagagggatcgggatgagtttgaacggatccttagggctcagagggaacagatcgaaaaggaaagactcgaagaagagaaaaaagctacagggaggttgcagcacgccaacgagctgcgcaggcaagtaagggaaaaccagcaaaaagaagttcagaaccggattgccacatttgaagagggtcggcgactgaaagaagaggcacagaagagaagggagagaatcgacgagatcaagcgcaaaaaacttgaagagctgcgcgctaccggcttgcctgagaagtactgtatcgaggccgaaagaaaggcaaacattctgccagcaactagtgtgaattag

SEQ ID NO: 218797 - DNA, 1401 bp, synthetic construct
  misc_feature 1..1401: note = Description of Artificial Sequence: Synthetic coding sequence
  source 1..1401: mol_type = other DNA
atggtgcgggaactcattgtgcctacagaggatccaagtggagaatcactgataatttcccctgaggaatttgaacgaattaaatgggcctctcacgtattgacccgcgaggagttagaagcaagagaccaggcattcaaaaaagaaaaggaagctactatggacgccgtcatgacacgcaagaagatcatgaagcagaaggaaatggtgtggaataataataaaaagttgtccgacctggaagaggtcgctaaggagcgagcacagaatctactgcagagggcaaacaaactgcgtatggagcaagaggaagaactgaaagacatgtccaagattatactgaacgccaagtgtcacgctatcagagatgcccagatattggagaaacagcagatacagaaggagttagacaccgaggaaaaacggctggaccaaatgatggaagtagagaggcaaaaatccattcagcgacaagaggagctggaacggaaacgacgagaagagcgcatcagaggcaggcgccagattgtggagcagatggagaagaaccaggaagagagaagcctcctcgctgaacagcgagaacaggagaaggagcagatgttggagtacatggagcagctccaggaagaggatctgaaggacatggaacgcaggcaacaacagaaactgaaaatgcaggctgaaatcaagcgaatcaatgacgagaatcaaaagcagaaggcagagctgctggctcaggagaagctcgctgaccaaatggtgatggaatttactaagaaaaagatggccagagaggctgagttcgaggccgagcaggagcggatcaggcgcgaaaaggagaaggaaattgctcgactacgggcaatgcaggagaaagcacaggactatcaagccgagcaggacgcactgcgagccaaaagaaatcaggaagtggccgaccgggagtggagaagaaaggagaaagaaaacgctcggaaaaagatggagactgaagctgaactgaggaaatcgagactggagcaggtggcttttaaggagcacgctctggccgttcaggtgcagagagacagagacgaattcgagagaattctgagagctcagagagaacagatcgagaaagagcggctcgaggaagaaaagaaggccactggtcggctccagcacgcaaacgaactaaggcgacaagtcagagagaaccaacagaaagaggtccagaatcgcatcgcgacttttgaggagggacgcaggttaaaggaagaagcgcaaaaacggagagaacgtattgatgagatcaagagaaagaagctggaagagctgagagctacaggcctgcccgagaaatactgtatcgaagctgagagaaaggctaacatactaccagccacttcagtcaattag

SEQ ID NO: 218798 - DNA, 1884 bp, synthetic construct
  misc_feature 1..1884: note = Description of Artificial Sequence: Synthetic coding sequence
  source 1..1884: mol_type = other DNA
atggaggaggcagataggattctaatccactctctgagacaagcgggaactgccgtcccccctgatgtgcagacattgcgcgcattcaccacagagctggtcgtggaggcagtagtaagatgtctgagagtgatcaaccccgcagttggaagcggactctcacctttactccctctagctatgagtgctagattccggctggcaatgtctcttgcgcaagcctgcatggacctgggataccccctggaactcggctaccaaaatttcctgtatccgtcagagccggatctgcgggacctgctcctgttcttggcggaaagactgcctaccgacgcctcggaagatgctgaccagcccgcaggcgattctgcaatcctgttgagagcaatcgggtcccagattagagaccagctggctctcccctgggtgcccccacatctgagaacccccaagctccagcatcttcaagggtcagccttgcagaagccatttcacgcctctagacttgtggtcccagaactgtcaagccggggagagcctcgcgaattccaggcctctcccttgttactgcctgtgcccactcaggtgccccagcccgttggacgggtggccagtctactagaacaccacgctcttcagctgtgtcagcaaacgggcagggacaggccgggagatgaagactgggtgcatcgaacctctaggctgccgcctcaagaagacacccgtgcccagcgccaaaggctgcaaaaacagctgaccgaacacctgaggcagtcatggggcctgctcggcgctcccattcaggccagggacctcggcgaactgctgcaagcctggggagcaggcgctaagacaggcgcacctaaaggctctcgttttactcactccgaaaagtttactttccacttagagcctcaggcccaggcaacccaggtatctgacgtgccagccacctcccggaggcctgaacaggtgacctgggcagcacaagagcaagaacttgaatccctccgcgaacagcttgaaggcgtaaatcgcagtatcgaggaagttgaagctgacatgaaaactcttggggttagcttcgtgcaagctgaaagcgagtgccgccacagcaaattatcaactgcagagagggaacaagcactgcgactcaagtcccgggcagtcgaactgctacctgacgggacggccaacctggctaaactgcagctcgtggtggagaacagtgcccagcgcgtgatacacctggctggacagtgggagaagcaccgtgttcccctgctagcagaatacagacacctgcggaaactccaggattgtcgggagctcgaatcctcgaggaggctggccgaaattcaggagctccaccagtccgtgagagctgctgccgaggaagccaggagaaaagaggaggtatacaagcagctaatgtctgagctcgagacacttccaagagacgtgtctcgactagcctatacccagcgcatcttagagatcgtcggtaacatacggaagcagaaggaagaaattaccaagattctctctgacacaaaggagttgcaaaaagagattaattctctgagcggcaaactggacaggaccttcgctgttaccgatgagttagtctttaaagacgccaagaaagatgatgcagttcgcaaagcatataaatatctggctgctctccacgagaactgttcacagctcatccaaaccattgaagacacagggaccataatgagggaagtaagagatctggaagaacaaatagagacagagctgggaaagaagaccctcagcaatctagagaagatccgcgaggactaccgcgcactccgccaggagaatgcagggttgctcggacgagtgagggaagcgtag

SEQ ID NO: 218799 - DNA, 1743 bp, synthetic construct
  misc_feature 1..1743: note = Description of Artificial Sequence: Synthetic coding sequence
  source 1..1743: mol_type = other DNA
atggaagaggccgacaggattctgatccactccctgaggcaggcgggaacagctgtgccacccgatgttcagaccctgcgagcctttacgacggagctcgtcgtggaagccgtggttcgttgtctgagggtgataaatccggctgtaggtagcggactgagcccattgttgccattggccatgagcgccaggttccgcctcgcgatgtccctagcacaagcctgcatggatctggggtatccactggagctcggttaccagaatttcctctatccatctgaacctgacctccgcgatctgttgctcttcctggctgagaggctaccaactgatgctagcgaagacgccgaccagccagccggtgattccgccatcctactccgcgctataggtagccagatccgggaccaactagctctgccatgggtgccccctcacctccgcacgcctaagttgcagcacctgcagggctccgcgctgcagaagccttttcatgcctcccggctcgttgttcccgagctctcatccagaggagagcctagggaatttcaggcctcccccttgttactgccagtaccgacacaggtaccccagcccgtggggcgtgtggccagtttacttgaacaccacgcactccagttgtgtcaacagacaggaagagatcgcccaggggacgaagactgggtccatcgtacgtcccggttgccgccacaggaggacacaagggcgcaacgccagcggttacaaaagcagcttaccgagcatctgaggcaaagttggggcctattgggtgcgcctatccaagctcgcgacctgggagaactgcttcaggcctggggcgcaggcgcaaagactggcgctccaaagggctcccgctttacccactcggaaaaatttacctttcatctcgaacctcaggcccaggccacccaggtctctgatgtccccgcaacctctaggagacccgagcaggtgacttgggcagcccaagagcaagagttggagtcactgcgggagcaactggaaggagtaaatcgctcgatcgaggaggtggaagcagatatgaaaacattaggggtgtcatttgttcaagcggaaagtgaatgtcgccactccaagctgtcgacagcggaacgcgaacaggctttacggctcaaatcccgtgctgtcgaattactgcccgatgggactgcgaatctcgccaagctgcagttggttgttgagaatagcgctcagcgggttatccacctggccggacagtgggagaaacatcgggtaccactgctcgccgagtatcgccacctgcgcaaactgcaggattgtcgggaattggagagcagtagacgcctggcagaaattcaggagctacatcaatcagttagagccgctgctgaggaggccaggcgcaaagaggaagtgtataagcagcttatgtccgaattggaaacccttcccagggacgtgtctaggcttgcatacacccagcgaatcctcgaaattgtcggcaacatcaggaagcagaaagaggagattaccaaaatcctcagtgacacgaaagagctccagaaggagattaacagcttaagcggcaagttggatagaactttcgccgtgacagatgaactggtttttaaggacgctaaaaaagacgatgcagtgcggaaggcgtacaaatatttagctgccttgcatttcatcggcgatggcacagtgggatggggtccctggattccaaacaagtag

SEQ ID NO: 218800 - DNA, 603 bp, synthetic construct
  misc_feature 1..603: note = Description of Artificial Sequence: Synthetic coding sequence
  source 1..603: mol_type = other DNA
atggatgacaagaagaagaaacgttctccaaagccttgcctggctcagcctgcacaggctccagggacgttgcgcagggttcccgtgcccaccagccactcaggctcacttgccctgggcctgccccacttaccctccccaaagcaaagggccaaatttaaacgcgtgggcaaagaaaagtgtcgccctgtattagcaggtggaggctcaggttccgccggaacccctttgcaacactcatttctgaccgaggtgactgatgtgtacgaaatggagggaggtctcctcaacctgctaaatgactttcatagtgggcgactccaagctttcggcaaggaatgttccttcgaacagctggagcatgtccgcgagatgcaggagaaactggccagactacatttctctctggatgtgtgtggagaggaggaggatgatgaggaggaagaggacggcgtgactgagggcttacccgaggaacagaagaagactatggctgatagaaatcttgaccagctgctctcaaatctggaggatttgagcaattccattcaaaagctccaccttgccgaaaacgccgaaccagaggagcaatctgcagcttag

SEQ ID NO: 218801 - DNA, 690 bp, synthetic construct
  misc_feature 1..690: note = Description of Artificial Sequence: Synthetic coding sequence
  source 1..690: mol_type = other DNA
atgtgggctgccggtagatggggtcccacctttcctagctcctatgccggatttagcgctgactgcaggcccagaagccgtccttctagcgactcttgcagcgtgcccatgactggtgcacggggacagggactggaagtggtccgatctccgtccccccctcttcccctcagctgttcaaattcaacccgctccttgctgagccctctagggcatcagagtttccagtttgacgaggatgacggagacggggaagatgaagaggatgtagatgacgaggaggacgtggacgaggatgcgcatgacagtgaagcaaaagttgcaagtcttagaggaatggagctgcagggctgcgcatcaactcaggttgagtccgagaacaatcaggaggaacagaaacaagtacgactgccagagtctcgtttgactccttgggaagtatggtttatcggaaaagagaaggaggagagagacagactccagcttaaggccttggaggagctgaatcagcagctagagaaacgcaaagaaatggaggagcgggagaagcgcaaaattattgccgaagagaaacacaaggaatgggtccagaaaaaaaatgaacaggtgagaagggggaagtggattcacacccttactagcttattacagaatatcagttcttattatacttcactgccgagattttag

SEQ ID NO: 218802 - DNA, 1122 bp, synthetic construct
  misc_feature 1..1122: note = Description of Artificial Sequence: Synthetic coding sequence
  source 1..1122: mol_type = other DNA
atgtgggccgctggaagatggggtcccaccttcccatcctcctacgctggattctctgccgattgcagacccaggtccagaccatcaagcgatagctgtagtgtacctatgaccggagctcgtggacagggcctcgaggtggtccgctccccctctccccctcttccattatcttgttctaactcaacacggagcctgttgtccccactggggcaccaatctttccaattcgatgaggatgatggcgacggagaagacgaagaggatgtggacgacgaggaggatgtcgacgaggatgcgcacgactccgaggcgaaagttgcctcactccggggaatggagctccaaggctgtgcaagtacccaggtggaatcagagaacaatcaagaggagcagaagcaggtgcgactgcccgaatcaagactcaccccctgggaggtctggttcattggcaaagagaaggaggaacgggaccgtctgcagctgaaagcccttgaagagctaaaccagcaactggagaagaggaaagagatggaggagcgcgagaaaaggaagatcattgcagaggagaaacacaaggagtgggtgcagaaaaaaaatgaacaaaaacgcaaagaacgcgagcaaaagattaacaaggagatggaggaaaaggccgcaaaagagctggaaaaggaataccttcaggaaaaagccaaagagaaataccaagagtggctgaaaaaaaagaacgctgaggaatgtgaaaggaagaaaaaggaaaaagagaaggagaaacagcaacaggctgagatccaggagaagaaggaaatagctgagaagaagttccaggaatggctcgagaatgctaaacataaacccagacccgctgccaaatcctacggctacgctaacggtaaactgactggcttctacagcgggaatagctaccccgagccagctttttacaatcccataccttggaagcctattcatatgcctcctccaaaagaggcgaaagacctctccgggagaaaatcgaaacggccagtcatatctcagcctcacaagagttcgtcactcgtgattcataaggccaggagcaacttgtgcctcgggactctctgtaggatccagcggtag

SEQ ID NO: 218803 - DNA, 2268 bp, synthetic construct
  misc_feature 1..2268: note = Description of Artificial Sequence: Synthetic coding sequence
  source 1..2268: mol_type = other DNA
atggagtacatctttcccaacaccggagtcctgtggagctggttaatcaacattctgtgcaatagacgcatcgtctggtttacgagtagccagcttcccaggggaccgccagccagttcagggggacactcgtttcacactctgcgggaacgcagcgagagtcggttgttcgtcgagtcttacgccgcagcctggcagcctcccggaacatcgggcggagcctcttgttgtagcagcctgtccgcccaggtgatgtcatctgaatttctggctgaactccactgggaggacggatttgctattcccgttgcaaatgaagagaacaagctcctagaggaccaactatccaaattaaaggatgagagagctagcctgcaagatgagctgcgggaatatgaggaaaggattaactcaatgacctctcattttaagaatgtgaaacaggagctctctattacccagtcgctctgcaaagctcgagaacgggagacagaatctgaagaacattttaaggccatcgcccagcgcgagctgggaagggtgaaagatgaaattcagcgcttggagaacgagatggcctctatcctggagaagaagtccgacaaggagaacgggatcttcaaggccacgcaaaagttggacggcctcaaatgccaaatgaactgggaccagcaggccctggaggcctggttagaggagagtgcccataaggactccgacgccctgacacttcaaaagtacgcacagcaggatgacaacaaaatccgggcactgaccctccaactggaacggctaacactggaatgcaaccaaaagcgaaaaatccttgacaacgagcttaccgagactatcagcgcccagctcgagctggacaaggcagctcaggattttcgcaaaattcacaatgagcggcaagaacttataaaacagtgggagaataccatagagcagatgcagaagagggatggcgacatcgacaactgcgccctcgagctagctcggataaagcaagaaacacgcgagaaggaaaacctggtgaaagaaaaaattaagttcctagaatcagaaatcggtaataacacagagtttgaaaagaggatctcagtcgcagaccgcaaactgttaaaatgtcgtacggcctatcaggatcatgagacatcacggattcagctgaagggcgaactcgattccctgaaggctactgtgaaccggacatcctccgaccttgaagcccttcgcaagaacataagtaaaatcaagaaggacatacatgaagagactgcaaggctgcagaagaccaaaaaccacaatgagattattcagaccaagctaaaagagatcactgagaaaaccatgagtgttgaagaaaaggcaacgaatctggaagatatgctgaaggaggaggagaaagatgttaaggaggtagatgtgcaactcaatctcatcaagggtgtacttttcaagaaggcacaagaactgcaaaccgagaccatgaaggagaaggcagtcctgtccgagattgaaggaacccggtccagcctgaagcatctcaatcatcagttgcagaaattggactttgagacactgaagcagcaggagattatgtactcccaggatttccacatccagcaggtggagcggaggatgtcccggctgaagggcgagatcaacagcgaggaaaaacaggccctcgaagctaaaatagtggagctgaggaagagtttagaagaaaagaagtctacatgtggccttctggagacacaaatcaagaaactgcataacgatttgtacttcattaagaaagcccattccaagaactccgatgaaaagcagtctttgatgactaaaattaacgaactgaatctcttcatagacagaagcgagaaagagcttgacaaggccaagggatttaagcaggaccttatgattgaggacaaccttctgaagcttgaggtaaaacgtacccgcgagatgttacattctaaggccgaagaagtcctcagcttggaaaagcggaagcagcagttgtataccgctatggaggagcggaccgaggagatcaaggtgcataaaaccatgttggcctctcaaatacggtacgtggatcaggagcgggaaaatattagcacagaattccgcgagcgtctttcgaagatagagaaactgaagaatcggtacgagattcttacagtagtgatgctgccaccagagggggaggaagaaaagacacaagcttactatgtaatcaaggtcatgtctatgtcctag

SEQ ID NO: 218804 - DNA, 2826 bp, synthetic construct
  misc_feature 1..2826: note = Description of Artificial Sequence: Synthetic coding sequence
  source 1..2826: mol_type = other DNA
atgagctccgagttcctcgccgaattacattgggaggatggatttgccattcccgtggccaacgaagagaataaacttctagaggaccagctctctaagctgaaggacgagcgcgcatcgcttcaggatgaactacgtgaatacgaggagagaattaactcgatgacgtcacacttcaagaacgtgaaacaagagctctctattacacagtcactttgtaaggcacgggaacgagagacggagagtgaagaacacttcaaagccatcgctcagcgcgaactgggtcgggtcaaggacgagattcaaagactggagaacgagatggcctctattctggagaaaaagtcagacaaagaaaacggtatcttcaaggccactcagaagctcgacgggctcaaatgtcagatgaattgggatcaacaggctctggaggcctggctggaggaatccgcccataaggacagtgacgccctgacgctccagaaatatgctcaacaagacgataataagatacgggctttaacattgcagctggagcgcctgacgttggagtgcaaccagaaaaggaagatcctcgacaatgaactcacagaaaccatctctgcacagttggagcttgacaaagccgcacaggattttcggaaaattcataacgaaagacaggagctgatcaaacaatgggaaaatactatcgagcagatgcagaaaagggacggagatatagacaactgcgccctggaacttgctcgcataaagcaagagacacgcgaaaaagaaaacctagtgaaggaaaagataaagttcctggagagcgagataggtaataacaccgaattcgaaaagcgaatttctgtggctgatcgtaaactcctgaaatgtcggaccgcctaccaagaccacgagacctcacgcatccagctcaaaggcgaactcgacagcctgaaagccacagttaatcgcacttctagcgaccttgaagccctccggaagaatatcagcaagattaaaaaagacatccacgaggagaccgctaggttacagaagacgaagaaccacaatgagatcattcagacaaagctgaaggaaataactgaaaagaccatgtcagtggaggagaaagctaccaatctggaggatatgctgaaggaagaggagaaggatgtgaaggaggtcgatgtccagttgaacctgatcaaaggtgtgctgtttaagaaggcccaggaactccagaccgaaaccatgaaggagaaagcagtgctctcggagatcgaggggactaggagtagcctcaaacaccttaaccaccagcttcaaaagcttgactttgaaactctgaagcagcaggagatcatgtattctcaggatttccacatccaacaggtcgagaggcgcatgtctcgcttaaaaggggaaatcaattccgaagagaagcaagcactcgaggccaaaatagtcgagttgcgtaagagcctagaggagaagaagtcgacgtgcgggctcttggagacccaaatcaagaaacttcataacgatctctattttatcaagaaagcccattccaagaactccgacgagaagcagtccctgatgaccaagattaatgagctcaacctgttcattgataggtcagagaaagagctggacaaagctaagggttttaagcaagatctgatgatcgaggataaccttctgaaactcgaggtaaaaagaactagagaaatgctccactctaaagcagaggaagtgctttcactggaaaaacggaaacaacagttgtacacagccatggaggagcgtacagaggaaataaaggttcacaagactatgctagcttcccagatacgatatgtggaccaggagcgcgagaacatcagcactgaatttagggagcgcttgagcaaaatcgaaaaactgaaaaatcggtacgaaatactcacagtggtgatgctaccacctgaaggagaagaagaaaagactcaggcttattacgtgatcaaggccgcacaagagaaggaggaactgcagcgggagggggattgtctggatgccaagatcaataaagcggagaaggaaatctacgccctagagaacacgctgcaagtactgaactcatgtaataacaattataagcagtcctttaagaaagtcacaccgtcttccgacgaatacgagctgaagattcagcttgaagagcaaaagcgggctgtggatgagaaatatcgatataaacagcgacaaatacgtgagttacaggaggatattcagtcgatggagaacacattagatgtcatcgagcacctggctaacaacgtgaaagagaagctaagcgagaagcaagcttacagtttccagctctctaaggaaacggaggagcaaaagcccaaattggaacgagtaaccaaacagtgtgctaagttaaccaaggagattaggttactgaaggacaccaaggacgagactatggaggagcaggacattaagctgagggagatgaagcaattccacaaagttatcgatgaaatgctcgtcgacatcatcgaggagaataccgaaatacggatcattttgcagacttactttcaacagagcggtttggagttgccaacagcatccacaaaaggaagcaggcaatcaagccggagtccatcacacacctctctatcagctcggagctcaaggtcgacgtctacatccacaagtcagtcctctatcaaagtcctcgagctgaaatttcctgcgtccagttccctggtgggatccccatctagaccatctagtgctagttcaagctcgagcaatgtgaaaagtaaaaaaagttctaaatag

SEQ ID NO: 218805 - DNA, 1740 bp, synthetic construct
  misc_feature 1..1740: note = Description of Artificial Sequence: Synthetic coding sequence
  source 1..1740: mol_type = other DNA
atggccgagcccggtggcgcagctggtcgaagccatcctgaggatgggtccgcttctgagggcgaaaaggaaggaaataacgagagtcacatggtctcccccccagaaaaggacgatgggcagaagggtgaagaagccgttggttcaacagaacatcccgaagaggtgaccacgcaagctgaagccgctattgaggaaggagaagtagagacagagggtgaagcggctgtagaaggtgaggaggaggctgtctcttacggagacgctgagtccgaggaagagtattactacacagagacttccagcccagaaggccagatctcagccgctgataccacgtacccctacttttcaccccctcaggaactacctggggaggaagcttatgatagtgtgtccggggaggccggtctgcaaggatttcaacaggaggctactgggccacccgaatcccgcgagagacgcgtgacaagccccgagccctcacacggagtactgggaccatccgaacaaatggggcaggtgacttcaggaccggcagtaggacgcctgaccggcagcactgaagagcctcaggggcaggtgctgccaatgggcgtgcaacaccggttccggttgtcacacggtagcgacattgaaagctcagacctggaagaattcgtatcccaggagcctgtgatcccccctggagttcccgatgcccaccccagagaaggggaccttcccgtcttccaggatcagattcagcaaccttcgacggaggaaggcgctatggccgaaagggtggaaagtgagggctccgacgaagaggccgaagacgaaggcagtcagctggtggtcttagaccccgaccatccactcatggtacggttccaggcagcccttaagaactatcttaacaggcagatcgagaagctgaaactggaccttcaggaactcgtagttgctacaaaacagtcaagagcacagaggcaggagttaggggtcaacctctacgaggtgcaacagcacttggtgcatctgcagaagctgttggagaaaagccacgacaggcacgctatggccagctctgaacggcgtcaaaaagaggaggagctgcaggccgcaagggccctctacaccaagacatgcgccgcagcaaatgaagagcgaaaaaagcttgcggctcttcagaccgagatggagaacttagcactgcacctcttctacatgcagaacatcgaccaggacatgcgtgatgacatccgagtcatgacgcaggtggtcaaaaaagcagaaaccgaacgcatccgggcagaaatcgaaaagaagaagcaggatctctacgtggatcagctcacaactcgcgctcagcaattggaagaggacatcgcactttttgaagcacagtatctcgctcaggcagaagatactaggattctcagaaaggccgtcagcgaggcgtgcacagaaatagatgcaatctccgtggagaaaagaaggatcatgcaacaatgggcgagctcactcgtggggatgaagcatcgcgacgaggcccaccgcgctgtgcttgaggcattaagtgtgagtctcgaaaggtttcctagtcaaaatattaatacagctagaagtcgcttgtcaaccacatggcactctgctggcattctgttacggggttctttcctgcccggagcttctagagccttcgcctctgtgtgttatgggggagcggctgtggataaccgcatccgggagtgctag

SEQ ID NO: 218806 - DNA, 1437 bp, synthetic construct
  misc_feature 1..1437: note = Description of Artificial Sequence: Synthetic coding sequence
  source 1..1437: mol_type = other DNA
atggctgaacctgggggagccgctggccgtagtcatcctgaggatggctccgcctcagaaggtgaaaaagagggaaacaacgaatcccacatggtcagccctcctgagaaggatgatgggcagaagggggaggaggccgtgggaagtactgagcaccccgaagaggtcacgacccaggccgaagccgcaatagaggaaggcgaagtggagacggaaggagaggcggctgtcgagggcgaggaagaagcagtcagctatggggatgcagagagtgaggaggagtactactataccgagacctcctctcctgagggtcagattagcgccgcagacacaacttatccctacttctcaccaccacaggagctgcccggagaggaagcctacgattcagtcagcggcgaggccggacttcaggggtttcagcaggaggctactggcccacccgaatcacgcgagagacgagtgacctcccccgaaccgtctcatggtgttttgggcccatctgaacaaatggggcaggtgacttcaggcccagcggtcgggcgtctcaccgggtccaccgaagagccccagggacaggtactacccatgggcgttcaacatcggtttcggttatcccacggcagcgatattgagtcttctgacctagaggaatttgtaagccaagagcccgtaattccacccggtgtcccggacgcccacccgagggagggtgatctgccagtgttccaggaccagattcaacaaccatccacagaggagggagcaatggccgaaagagtggaatctgaaggctccgatgaagaagccgaggacgaggggagccagttggtggtgctggaccccgaccatccccttatggtgcgatttcaagcagccctcaaaaattacctgaatagacagattgagaaactgaagctggacctacaggaactggtggtggcaaccaaacagtcccgggctcagcggcaggagctgggtgtgaacctatacgaagtacagcagcacctagtgcacctgcagaaactcctggagaaatcacacgaccgacatgccatggcaagctcggaacgcaggcagaaagaggaagagctccaggccgcaagggcactatacacaaaaacctgtgctgcggcaaatgaggagaggaaaaagctggcagccctgcagaccgaaatggagaacttggcccttcacttattctacatgcagaacatagatcaggacatgagagatgacattagagtgatgactcaggtggtgaaaaaggcggaaactgaaagaatacgtgcagagattgaaaagaagaaacaaggtgttggggacacaggagcagccttcatcccaaagactacacagggcgaccaggtgagcggcaggggtaaaaaaaaacctggaacagttgtcgctcgcgtcagccccgctgagctttag

SEQ ID NO: 218807 - DNA, 3093 bp, synthetic construct
  misc_feature 1..3093: note = Description of Artificial Sequence: Synthetic coding sequence
  source 1..3093: mol_type = other DNA
atggccgagcctggcggagcggcagggcgaagccatccagaagacgggtccgcaagcgaaggagagaaggagggcaacaacgaaagccacatggtgtctccccctgaaaaagacgatggccagaaaggggaggaggcagtcgggagtaccgaacatcccgaggaggtaactactcaggcggaagccgctatcgaagaaggggaggtcgaaactgaaggcgaggctgctgtcgaaggcgaggaggaagccgtatcatatggagatgctgaatccgaagaagagtactattataccgaaacctcctccccggaaggacagatctctgccgcagacacgacttacccatacttctcgccacctcaagagttgcccggagaagaagcttacgactccgtgtcgggcgaagcagggctgcagggattccagcaggaagccactggcccaccagaatcgcgggagcgaagggtgaccagccccgaacctagtcacggggttctgggccctagcgaacagatggggcaggtcacttccggaccggctgttggaagacttacaggatccacagaagaaccccaaggtcaggtgcttcccatgggagtccagcaccggtttagattgagccacggatccgatatcgaaagttccgacctcgaggaattcgtctcgcaggagcctgttattccgcctggagttccagacgcccacccgcgtgagggtgatctgcctgtgtttcaggaccagatacagcagcccagtaccgaggagggagcgatggctgaaagagtcgaatccgaggggagtgatgaggaggccgaagatgagggaagtcagctggtagttctggaccccgaccacccattgatggtccggtttcaagctgcgctgaagaactacctcaaccggcagattgagaagctcaaattggatctgcaggaactcgttgtggcaacgaaacagtccagggcacagaggcaggaattaggggtgaacttatacgaggtccagcagcacctggtccacttacagaaactcctggagaagtcccacgaccgacatgccatggcttcctctgagagacgccagaaagaggaggaattacaagctgcccgagctctctacaccaagacttgcgcggctgccaacgaggagcggaagaagctagccgcactgcaaaccgaaatggagaatctggctctgcacctcttctatatgcagaacattgatcaggacatgcgagatgatatcagggtgatgacccaggtggtcaaaaaagcagagacagaacgtatccgggctgaaattgagaaaaagaaacaggatctatatgtcgatcagctgactaccagagcacaacagctggaagaagacattgctctgttcgaagcccagtacttagctcaggcagaggacacgcgtatccttcgaaaggccgtaagtgaggcatgcacagagatcgatgctatcagtgtggagaagcgacggattatgcagcagtgggcttctagtctggttggaatgaaacatagagatgaggcacacagagcagtgctagaagctctgcgcggatgtcagcaccaggccaagagcactgatggggagattgaggcttacaagaaatctatcatgaaggaagaagagaagaatgagaagctggcctcaattctgaaccgtactgagacagaggccaccctccttcaaaagctcacaacacagtgcctgacgaagcaagtggcactgcagtctcagttcaacacatataggcttactctgcaggacactgaagatgcactgtcacaggaccagttggagcagatgatcttaactgaggaattgcaggctatcaggcaggctatccaaggggagcttgaactgagaaggaagaccgacgccgcaattagggagaagctgcaggaacacatgactagtaacaagaccacaaaatattttaatcaacttatccttagacttcagaaggagaagactaacatgatgactcatctctccaagattaatggggatatcgcccagacaacactcgatattactcacacctctagtcgtctggacgcacaccagaaaactctggtggagctggaccaggacgtgaagaaagtgaatgagctgatcaccaacagccagtctgagattagccgacgcactatcctgatcgagcgaaaacaagggctgattaacttcttaaacaagcagctagaaaggatggtttccgaactgggtggtgaggaggtaggacccctcgagttagagatcaagcgactttctaagctgatagatgagcatgatggaaaggccgtgcaggctcaggtgacctggctgaggctacaacaagaaatggtcaaggtcactcaggagcaggaagagcagctggccagcttggatgcctctaaaaaggaactgcatataatggaacaaaagaagctccgcgtggagtctaagattgaacaagagaaaaaagagcagaaggagatcgagcaccacatgaaggacctggacaatgatctgaagaagttaaacatgctgatgaataaaaatcgatgttctagcgaggagctcgagcaaaacaatagagtaactgagaacgagtttgtgcgctcactgaaagcaagcgaaagagaaacaatcaagatgcaagacaagctgaatcagttgtccgaggaaaaagccacccttctcaaccaactcgttgaagcagagcaccagattatgctgtgggaaaagaaaatacagctggcaaaagagatgaggagcagtgtggattcggagataggtcagaccgagattcgtgcgatgaagggtgagattcaccgaatgaaaaagtactgtcggacgacacaagacgcacataggcatgttcatgagcaacatgggacccacgcagggacatgtacgaagaataccggcagggcccaggctcgcgcacgcaccaccagggatgctagaggccacgtgcacgagcagcatggcacacgcgctggcacgtgtacaaataataccgggagagcgcaggcccgagcaagaacccgagacgcgaggagacacgtgcacgaacaccgcactcataccgctcgggcatag

SEQ ID NO: 218808 - DNA, 3429 bp, synthetic construct
  misc_feature 1..3429: note = Description of Artificial Sequence: Synthetic coding sequence
  source 1..3429: mol_type = other DNA
atggccgagcccggaggtgccgctggcaggagtcatccagaggacggatctgcatctgagggcgaaaaagaaggaaataatgagagtcatatggtcagccctccagaaaaagatgatggacagaaaggcgaggaggccgtgggctccacagagcaccccgaggaggtcaccactcaggccgaagcagcaattgaggaaggagaagtggaaaccgaaggcgaagctgccgtcgagggagaagaggaggcggtgagttatggcgatgctgagagcgaggaagagtattattatactgagaccagcagccctgagggccaaatctctgcagcagacacgacgtatccctacttctctccaccgcaggaattgcccggtgaggaagcatacgacagtgtgtcaggcgaggcaggcttgcagggttttcagcaggaggcaaccggccctcccgagagcagagaaagaagagttacatcgcccgagcccagtcacggagtcttaggacccagcgagcagatggggcaggtaaccagtggaccagccgtgggcaggctgacaggctctacggaagaacctcagggacaggttctgccaatgggggtgcaacacagattcaggttaagtcacggctcagatatcgaatcaagcgacctggaagaattcgttagccaagaacctgtcatccccccaggtgtgcccgacgcccatccaagggaaggcgatctgcctgtgtttcaggaccagatccagcagccatccacggaagaaggcgctatggcagagcgtgtggagtccgagggctccgatgaggaagcagaggatgaggggtcccagctggtcgttcttgaccccgaccatccacttatggttcggttccaggccgcattgaagaattacctcaaccgacagatagagaaacttaaactggaccttcaagaactcgttgttgccacaaagcagtccagagcgcagcgtcaggaactgggggtgaatctgtatgaggtacagcagcatttagtgcaccttcaaaagctgctcgagaaaagccacgaccggcacgctatggctagttcggaacgacgccagaaggaggaggagctgcaggcggcaagagccctctacactaagacctgcgcggctgccaacgaagaacgcaagaaactagcagcactgcaaaccgaaatggagaaccttgcccttcatctgttctatatgcagaacattgaccaagatatgcgggatgatatacgcgtgatgacgcaggttgtcaagaaggccgaaaccgagagaatcagagcagaaatcgagaagaaaaagcaggacctatacgttgaccagctgaccacacgggctcaacaactggaagaggatatcgcccttttcgaggctcagtatttagcacaggctgaggacacacgcattctgcgaaaggccgttagtgaggcctgcacggaaatcgatgctatctcggtcgaaaaaagaagaatcatgcagcagtgggcttcttcactggtcggcatgaagcaccgggacgaagctcacagagctgtcctggaagccctgaggggctgtcagcatcaggccaagagtactgatggcgaaatagaagcttacaaaaagtctattatgaaagaggaagaaaaaaatgaaaaattggcatcaattctgaaccgcaccgaaaccgaggcaacactcctccaaaaactgaccacccaatgcctgaccaagcaggtcgcattgcagtcacaattcaacacttaccgtctgactctgcaggacactgaagatgctctttcccaggatcagctggaacagatgatcctgaccgaagagctacaggctattagacaggccatccagggggaactcgagctgcgtcgcaaaaccgacgccgcaatccgcgagaaactgcaggagcacatgaccagcaacaaaactaccaagtatttcaatcagctgattcttagactacagaaagagaagacaaatatgatgacccacttatccaaaatcaatggagacatcgcgcaaactaccctagacatcacccatactagctcccgcctcgatgcgcaccagaagaccttggtggaactcgatcaggacgttaaaaaggtgaacgaactgattaccaatagccagtccgaaattagcaggcggacaattctgatcgagaggaaacagggattgattaatttcctcaataaacaactcgagcgtatggttagcgagctgggcggagaggaggtgggccctctggagctcgagattaagcggctctccaaattgatcgatgagcatgatggcaaagcagtgcaggcccaggtgacctggcttagactgcagcaagagatggtaaaggtcacccaggagcaagaagagcagttagcaagccttgatgccagcaagaaagagctgcatatcatggagcaaaagaaactacgggtggaaagtaagatagagcaagagaagaaggaacagaaggaaattgagcaccacatgaaagacttagacaatgacctcaagaagctcaatatgctgatgaacaaaaatcgctgctctagcgaggagttggaacagaacaatcgcgtgaccgagaacgagttcgtacggtcactgaaagcctcagagcgggaaaccataaagatgcaggacaaactcaatcagctgtctgaagaaaaagcgaccttgctgaaccagctggttgaggctgaacaccagattatgctgtgggagaagaaaatccaactcgccaaagaaatgagaagctcagtggattcagaaattggacagacagagatccgcgcaatgaagggcgaaatacaccggatgaaggtgcggctgggccagttactaaaacagcaggaaaagatgatcagggctatggaacttgctgtggcccgacgcgaaactgtgactacacaagcagaaggccagcggaaaatggatagaaaggcccttactcgaactgactttcatcacaaacagctggagctgcgcaggaagattcgagatgtacggaaggctacagatgaatgtacaaagacggttttggaactggaagagacacagcgcaacgtgagttctagtctgttggaaaagcaggaaaagttatccgtgattcaagctgacttcgacactcttgaggcagacctgacacgattaggggctctgaaacgccagaatctatctgaaatcgtggcactccaaacccggctgaaacacctgcaggccgtgaaagaaggtcgatacgtgttcttatttaggtcaaagcaatcgttagtgctcgaacgacagaggctcgataaacggctcgccctgattgccactatactggaccgcgtgcgagatgaatacccccaattccaggaggcattgcataaggtaagtcaaatgattgcaaataagcttgagtcccccggtcctagctag

SEQ ID NO: 218809 - DNA, 921 bp, synthetic construct
  misc_feature 1..921: note = Description of Artificial Sequence: Synthetic coding sequence
  source 1..921: mol_type = other DNA
atggcagaggtatccatagatcagtccaaattgccgggagtcaaggaagtttgtagggactttgcagtgcttgaggaccacacactggcccactctctgcaggagcaggagattgagcatcacttagcgtccaatgtccagcgaaataggttggtccagcatgaccttcaggtcgcgaagcagcttcaggaggaggaccttaaggcccaggctcaactccagaagaggtacaaggacctcgagcagcaggattgtgaaattgctcaggagatacaggagaagctggcaattgaggcagagcggaggcgtatccaggagaagaaagatgaggacatcgcaagattgctgcaggagaaagaactgcaggaggagaagaagcgtaaaaagcacttcccagaattccccgcaacacgggcttacgcagattcctattactacgaagacggaggcatgaagccacgagttatgaaagaagcagtgtccactccctcgcgcatggcgcatcgtgaccaggagtggtacgacgcagagattgcgaggaaactccaggaggaagagctgctggccacacaggtagacatgcgggcagctcaagtggcccaggatgaggagattgcgcgacttcttatggcggaggagaagaaggcgtataagaaagccaaggagcgagagaagtcctcgttagacaaaaggaaacaagaccccgagtggaaaccaaagacagcaaaggccgctaatagcaaatctaaggaatcagatgagccccatcatagcaaaaacgagcgcccagccaggccccctcccccaatcatgacggatggggaggacgcggactatacacattttaccaatcagcagtcttccactaggcacttttctaaatccgaatcctcacacaagggctttcactacaagcattag

SEQ ID NO: 218810 - DNA, 1449 bp, synthetic construct
  misc_feature 1..1449: note = Description of Artificial Sequence: Synthetic coding sequence
  source 1..1449: mol_type = other DNA
atggccgaagtctcaattgaccagagtaagctccctggtgtcaaagaggtgtgccgggacttcgctgtgttggaggaccatactctggctcactcattgcaggagcaggagattgaacaccatctggcaagcaacgtgcagcggaaccgcctagtgcaacatgatttgcaggtcgccaagcagctccaggaggaggacctgaaagctcaggcccaacttcagaagaggtacaaggacctggaacagcaggactgcgagatcgcacaagagattcaggagaagctcgccattgaagcagagagacgtcggatccaggagaaaaaagatgaagacattgcacggctgctgcaggagaaagagctacaagaggagaaaaaacgcaagaaacactttccagagttccccgcaaccagggcctacgccgattcatactactacgaggacggagaccaaccgggaagccggcgagccagggagttaggcagtggtttctctaggccttgcaggttacagagggatggcaagaccgtgaagcacaagaaggaaaaacctgagcacccactggaaaatctggaagaacctgaacagcactgcagctctaaaaggtccctctctagtagttcttcggggaaagggagagacaatccgcacatcaacaacgagcagcatgagaggaagaggtccacacaggaacgtccccgacgcccactgttgccaaccatttctggtgaagtgtttcttagcaccgagtgtgacgactgggagaccaagattaaccaccagacacgcaactgggaaaaacaaagtcgacaccaggacaggctgtcccccaaatcctcccagaaagccggactgcattgtaaagaggtggtttatggaagagatcatggccagggtgagcaccgcaagcgaaggcacaggcccagaacccctccattctccgagagcgaagagcaattacacttgcatgatgccggaatgaagccccgtgtgatgaaggaagcagtgagtactccttctaggatggctcatcgggaccaggagtggtatgacgccgaaatcgcgcgtaagttacaggaggaggaactccttgcgacccaggtcgatatgagagctgcccaggtggcacaggacgaagaaatagcaagactcctgatggctgaggagaaaaaggcttacaagaaggccaaggaacgggagaagtcgagcttggataagagaaaacaagatcctgagtggaagccaaagactgccaaggcggcaaattccaagagtaaggaaagtgacgagccgcatcacagtaagaacgaacgcccagcgaggccaccccctcctataatgactgacggagaggacgcggattatacgcattttactaaccagcaatctagcaccagacacttcagcaagagtgagagctctcacaagggctttcattacaagcattag

SEQ ID NO: 218811 - DNA, 1425 bp, synthetic construct
  misc_feature 1..1425: note = Description of Artificial Sequence: Synthetic coding sequence
  source 1..1425: mol_type = other DNA
atggcagattcggcatcagaatctgacacagacggcgctgggggtaattccagcagttccgcggcaatgcagagtagttgtagctccacatccggcggaggaggcggagggggtggaggtggtggcggtggcaaaagtggcggtattgtgatctccccttttagactggaggagctgacgaaccggctggcatctttgcaacaagagaataaagtccttaaaatagaactggagacatataaactgaaatgcaaagcattacaggaggaaaatagggatttgcgcaaggcatcagttaccatccaagccagggccgaacaagaggaggagtttatatctaataccttgtttaagaaaatccaggctctgcaaaaagaaaaagagacactggccgtcaattatgagaaggaggaggagttcctgaccaacgaactgagtaggaagcttatgcagcttcaacatgagaaggctgaacttgagcagcacctcgagcaagagcaggaatttcaggttaacaagctgatgaagaaaatcaaaaaactcgaaaatgatacaatttctaagcagctgactctggaacagctgcgaagggaaaagattgatctggagaacacacttgagcaagaacaagaggccctggtgaaccgtctatggaaacgaatggacaaacttgaggctgagaaacgtattctccaggagaaactcgatcagccagtgagtgcccctcctagtccgagggatattagcatggagatcgattcgcccgaaaatatgatgcggcatattcggtttcttaagaatgaggtggaacgtctgaagaagcaactgagggcggcacaactgcagcactcagaaaagatggcacagtaccttgaggaggagcgccacatgcgggaagaaaatctaagactgcagcggaaactgcagcgcgaaatggaaagaagagaggctctctgccgacagctctcagaatcagagtcctctcttgagatggacgacgaacggtacttcaacgaaatgtctgcccaagggctgcgccctcgcaccgtgtcctcaccaatcccctacacaccgtctccctcatcaagccgaccaatcagtccaggcctcagctatgccagccacactgtggggttcaccccgcctacctcattaacacgagccggtatgtcatactacaacagtccaggcttgcatgtgcagcacatggggacctcacacgggatcaccaggccttcgcctcgacgttccaactcaccagacaagttcaaaagaccaacccctccccctagtcctaacacgcagacacccgtgcagcctcccccaccacctccccctccacccatgcaaccgacggtacccagcgccgctacctctcagccgactccttcacaacactctgcacacccatctagccagccctag

SEQ ID NO: 218812 - DNA, 2055 bp, synthetic construct
  misc_feature 1..2055: note = Description of Artificial Sequence: Synthetic coding sequence
  source 1..2055: mol_type = other DNA
atgaatcccccagccgctttccttgccggtcgacaaaacatcggctcggaggttgagatctcaaccattgagaagcaacggaaggagttacagctgctgatcggggaattaaaggacagggacaaagagctgaacgatatggtcgcagtgcaccagcaacaactcttgtcatgggaggaggaccgacagaaagttctgaccttggaggaaagatgcagtaaactggagggggagctccacaagcggactgagatcatccgcagcctgacaaaaaaagtaaaggctctggaatctaaccagatggagtgccagaccgcccttcagaagacccagctgcagctgcaagagatggcacagaaagctacccactcgagcctactgagtgaagatctcgaggccagaaatgagaccctgtccaatactcttgtcgagctgagcgcacaggtgggccagttgcaggccagagagcaagccctcaccactatgattaagctcaaggataaagacatcatagaggcagtgaaccacatcgcggactgttctgggaaattcaaaatgctagaacacgcactccgcgacgctaaaatggccgagacttgtattgtcaaggagaagcaagactacaaacaaaagctgaaggccctgaagattgaggtgaataaactgaaggaggacctaaacgaaaaaacaacagagaataatgagcagagggaggaaattatacggctgaagcaggagaaatcctgtctccacgatgagttgctgtttaccgtggagcgagaaaaacgcaaggatgaacttcttaacatcgccaaatccaagcaggagcgcaccaactcagaactgcacaatctgaggcagatctatgtgaagcagcagtccgatctgcaatttttgaatttcaatgtcgaaaactcccaggaactcatccagatgtacgattccaaaatggaagagtcaaaagcgctggacagctccagggatatgtgtctttcagatctggaaaataatcaccccaaggtggacatcaaaagggaaaagaaccaaaaatccctatttaaggaccagaagtttgaggcaatgctggtacagcagaatcggagcgataagagtagctgcgacgagtgcaaggagaagaagcagcagattgacactgtattcggcgaaaagtcggtgatcacgctgtccagtatctttacaaaggacctggtcgaaaaacacaacctgccatggtcccttgggggaaagacccagatcgaaccagagaataaaatcaccttatgtaagattcacaccaaatctccaaaatgccacgggacgggtgttcaaaacgagggcaagcaaccgagtgagacccctacactcagtgacgagaaacagtggcacgatgttagcgtttatctcgggctgacaaactgccctagcagcaaacatccggagaaactggatgttgaatgccaagaccaaatggaaagaagcgagatctcttgctgccagaaaaatgaggcgtgtctcggcgagtcaggaatgtgcgatagcaaatgttgccatccctccaattttatcattgaggccccaggacatatgagcgacgtggaatggatgagcatttttaagccaagcaaaatgcaaaggatagttaggctgaaaagcgggtgtacgtgctctgagagcatctgcggcacacaacacgattccccggcttctgagttaatcgcaattcaggattctcatagcctcggctcttctaagtccgctctgcgggaggacgaaaccgaatcctcatctaacaaaaagaacagtcccacatccttgctaatctataaagatgcacccgctttcaacgagaaggctagcattgtactgccttctcaggatgatttttcacctacaagcaaattgcagaggctgctggctgagagccggcagatggtcacggatctggaattgtctacgctcctacccatcagccatgagaatttgaccggttccgccaccaataagagcgaggtgccagaggagagcgcacaaaagaacacattcgtgagctattag

SEQ ID NO: 218813 - DNA, 1338 bp, synthetic construct
  misc_feature 1..1338: note = Description of Artificial Sequence: Synthetic coding sequence
  source 1..1338: mol_type = other DNA
atgccgaattcatccccgaaggaccccacaaccgccagtgggaacgggagcaaagtggagcgggagaaaaggaaggacgaactcttgaatatcgcgaaatccaaacaggaaaggacaaatagcgagctgcacaacttacggcagatctatgtgaagcagcagagcgacctgcagttcctcaacttcaatgtagagaactcccaggagctgatccagatgtacgattccaagatggaggagtccaaggcgctcgacagttcaagagacatgtgcttatcagatttggagaacaaccacccaaaggtcgatattaagcgtgaaaaaaatcagaagtcactatttaaggatcagaagttcgaagccatgctggtccaacagaaccgatcagacaaatcttcatgtgacgagtgcaaggaaaaaaaacagcagatagatactgtattcggggagaagtccgtcatcacactgtcctccatattcactaaggacctggtcgagaagcataacctcccttggagcctggggggaaaaacccaaatcgaacccgagaacaagattacactttgtaaaattcacactaagagccccaaatgtcatggaacgggcgtgcagaatgaagggaagcagccttccgaaacacctacactttctgatgagaaacagtggcacgatgtgagcgtatatcttggcttgacgaactgcccctctagcaagcatccggaaaagcttgatgtcgaatgccaagatcagatggaacggagcgagatcagttgttgccagaagaatgaggcatgccttggcgaatccggcatgtgcgactccaaatgctgtcatcccagcaacttcattattgaagcgccagggcacatgagtgatgtggagtggatgagcatcttcaaacccagcaaaatgcagcgcattgtcagactgaagagtggatgcacctgttctgaatccatttgtgggacacagcacgattcaccggcttcagagttgatagccatccaggactctcactccctgggctcgagtaaatccgccctgagagaggatgaaactgagtcttctagtaataagaagaatagtcctacgagtctcctgatctataaggatgccccagcctttaacgaaaaagcaagtattgtcctcccttctcaagacgacttttcccccacctctaagctgcagcgcctgctggctgagtctaggcagatggtgacagatttagagttatctactctactccctatcagtcacgagaacctgaccggatccgcaactaacaaatccgaggtgcccgaagagagcgcgcagaaaaatactttcgtctcgtactag

SEQ ID NO: 218814 - DNA, 2049 bp, synthetic construct
  misc_feature 1..2049: note = Description of Artificial Sequence: Synthetic coding sequence
  source 1..2049: mol_type = other DNA
atgaaccctccagctgcatttcttgccggaaggcagaatataggcagtgaagtagaaatatctaccatagagaagcagcgcaaagaactgcagttattgataggagagctgaaagatagggacaaggagctcaacgatatggtcgctgtccatcaacagcagctgctgagttgggaagaggacaggcagaaggtactcacattggaagagaggtgcagtaaattagagggggaacttcacaaaaggacggaaattatcagaagcttaacgaaaaaggtgaaggctctggagagcaatcagatggaatgtcaaactgctctgcagaaaacccagcttcagctccaggaaatggcacaaaaggcaacccatagcagcctgttgtccgaggacctggaagcaaggaacgaaactctctctaatacactggtggagctgagtgcacaggtgggccagctacaagctcgcgaacaagcactgacgacgatgataaagctgaaggataaggatattattgaagctgtgaaccatattgccgactgttccggcaaattcaagatgttggagcatgccctcagagacgcgaagatggcggaaacatgcattgtcaaagagaaacaggattacaaacagaagctgaaagccttgaaaatcgaagtgaataaactgaaggaagacctcaatgagaagactacggagaacaacgaacagcgcgaggaaattatccggctgaagcaggagaaatcttgccttcatgatgaactgctgttcaccgtggaacgggagaaacgaaaggacgagctgctcaatatcgcaaagtctaaacaggagcgaacaaattccgaactgcacaatctgcggcagatttatgttaaacagcagtccgatctgcagttccttaattttaatgtagaaaactctcaagagttgatccagatgtacgatagcaaaatggaggaaagtaaggctttggacagctctcgggacatgtgcctgagcgatcttgaaaacaatcaccctaaagtggatataaagagagagaaaaatcagaaatccctgttcaaggaccaaaaatttgaagctatgctggtccagcaaaacaggtctgataagagctcatgcgacgagtgtaaagagaagaaacagcaaattgataccgttttcggggaaaaatccgtgatcaccttgtctagtatttttacaaaagatctggttgaaaagcacaatctaccgtggtccctcggcggaaaaactcaaattgaacctgaaaataagatcaccctgtgcaagatacacactaagtcgcccaagtgccacggcacaggtgtccaaaacgaaggcaagcagcccagcgagacgcccacgctcagcgatgaaaagcagtggcacgacgtttctgtgtatctgggcctgacaaattgtccgtcctcaaagcaccctgagaagctggacgtggaatgccaggaccagatggagcgctctgagattagttgctgtcagaagaacgaggcctgtcttggggaaagcgggatgtgtgactccaagtgttgccatccaagcaactttataatcgaagctccaggtcacatgtccgacgtagaatggatgtcgatcttcaagcccagcaagatgcagagaattgttcggctgaaaagcgggtgcacttgttccgagagtatttgtgggacccaacatgattctcccgcatctgaactcatcgccattcaggattcgcacagtctgggctcctcgaaatcggctcttagggaggacgagaccgaaagcagctccaataaaaagaattccccaacctcccttctcatctataaggacgcgcctgctttcaatgaaaaggcctcaatcgtgctgccctcgcaggacgacttttcacccacatccaagctccagcgcctcctggctgagtctagacagatggtaacagatctcgagttaagcactctgctaccaatctcccatgagaatctgactggctccgccaccaatataagtcacctttgcggtagacagaaagccgacactaacactgaatag

SEQ ID NO: 218815 - DNA, 1494 bp, synthetic construct
  misc_feature 1..1494: note = Description of Artificial Sequence: Synthetic coding sequence
  source 1..1494: mol_type = other DNA
atgccaaaaaaggaaaagatggctaaaacccctctgagcgatgaaaagcagctactgcttttccagcagaagcttctcgcagaggaggagatggctaagaagaaggaaagacttcttagtcaattcttgaaagacaagctggcaaaagaggaacataatagtgcccttaacctgaataagatcaacacccagtggcgcactgtgctgagggaggtaaagacgagagagctgcacaaagacatcgagatcttgagtcaaacatttgaaagggtggttgactgcaaggacaatgtgattaaatcccttgcaaaagacttgtcggaggccgaagagcagtatgcccatgcactgaggtcacatctacacaacgtcgatcagttactagccttgcagcggcacaggctgagcctcctagaggaatcttataacatggagttggaggccctaaccaaggaatttgagacagagcgcaaaacgatcatcgaccagcacgaaaaagagattcattatttgcaagatatttttatggcaatggaacaaaattacatagatagtgagtatgagtccaaactggagttccaatccatgtggaatgacttaaaaaacatgaatttggaagaaaagcacttcttgcgcctacacctggagaacagggttgaggacctgtggcgtaaatttcaagatgtcctcaaaaactataccgacgctacggaggataggaaagcagctttcgaaacactgcaggtgaaagacgagaagtcaagcaaggaaatagaagtgcaaatgaagaagatccaaaagctccaggatgctataactattagcaaaggtaaaataatgatacattcacgggaatcagaagatgaaaaccgctacattcgtaacgataaggagctcgttctggtgcagctgcgcaaactgaaggcccagcggacgcaggcccgtgcagcttcccagaaaaacctggtgcgcctgacactggagtctaacgctaccttgaaagcgctgcggaaaatagttgataagggtgaaaaaatcttgaagctggccgagatctgtcgcaagtttgagacggaggaggaaaaggttttaccattctattcctcagtcctgaccccaaaggaacaggaaggcatccagaagaataatcttgaagaactgaccgaagagttaacaaaagtgatggtggactacatagggatggagaatttctggaagagatataataaagttaaactggaacagctatccctgcagcaccgacgagctcagctgctggatattaatggaaaactgagagagatgctcaagcagtatttggatggcatatccgtgtcggacgaggtactatctcagcttaatccactgttcatcgtaaattatcagtctaacctgctgcagcccctgagcataaggatcgcccaccctggaagcactagccctagcgccccttggagagaccagcgtcggagcttctttcttggaagctcctag

SEQ ID NO: 218816 - DNA, 1455 bp, synthetic construct
  misc_feature 1..1455: note = Description of Artificial Sequence: Synthetic coding sequence
  source 1..1455: mol_type = other DNA
atgccgaagaaagaaaaaatggcaaaaacccctctgtcagatgaaaaacagctactgctcttccagcagaagctgctggccgaggaagaaatggcaaagaaaaaggaaaggttgctcagccagttcttgaaagacaagctcgcgaaggaggagcacaactctgcgctgaatcttaacaagattaatacacaatggcggactgtcttacgggaagttaaaacaagggagctgcacaaggatatagagattcttagtcagactttcgaacgcgtcgtggattgcaaggacaacgttataaaatcactagccaaggacctgtccgaggcagaggagcagtacgctcacgcacttcggtcccacctgcataacgtcgaccagctcttggcactgcaacggcataggctgtctctgttagaggagtcatataacatggagctggaggccctgactaaggagttcgagactgagagaaagacgattatcgaccagcacgagaaggaaattcactacctgcaggatatcttcatggccatggagcaaaactacatcgacagcgaatacgaatccaaactggagttccagagtatgtggaacgacctaaagaatatgaacctcgaggagaagcattttcttcgcctgcacctggaaaatagagtcgaggacttgtggcgcaaatttcaggatgtgctcaagaattataccgatgctacggaggaccgtaaagcagcatttgaaacactccaggttaaggatgagaaatcaagcaaggagatcgaagtccagatgaagaaaatccagaagttacaggatgctatcactatctccaagggaaagattatgattcactctagagagtctgaggacgagaaccggtacataagaaatgacaaggagctggtattggtgcaactacgtaagctgaaagcgcagcgaacccaggccagagccgcaagccagaaaaatcttgttaggctgaccttggagagcaatgctaccctgaaagcactgcgaaagatagtggataagggggagaaaatacttaagctggccgagatttgtagaaaatttgagacagaggaagagaaagttctgcccttttacagctccgtgctgactcctaaggagcaagagggaatccaaaaaaataacctggaagaactgaccgaagagctgacaaaagtgatggtggattacatcggcatggaaaatttttggaagcggtataataaggtgaagctggagcagttatccttacaacataggagggctcagttattggatatcaacggaaaattgcgcgagatgctcaaacagtatttagatggcatcagtgtgtccgacgaagtgttgagccagttgaatccactattcatcgtgaactaccagagcaatctactacagccactgtctattaggatcgctcaccccggagataaacagcaccctaccacctag

SEQ ID NO: 218817 - DNA, 3240 bp, synthetic construct
  misc_feature 1..3240: note = Description of Artificial Sequence: Synthetic coding sequence
  source 1..3240: mol_type = other DNA
atggagtctaatttcaatactgagagctcttccaccttcactctgcagagctctagtgaaacattatttagtattcaactgctcgactttaagacttcactccttgaagcgctcgaggagctccggatgcgtcgggaagcggagatccattatgaggagcagatcgggaaaattatcgtagagacccaggagttgaagtggcagaaagagacacttcagaaccagaaagagacactcgcggagcaacacaaagaggccatggccgtgtttaaaaagcagctccaaatgaaaatgtgcgcactcgaggaagaaaaggggaagtaccaactggcgactgaaattaaagagaaggaaatagaaggcctgaaagaaaccctaaaagcactgcaggtgtcgaagtacagcctgcagaaaaaggttagcgaaatggagcaaaaggtacagctacatttgttggccaaagaagattatcataagcagctgtctgagatcgaaaaatactacgctacaatcaccggacagttcgggctggtcaaagaaaaccacgagaaacttgaacagaacgtccgcgaggccattcagtcgaacaaaaggctctccgctctgaataaaaagcaggaggcagaaatttgctcgctgaagaaggagttgaaaaaggcggctagtgatttgattaaaagcaaagtgacctgccaatacaaaatgggcgaggagaacatcaaccttacgattaaagaacagaagtttcaagagctgcaggagaggctcaacatggaactggagttgaatgaaaagatcaacgaggaaataacacacatacaggaggagaagcaggacataatcataagcttccagcatatgcagcaactgctcaggcagcaaatacaggccaatacagaaatggaagctgaactgaaggtcctgaaagagaacaaccagaccctggaacgtgacaacgaactgcagagagagaaggttaaagagaacgaggaaaaatttttaaatctccaaaatgaacatgagaaggccctcgggacttggaaacgccatgccgaggagctcaacggtgaaatcaacaagattaagaatgagctctcgtctctgaaagagacacacatcaagctacaggaacactacaataagctgtgtaatcagaaaacattcgaagaagataaaaagtttcagaatgtcccagaagtcaataatgagaattcggagatgtcaacagagaaatctgagaacacaataatacagaagtataatacagaacaggagatcagagaagagaatatggaaaacttttgctctgatacagagtatcgcgaaaaagaggagaaaaaagagggatctttcattgaagagatcattattgatgacctacaacttttcgagaaaagcttcaagaatgagattgacactgtcgtatcccaggatgaaaatcagtcagagatctcattaagtaaaaccctgagcctggacaaggaggtcatttctcagggacagacctccaacgtgaccgataatcggaagtctgtaaccacagagatcaaggacaagatctgtttggaaaaggacaatggctgcactgagttcaagtcacccaataaccacttcgttgtgttggataccgcaatagagactgaaaaaatccatcttgaacggactagggggttggacgttcaccatactgacgtaaacttagaagtggagaataataagacaagtttcaatagcattctaaacgagaccgctcataacacttatcacaacaacaacaaggatgtgtcagagaacgagccctttaaacagtttcggctccttcctggaacccgtgagcatgccctagaaaaggagatcaccaatagcgaccaaacgaaggccgacctggacagcagtcttgacatcaaaaaaaatcccgtcccctgccagaaatactctctccgaaattcatccaatgtgatgctcgatgataaacagtgtaagataaagcaaatccaactcctaacaaagaaatctgaatgttcgattctgctctcgaagcaaacgtctgactttctgcaggtctgcaacgacaccctggaaaagagtgaactgactgtgccttgcgacattgtgattgatcatcacgtttcatacgccgcattctccgctaattctaagctactgctcaagaattctgataaaaatgtgcactctatgtccatgctagtgaagccaaacagctctccgggtgggaagactatgtgtaagaacatgtccgatatgcagaacagccagtttaacaattgtctgggatacttagagaacaccaacgttaatattagtcacctgcacctgaataatgagaattctcatgcttcccaggcgaaggacgtcaagacagccgtgcatatgaagacatgtactgaaacggagttcagcaataagaaaaaccagattgacgagaatcaggtgacagaggcaaccaaaaatgacctgtttctttttgtctccatcaatgagcggcagcataccctgttgaacaacactgagaagacagagagcctgaatgacatcgtgtccggcaaaatgttttctgagggccagctggaggagtctcacagttttcatattgagcccagtggcgacctcgtgaataggtctggcaggtcaacttttgacctttccaccagcgacaaaaagacagaaaagacccccgtctatatgaatttttcagacccaggcccatggagtaaggtcaatcacattgaaagccagaccgcgagttctagtacaccctgcatatccttacttctaaaggagagaccactggatcctagcgaaaataagaagatcattagcatggctctatgtaagaatataggtgtcgacgatgtcggcaaggacattggcccagacaccacctctatcaaccgagtggccgacaccttaaacaattggtcaatccaccccgacccaaaaggagagccgtcagaggagaagaatgcaatggctaagacattctacgattcatcctttcccactgagcacgttaagacaaagccgctgataagtacacctttgcagagtcatctgcaagctatcaaaactacaaaaaacacatcgggtgatgacgattggcaatccttgatcaccaaccagctcaacaaatcagaaaatctcctgtcactggaaaacgacaaccagcctaaaaagcgaaaggccgaagaaacactcgaaaagaacaacaggttaaagtag

SEQ ID NO: 218818 - DNA, 1617 bp, synthetic construct
  misc_feature 1..1617: note = Description of Artificial Sequence: Synthetic coding sequence
  source 1..1617: mol_type = other DNA
atgcttcagattggagaggatgtggactatctgttgatccctcgtgaagtacggctagctggcggtgtctggcgcgtcatcagcaaacccgctacaaaagaggcagaattcagagagcggctgacgcagtttctcgaagaagaaggtagaactctggaggatgttgcaagaatcatggagaagagcactccccaccccccacagcccccaaagaagcccaaagagcccagggtgcgccgacgcgtgcagcagatggtaaccccacctcctcgccttgttgtggggacatacgacagcagcaatgctagcgattctgaattcagtgatttcgaaacctcgcgtgacaaaagccggcagggaccacgacggggaaagaaagtgcggaagatgcctgtttcatatttaggcagcaagtttctaggatcggacctggagtccgaggatgacgaagagctggttgaggcatttctacgcagacaagagaaacaaccaagtgccccacctgctagaaggagagtgaatctcccggtgcccatgttcgaggataatcttggccctcagctgagtaaggcggaccgctggagggagtacgtgtcccaagtttcctggggtaagctgaagaggcgagttaaaggctgggcacccagagctggcccaggagtcggggaggcgcgacttgccagcaccgctgtcgagtccgcaggcgtctcgtctgcacccgagggtacctcaccaggagatcgcttgggaaatgccggtgacgtgtgtgtgccccaggcttccccccgtaggtggagacctaaaataaattgggcctctttccggcgtaggcgaaaggaacaaaccgctcctacaggtcagggtgccgacatcgaagccgatcaggggggagaggctgctgactctcaacgcgaggaagccatcgccgaccagagggagggcgcagctggaaaccagagggctggagcacctgctgaccagggcgcagaagccgcagataaccagcgagaagaggctgccgataaccagcgggcaggcgctccggctgaggagggggcagaggccgcagataatcagagagaagaagctgccgataaccagcgcgctgaggctcctgccgaccaacggtcgcaaggaacagataatcaccgagaggaggccgcagataaccaacgcgcagaagctcctgccgatcaaggctctgaagtgaccgacaaccaaagagaggaggcagtacacgaccagagggagagggcgcctgctgtacagggtgctgacaaccagcgtgcccaggcgagagccggacagagagccgaggctgcccataaccagcgagccggagctcccggaatccaggaagcagaggtatcagccgctcaggggactaccggaactgcgccaggtgctcgcgctcgaaaacaggtgaaaacagtgcggttccagacccccggaagatttagttggttttgtaaacggaggagagcgttctggcacacccctagactgcccacactaccgaagagggtccctagagccggtgaggccagaaatctgagagttctgagagcagaggccagagctgaagctgaacagggggaacaggaagaccaactttag

SEQ ID NO: 218819 - DNA, 975 bp, synthetic construct
  misc_feature 1..975: note = Description of Artificial Sequence: Synthetic coding sequence
  source 1..975: mol_type = other DNA
atgttacaaatcggggaagatgtggattacttgctcatccctcgagaggtgcgtctggcaggtggagtctggcgggtcatttctaagcccgctacaaaagaggctgagtttcgagagaggctaacacaattcctcgaggaagaaggacgaactcttgaggatgtggctaggataatggaaaagagcactccacatcccccacagcctcctaaaaagccaaaagaacccagagtgcgtagacgggtccagcaaatggtcacacctccgccacgcctggtggtgggcacatatgatagcagcaacgcatccgacagtgagttttcagatttcgagactagccgagacaaatcccggcaagggcctagacggggaaagaaggtccgcaaaatgcccgtgagttaccttggctctaaatttttaggaagcgaccttgagtcagaagatgacgaagagctagtcgaggcgttcctgcgacgccaggggctgcaagtgatccgaggccaaggcccacagctgacaagggggcagcgcctccagattattcgcggaaagaggctgcagattattcgtggacagggaccccagcttcgaaggggacagagactccagattacaaggggcaagcggctgcagattatcagaggacagcgcccacagctgaccagagggcaccgcgcacagataaccacgggcaagcggctgcaaattattcggggacggaggccccagctcaccaggggacaacgactccaaattatcaagggtaaacggccttatatgaccagaggaaagggaccacagctctcacgagttcagatcatccggggtcaccggcctgggttggccagaggacagcggctgcatatcatccgcggacaagggcctcaggtcagcagaaagttaaaaagtcagttacctaagggccctcaggaacaattacaggagccaggccctggaaatcggtcacggcaatag

SEQ ID NO: 218820 - DNA, 5532 bp, synthetic construct
  misc_feature 1..5532: note = Description of Artificial Sequence: Synthetic coding sequence
  source 1..5532: mol_type = other DNA
atggaaaatgagattttcacaccattacttgagcagtttatgacatctcccctcgtgacatgggtgaaaactttcggaccactggccgcaggaaacggtactaaccttgacgaatacgtggcactggttgatggagttttcttgaatcaggttatgttgcagataaatccgaaactggaatcccagcgggttaataaaaaagtcaacaacgacgcgtcgctgagaatgcacaacttgtctatcctagtgaggcagattaagttctactaccaggagactctccagcaactgattatgatgtccctgcctaacgtcctgatcattggaaagaatcccttttcagagcagggcacagaggaggttaaaaaattactgttgctgcttctggggtgcgccgtacagtgccagaagaaggaagaatttatagagcgaatccagggactcgactttgacacaaaggctgctgtagcggcacacatccaggaagtcacacacaaccaggagaatgtgttcgacctgcaatggatggaagtgacagacatgtctcaagaggacatcgagcccctcctgaagaacatggcactgcacttgaaaaggctgattgatgagagagacgagcactccgagactatcatcgagctctcggaggaaagggacggcctccacttcttgccccacgccagttcatctgcccagtcaccttgcgggagccccggtatgaagcgcacagagtccaggcaacacctgtccgtcgaactcgctgatgctaaggctaaaattaggaggcttagacaggagttagaggaaaaaaccgagcagctgttagattgtaaacaggaactcgagcagatggagatcgagctgaagcgcctccagcaggagaacatgaatctgctcagtgacgcaaggagtgccaggatgtatagggacgaactggacgcgcttagggaaaaggctgtccgagtggacaaacttgagagcgaagttagtcggtataaagagcggctgcacgacatcgaattttataaagctcgtgtcgaagaactgaaagaggataatcaggtcttactggagaccaagactatgctggaagaccagcttgaggggaccagggccaggtcagataaattacacgagctggaaaaagagaacctgcagttgaaagccaagctgcatgatatggagatggaaagggacatggatcgcaaaaagatcgaggaattgatggaggagaacatgacactggaaatggcccagaaacagtctatggacgagagtttgcatctggggtgggagctggagcagatatctcgcaccagcgaactgagtgaagccccacagaaatccctgggacatgaggtgaacgaattaacctcaagtcgactgctcaaattggaaatggaaaaccaatcactaaccaaaaccgtggaagagctgagaacaactgtagactctgtggaaggtaatgcatctaaaatcctgaagatggagaaggaaaaccagagattgtcaaaaaaggttgagattttggagaatgaaattgtgcaggaaaaacagagcctgcagaactgtcagaacctctctaaggacttgatgaaagagaaagcacagctcgaaaagactattgagaccctgagagagaactctgaaaggcagattaaaattctggagcaagagaacgaacacctgaaccagacggtttcaagcttgaggcagcgctctcagatatcagcagaggccagggtcaaggacatcgaaaaagagaacaagattctccacgagtcgatcaaagagactagcagcaagctgagcaagatcgagttcgaaaagcgtcagatcaagaaagagcttgagcattataaggaaaaaggggagagagccgaagagctggaaaatgaactgcaccacctagaaaaggagaacgaacttctccagaagaagattaccaacctcaaaatcacatgcgagaagattgaggctcttgagcaggagaatagtgagctagagagagagaatcgcaaactgaagaaaactcttgattcttttaaaaatctgacatttcaactcgagtcactcgagaaagaaaatagccagctggacgaggagaatctagagctgaggcgcaatgtggagtccctgaaatgcgcctccatgaaaatggcacagcttcagctggaaaacaaggagttagaatcagaaaaagagcaactaaaaaagggacttgagctactgaaggcttctttcaagaagactgaacgcctcgaagtaagctatcagggattggatatcgagaaccaacgtttgcaaaagaccttggaaaactctaataaaaaaattcagcaactcgaaagcgagctacaggatctggagatggaaaatcagactctgcagaagaatttagaggaactgaaaatcagttcgaagcggctggagcaactcgagaaagagaacaagtcccttgagcaagagactagccaattggagaaggacaagaagcagctggagaaggaaaacaaacgtttgagacagcaggctgagatcaaggatactactctcgaggagaacaacgttaaaattggaaacttagaaaaagagaacaagacgctgagtaaggaaattggtatttacaaagaatcatgcgtccgccttaaggagctggagaaagaaaacaaggagttggtaaagcgggctaccatcgacattaaaacgctcgtgacactgcgcgaggacttggtcagtgaaaaacttaagacacagcagatgaacaatgatctggaaaaactgacgcatgaactcgaaaagatagggctcaacaaagagagactgctgcacgatgagcagtccacagatgatagtcgctacaagctcctcgagagcaagctggaatcaaccttgaagaagtcactggagatcaaagaagagaagatagcagccttggaggcaaggctggaggagagtactaactataaccaacagctgcgacaagagctaaagaccgtgaagaaaaattacgaagccctcaagcagcgccaggatgaggagaggatggtccagtcgtctcctcccatctccggcgaagacaacaagtgggagcgggagagccaggaaaccacacgcgagctcctgaaggtgaaagatcgtctcatcgaagtggaacgcaacaacgcaacactgcaggccgagaagcaggccttgaagactcaactcaaacagctggaaacacagaacaataatttgcaggctcaaattctggctctgcagaggcaaactgtttctctccaagaacaaaacaccacactgcaaactcagaacgctaagctacaagtggaaaactcaaccctcaactcacagagcacgtcgctgatgaatcagaacgcccagctgctgatccagcaatcctccctggagaatgagaacgagagcgtgattaaggaacgcgaggatctgaagtctctgtatgacagcctgattaaagaccacgagaagctggagctcttacatgagaggcaggcttccgaatatgaatctctcatcagcaagcacggcactctgaagtcagcccacaagaacctggaggtagagcatcgagatctcgaggatagatataatcagctccttaagcagaaaggacagttagaagacctggagaaaatgctcaaagtggagcaggaaaagatgctcttagagaataagaaccatgaaactgtggctgccgagtacaaaaagctgtgcggcgagaacgaccggctaaaccacacctattcccaactgttaaaggagactgaagtgctgcagacggaccacaagaatctcaaatcattactgaacaactcaaagcttgagcagacaagactggaggctgaattttcaaaactgaaggagcagtaccaacagctagatattaccagtacgaagttaaataatcaatgcgagctcttgtcacagctgaaaggaaatctggaggaggaaaacaggcatttacttgatcagattcagaccttgatgctccagaataggactctcctggaacagaacatggagagcaaggatttattccacgtcgaacagaggcagtatatcgataaactgaacgagctgcgcagacagaaggagaagcttgaagaaaagatcatggatcagtataagttctacgacccctccccccctaggagacgcggaaactggatcaccctcaagatgcggaaactcatcaaaagtaagaaagacattaaccgggaaagacagaaatcacttacactaactccaactcgttccgactcctccgaggggtttctgcagctacctcaccaggatagtcaagattcaagcagcgtggggagtaactctctagaagatggccagactctagggacaaagaagtcttccacaatgaacgaccttgtgcagtccatggtcctggcaggccagtggactgggtcaaccgaaaatctggaagtgccagatgatatctccaccggaaaacgcagaaaagagctgggagccatggcattcagcacaacggctattaattttagtacggtcaactcatccgccggttttcgaagcaagcagctagtgaacaataaggatactacctctttcgaagatatttctccccagggcgtgtccgatgactctagcactggaagccgcgttcatgcatcccggcctgcctcactcgattcaggacgtacctctactagcaacagcaacaataacgcatcactgcatgaggttaaagccggagctgtgaataatcaatccagacctcaaagccattctagtggggaattttctttactgcatgaccacgaggcttggagtagttcagggagcagtcccatccagtacctgaaaagacagacgcggtcctctcccgtgctccagcacaaaatttcagaaacactcgagagccgacaccacaagatcaagacaggatctcccggtagtgaagtagtaacactgcagcagttccttgaagagagcaataaactcaccagtgtacaaatcaagagctcatcgcaagagaatctgctcgatgaagtgatgaaatccctgagcgtgtcatcagactttctgggaaaagacaagccggtgtcatgcgggctcgccagatcagtgagcgggaagacgcccggtgacttttatgacagaaggactaccaagccggagttcctgcgcccaggcccaaggaagaccgaagacacttactttatctctagtgcaggaaaaccaacacccggtacccaagggaagatcaagctggtcaaagaaagcagcctgtcccgccagtcaaaagatagtaacccatacgccaccctgccacgagcaagctccgtgataagcactgccgaagggacgacgagaaggactagtatccacgattttctcacaaaggactccagattacctatcagcgtagactccccgccagctgccgctgacagtaacacaactgccgctagtaacgttgataaggtacaggagtctcgcaattctaaaagtcgctccagggaacagcaaagcagctac

SEQ ID NO: 218821 - DNA, 5612 bp, synthetic construct
  misc_feature 1..5612: note = Description of Artificial Sequence: Synthetic coding sequence
  source 1..5612: mol_type = other DNA
atggaaaacgagatttttacccctttgctggaacagtttatgaccagtcccctagtgacatgggttaagaccttcgggccactggcagctgggaacggaaccaacctggatgagtacgtggccctggtcgacggggtgtttttgaaccaggtgatgcttcagattaacccaaaactggaatcccagcgggttaacaaaaaagttaataatgacgctagcttgcgtatgcacaatctgtctatactcgttcgccagatcaaattctactatcaggagacattacagcagctgattatgatgagtctgccaaacgtcctgatcatcgggaaaaatcccttctctgaacaaggcaccgaggaagtcaagaaactgctcctgctccttctgggctgtgccgtccagtgtcagaagaaagaagaattcatcgaacggatccagggactcgactttgatacaaaggctgcggtagcagcgcacattcaggaagtgacacacaaccaagagaatgtgttcgacctccagtggatggaagtcactgatatgtctcaggaagatatcgaacctctgctgaagaatatggccctccacctcaagagactgattgatgagcgcgatgagcatagcgaaaccattatcgagctctctgaggaacgtgacggtctccatttccttccacacgctagttcgtcagctcaatccccttgtggttctcccggaatgaaaaggactgagagccgccaacatctctcagttgaactagccgatgcgaaggccaagattagaaggttaagacaggagctagaggagaaaaccgagcagcttttggattgcaagcaggaactggaacagatggaaattgagctaaaacgtctccagcaagaaaatatgaatctgcttagcgatgcacggagcgcaaggatgtacagggacgaattggacgccctccgagagaaagccgttcgagtcgacaaacttgagtctgaggtgtctcgatacaaggaacggctccatgacatcgaattctacaaggccagggtggaagaacttaaggaggataatcaagtgttactcgagactaagaccatgctcgaggatcagctcgaaggcacaagagcgaggtcagacaaattacacgagctggaaaaagagaatctacaattaaaagccaaattgcatgacatggaaatggagagagacatggacaggaaaaaaatcgaggagttaatggaagagaatatgaccttggaaatggcccagaagcaatcaatggatgagagtctccatctgggttgggagttagagcagatttcccgtacaagcgaactgagcgaggcacctcaaaagtcactcggacacgaggtgaacgagttaaccagctcccgtctgctcaagctggagatggagaaccagtcgctgacaaagacagtggaggagctgaggaccacggttgattccgtcgagggtaatgcctccaagattctgaaaatggagaaggagaaccagcgcctttcaaagaaagtcgagatcctggagaacgagattgtgcaggaaaagcagagcctccagaactgtcagaacctgtccaaggacttgatgaaggaaaaggctcaacttgaaaaaacgatagagacactaagggaaaattccgaacgacagataaagatcttagagcaggagaatgaacatctgaaccagacggtgagcagcctgcgccagcgatcccagatatctgccgaggccagagtcaaggatatcgagaaggaaaacaaaattcttcacgagtccatcaaagagactagttctaagctgtccaagatcgagttcgagaaacgacagattaaaaaggaactagagcattacaaggaaaaaggcgagcgcgctgaagaactcgagaatgagcttcaccacctcgagaaagagaacgagctcctgcagaagaaaatcaccaatctgaaaattacctgcgagaagattgaggccctggaacaggaaaattcagaactggagagggagaaccggaaattgaagaagaccttggatagtttcaagaacctgaccttccagctggagtcactcgaaaaggagaatagtcagctcgatgaagaaaacttggagctgcgaagaaacgtggagagtctcaaatgtgccagcatgaagatggcccagctccagctggaaaataaagagctcgagtccgaaaaggaacagcttaagaaaggcctggaactactcaaggcatctttcaaaaagactgagagactggaggtaagttaccaggggctcgatattgagaatcagagattacagaagacccttgaaaactccaataagaagatccaacagctggagagcgagctgcaagacttggagatggagaaccagacactgcagaagaacctagaagagctaaaaataagttccaagaggctggaacagttagaaaaagagaataagtcgctcgaacaagaaacgtcacagctggagaaggataaaaagcaactggagaaagagaataaacggctgagacagcaggctgaaatcaaggatacgactctcgaggagaacaatgtgaagattggcaaccttgagaaagagaacaagaccctgtcgaaagaaatcggcatctacaaggagtcctgtgtaagactgaaagagctcgaaaaagagaataaggagctcgtgaaaagagctacaatagatattaaaacccttgtgaccctgcgggaggatctggtcagcgagaagctcaaaacccagcagatgaataacgacctggaaaaactcacccacgagctcgagaagatcggcctgaacaaagaacgacttttacacgacgaacaatcaaccgatgaccggtataaattgctggaatccaaactggagtctacactcaaaaagtcccttgagataaaggaagaaaagatagccgctctggaagctcgtctcgaagagtctacaaactataatcaacagttgcggcaagagcttaaaactgtgaagaaaaactacgaagctctaaaacaaaggcaagacgaagagcgcatggtgcagagctcaccaccaattagcggggaggataacaagtgggagcgggagagtcaagagactactagagaactattgaaagtaaaagatcgcttaattgaagtcgaacgcaataatgcaaccctgcaggccgagaaacaggccctgaagacccaactaaagcagttggagacgcagaacaataatctgcaggctcagatcctggccctgcagcgccagactgtctcgttgcaggagcagaacacgactttgcaaacacaaaacgctaaactccaagtggaaaactcaaccctcaatagtcaatcaactagcttgatgaaccagaacgcacagttactgattcagcagtcctcacttgaaaatgagaacgagagtgtcataaaggagagggaggatctgaagtccctgtatgattcactaataaaagaccacgagaagctggaactgctgcacgagaggcaagctagcgaatatgaaagtttaatttctaaacatggaacgctgaaatcagcccataagaatttagaagttgaacatagggatctcgaggacaggtataaccagctgctgaagcagaagggtcagctggaggatctggagaagatgctgaaggttgaacaagaaaaaatgcttctcgaaaacaagaaccacgagactgttgccgcagagtacaagaagctgtgtggggaaaatgatagactgaaccacacttattcacaactgctcaaagaaacagaagtgttacagaccgaccataaaaacctgaaaagcctgttgaataactccaaactcgagcagaccaggctggaggcagagttttctaaattaaaggagcagtaccagcagctagatatcacctcaacgaagctgaacaatcagtgcgagttgctatcccaattgaaaggaaacttggaggaagagaacaggcatctactggatcaaatccagacgctgatgctgcagaaccgaaccctgctcgagcagaacatggagtcaaaagatttgttccatgtcgaacagagacagtacattgacaaactgaatgagctgcgacgccagaaagagaaactggaggagaagattatggatcagtataagttctatgatccttcccctccgagacgcagaggtaattggatcacattgaaaatgaggaagctgatcaagtcgaaaaaggatattaaccgggaaagacagaagagcctaaccctcactccaacaagaagtgattcctccgaaggctttctgcagttgccacaccaagattcgcaggactcctcatccgtgggttccaacagtttggaggatggccaaacgctagggaccaaaaagtcaagcatggtggctcttaaacggctccccttcctccggaatcggccaaaagacaaggataaaatgaaggcttgttacaggcggtctatgagcatgaatgacctggtgcaatcaatggtcctggcgggacagtggaccggctctactgagaatctggaggtcccagacgatatctccaccggaaagagaaggaaggaactgggggcaatggccttctccaccaccgctattaacttctctacagtgaacagctcagcaggcttccgctcaaagcagctggtcaacaataaggataccactagttttgaggatatctccccacagggcgtaagtgatgactcaagcactggatcccgggtgcacgcgtctcgcccagctagcttggattcgggacggacctccacaagtaactcaaacaataatgcgagtttgcacgaggtcaaagccggtgcagtaaacaatcaaagccggccacagtcccattctagtggtgaattcagtttgcttcatgaccacgaggcttggtcctcctccggctcctcaccaattcagtacctcaagcgccagacccgctcaagtccagtgcttcaacacaagattagtgaaaccctggaaagccggcaccacaagatcaagactgggtcaccgggatccgaagtagtgaccctgcagcagttcctcgaggagtccaacaaactgaccagtgtgcagataaaatcctcctcacaagagaatctgctggatgaggtcatgaaatcactgtctgtgagctcggacttcttgggcaaggacaagcctgtctcatgcggtctcgcccgtagtgtgagtgggaagacaccaggggatttctacgaccgtagaactaccaagcctgagttcctgcgtccagggccacggaaaacggaagatacctactttattagctccgctggtaaaccaacaccgggtacgcaggggaaaattaaacttgtcaaagaaagcagcttgtctagacagagtaaggattccaacccatacgcgaccctcccgagggcctcgtccgtgatttcaaccgcagaaggcaccactcgcaggacaagtattcatgactttctgactaaggattcaaggcttcccattagcgtggattccccaccagccgctgcggactccaatacaacagcagcctccaacgtagacaaagtgcaggagagcagaaattccaaatcgcgtagccgggagcaacaatcctcgta

SEQ ID NO: 218822 - DNA, 2667 bp, synthetic construct
  misc_feature 1..2667: note = Description of Artificial Sequence: Synthetic coding sequence
  source 1..2667: mol_type = other DNA
ctgcttgaaagcaagttggagtctacacttaagaagtccctcgaaattaaggaagagaaaattgctgccctggaggcacgccttgaggaaagcactaattataatcaacagctgcggcaagagctgaaaactgtgaagaaaaattacgaagcgcttaaacaacggcaggatgaagagcgaatggtgcaaagctcaccacccatctcgggggaagataataagtgggaacgtgagagccaggaaaccaccagagagcttctcaaggtaaaagacaggctgatcgaggtcgagcggaacaacgccaccctgcaggccgaaaagcaggcactcaagactcagttgaaacagttagagacccaaaataataacctacaggcccagattctggctctgcaaagacagacagtgagtctccaggagcaaaataccactctgcagacacagaacgccaagcttcaggtggaaaactccaccttaaactcacaaagcacatcgctgatgaaccagaatgcccaactactgattcaacagtcatccctcgaaaatgaaaacgaatccgtgatcaaggagcgcgaagacctgaagagtctgtacgattccctcatcaaggatcatgaaaagttagaattgctccacgagagacaggccagcgaatatgaaagtttgattagcaaacatgggactctaaagagcgctcacaaaaatctggaggttgagcacagagatctggaagatagatataaccagttactcaaacagaaagggcagctcgaagacctggagaagatgctgaaggtggaacaggaaaaaatgctgctcgagaacaaaaaccacgagactgtcgctgcggagtataaaaaactgtgcggggaaaacgacaggctgaatcatacttacagtcagctgttaaaggagaccgaggttctccagacggaccacaaaaatctgaagagccttctaaataactctaaactggaacagacccgccttgaagctgagttcagcaagctgaaagagcaatatcagcaattagatattactagtactaagttaaacaatcagtgtgaactactgtcccagctcaaggggaatctcgaagaggagaatcgccacttactggaccagatacagacactgatgctgcaaaaccgaacattgcttgagcagaatatggaatccaaggacctcttccacgtggagcagcgacagtacatagacaagctaaacgagctgagaaggcagaaggagaaattagaggagaagattatggaccagtacaaattttatgacccatctcctccacgcaggcggggaaactggattaccctgaagatgcgaaaactgataaagagcaagaaggacataaatagggagaggcagaaatctctgactctgacaccaactcggagcgactcctccgaaggattcctgcaattgccacatcaggatagccaggacagtagctctgttgggtctaactcgctggaggacggacagacgttgggcacaaagaagtcctctactatgaatgacttggtccagtctatggtgctggccggacaatggactgggagcacagagaacctcgaggttcctgacgacatctccacaggtaagaggcgcaaagaactgggcgcaatggcttttagcactacggccatcaatttctccacagtcaattctagcgccggtttcaggtcaaagcagctggtgaacaacaaagatacaactagcttcgaggacatctctccccaaggagtgagtgacgacagttcaactggtagtcgcgtacacgcgtccagaccagccagtctggattctggaagaacatcaacgtctaactccaacaataacgccagtctccacgaagtcaaagctggagccgtaaataatcaatcccggcctcagtcacattcatccggtgagttcagcctgcttcatgatcatgaagcttggtctagcagtgggtcctctcccatccagtacttgaagaggcaaacccgatctagtcctgtgctccaacacaaaatctcagagaccctggagtcccgtcaccacaaaataaaaacaggcagccctggatcagaggtggtgactctacagcaattcctagaggagtccaacaagctgactagcgtgcagattaaatcgagctcccaggaaaaccttctggacgaagttatgaagtcactgagtgtttcctccgactttctcgggaaggataagccagtgagttgcggcctcgcccgatcagtcagtggaaaaactcctggagatttctacgataggaggactactaaacccgaatttctccggccagggccaagaaaaaccgaggatacctacttcataagtagtgctgggaagcccaccccagggacacaagggaagattaagctagtcaaggagtccagcctgtcacgccaaagtaaggactccaacccctacgcaaccttacctcgggcatcctctgtcatctctaccgcagagggaaccactcgtaggacatctattcacgactttctgactaaagatagccgactacccatctctgtggattcgcctcctgccgctgcagacagtaataccaccgctgcttcgaatgtggacaaggtccaggagagcagaaatagcaaatcccgctcccgtgagcagcagtcatcatag

SEQ ID NO: 218823 - DNA, 5391 bp, synthetic construct
  misc_feature 1..5391: note = Description of Artificial Sequence: Synthetic coding sequence
  source 1..5391: mol_type = other DNA
atggaaaatgaaattttcacccccctgctggaacagttcatgacatcccctctggtgacatgggttaaaacttttgggcctctggcggctgggaacggaaccaacctcgacgaatatgtggccctggtggatggcgtcttcctgaaccaggtgatgctccagatcaatcctaaattggagtcgcagagggtaaacaagaaggttaataacgacgcatccttgcggatgcacaatctcagtatcttggtgcgccagatcaagttttattaccaagagaccctccagcagttgatcatgatgagcctgcctaatgtgcttattataggtaaaaatccctttagcgagcaagggactgaggaagtcaagaaactgttgctattgcttctgggatgtgccgtgcagtgccaaaaaaaggaggaatttatagagcgcattcagggactggacttcgacacaaaagctgctgtggccgctcatatccaggaggttacacataaccaggaaaacgtcttcgacttgcaatggatggaggtcacagatatgtcccaggaagacattgaacctctgctgaagaatatggcactccatcttaagaggcttatcgatgagagagacgaacacagcgaaacgataatcgaactatctgaggaaagggacggtttgcatttcctgcctcatgcatccagctctgcacagtcaccttgcgggagccccggtatgaagcgcaccgaaagccgccagcatctttccgtggagctcgcggatgccaaagccaaaatcaggcgacttcggcaggagctggaagagaaaactgaacagctgctggattgcaagcaggagctggagcaaatggaaattgagctaaaaagactgcagcaggaaaacatgaaccttctttcggacgcccgatccgccaggatgtaccgtgacgaactggatgcgctgcgcgagaaggcggtcagggtggataaattggagtcagaagtcagccgttacaaagagcgcctgcacgatattgaattctataaagcgagggtagaagagctgaaggaggacaatcaggtattgttagaaaccaaaaccatgctggaggatcagctcgaaggaaccagggcccgatctgataaactgcatgagcttgagaaggagaacctgcagcttaaagcgaaactgcatgatatggaaatggagcgggacatggacaggaagaagattgaagaactgatggaagagaatatgacgctggagatggctcagaagcaaagcatggatgaaagcctacatctggggtgggagctggagcagattagccggacgtcagaactgtctgaggcccctcagaaaagcctggggcacgaagtgaatgaattgacttccagcaggctgctcaagctggaaatggaaaaccaaagtttaactaaaaccgtggaagagctgcgcaccacagttgactccgtcgaaggtaacgcttccaagattctcaagatggagaaagagaaccagcgtctgtccaagaaagtggagattctggagaatgaaatagtccaggagaaacagagtctacagaactgccagaatctgagcaaagacctgatgaaggaaaaagcccagctcgaaaagactatcgaaactctgcgagagaattcggagaggcagattaaaattttggaacaagaaaacgaacacctcaatcagactgtgtcgagcttgcggcagagatcccaaatttctgcagaagctagagtgaaagacattgaaaaggagaacaagattctacacgaatccatcaaggagacctctagtaagcttagcaagatcgaatttgaaaaacgccagattaagaaagagttagagcattacaaggaaaagggcgagcgggcagaagaacttgaaaacgagttgcaccacctcgaaaaagagaatgagcttctccagaagaaaatcacaaacctcaaaataacctgtgaaaagatagaggctctggaacaggaaaactctgagctcgagagggaaaatcgaaaattgaagaagactcttgatagcttcaaaaatctgacattccagttagaaagcttagagaaggagaattcccagctagacgaagagaacttagagctcaggaggaatgtggaatccctcaagtgcgcatcaatgaaaatggcacaactacagctggagaataaagagctggaatccgagaaagaacagttgaagaaaggacttgagttactgaaggcaagttttaagaaaacagagagactagaagtgagttaccagggacttgacatcgagaaccagcgcttacagaagactctggagaactccaataagaagattcagcagctggagtctgaattacaagacctggagatggaaaatcagacattgcaaaaaaatctcgaagaattgaaaatctcttctaaacggctggaacaactcgagaaagagaataagtctctggaacaagaaacgagccagctggagaaagataagaaacagcttgaaaaagagaacaagagactccggcagcaggcagagatcaaagataccacattggaggagaataatgttaagatcggtaatctcgagaaagagaacaagactctatcaaaggaaatcgggatctataaagagtcttgcgtcagactaaaggagctggaaaaagagaataaggagctcgtaaagcgggcaacaatagatatcaaaacgctggtgactctgcgggaagatcttgtgtctgaaaagctgaagactcaacagatgaataacgacctggaaaagttaacgcacgaactcgagaaaatcggcctcaacaaggagcgtctgttgcatgatgaacagtctaccgacgatcgctacaagctgctggagtcaaagttggagtcgacgctgaagaaatccctggaaatcaaagaggagaagatcgctgctttggaggcgagactcgaggagtcaaccaactacaaccagcagctccgacaagagcttaagacagtgaaaaaaaattacgaggccctgaaacagagacaggatgaggaacgaatggtccagagctctcctcctatctccggggaagacaataaatgggagagagaatctcaggaaaccacacgggaactcctcaaggtgaaggacaggctaatcgaggtggagcgaaacaatgcgacccttcaggccgagaagcaagctttgaagacccagctgaaacagcttgagacccaaaacaataacctacaggcgcagatcctggcacttcagcgacagacagtgtctctgcaagaacaaaatactaccttacagacacagaatgcgaaactgcaggtcgaaaatagcaccctgaacagtcagtctacctctcttatgaaccagaatgctcagttgctgattcagcaatctagcctggagaatgagaacgaatccgtaatcaaggagcgagaagacttgaagagcctatatgatagcctgatcaaagatcacgaaaaacttgaactgctacacgagaggcaagcttcagagtacgaaagtctgatctctaagcacggcaccctcaagagtgcacataagaatctcgaggtggagcatagagatctggaggacagatacaaccagctgctcaagcagaaggggcaacttgaggacctcgagaagatgctgaaagtcgagcaggagaaaatgctgctggaaaataaaaatcacgagacagtcgctgcagagtataagaaactgtgcggggagaacgaccgactaaatcatacttacagccaactcctcaaagagaccgaagtgcttcagacagaccacaaaaacctaaagtccttattaaataattccaaacttgagcagaccagactggaggcagagttctctaaactcaaagaacaataccagcagctggatataacatctaccaagctgaataaccagtgcgagttgctatctcagcttaaaggcaacctcgaggaggaaaataggcaccttttagatcaaatccagactttaatgctgcaaaaccggacactgcttgagcagaacatggagtcaaaggatttattccacgtcgaacaacgtcaatacatcgacaaactgaacgaactgcggaggcaaaaagagaagctggaagaaaaaattatggatcaatataaattctatgacccttcacctccacggaggcggggaaattggattacactgaaaatgaggaagctcatcaagagtaagaaagatataaacagagagaggcaaaagtctctgacactcaccccaacccgatccgactccagtgaaggtttcttgcaactacctcatcaggactcacaggactcatctagcgtgggatctaactcgttggaagacggtcagacgctgggcactaaaaagtcatcaatggtggctttaaagaggttaccatttctgcggaacaggcctaaagacaaggataagatgaaggcttgctatcgaagaagtatgtccatgaacgatttggtccagtctatggtgcttgctggtcagtggacaggatcaacagagaacctggaagtgcccgacgatatctccactggaaaacgccgaaaagaacttggcgctatggcttttagcactacagctattaactttagcaccgttaactcatccgcagggtttagaagcaagcagctggtcaataataaagataccactagcttcgaggatatatcccctcaaggagtttctgatgacagcagtaccggctccagagtgcatgcttctcgcccagccagtctggactccggccgtaccagcacatccaattccaataataatgcttccctgcacgaggtgaaggccggtgctgtaaacaatcaaagcagaccacagtcacacagtagtggtgaattttccctgctgcatgatcacgaagcctggtcatccagtggctctagccctatccagtatctcaagcggcagacccgctcctcccctgtccttcagcataaaatttccgaaaccctggaatcccggcatcacaagatcaagaccggaagtcccggtagcgaggtagtcactctgcagcagtttctcgaagagagcaataagctcacctctgtccagattaagagttcttcacaggaaaacctcctcgatgaagtgatgaagtctctcagtgtttcatctgattttttgggcaaggacaagccggtgtcctgtggcctggcgtctgttatttctacagctgagggcactactagaaggaccagcatccacgacttcctgactaaggactcacgtcttccaatctcagttgattcacccccagcggcagcagattccaacacaaccgccgcaagcaacgtggataaggtgcaggagtcgcgcaacagcaagtcccgctcacgagagcagcagtctagttat

SEQ ID NO: 218824 - DNA, 1119 bp, synthetic construct
  misc_feature 1..1119: note = Description of Artificial Sequence: Synthetic coding sequence
  source 1..1119: mol_type = other DNA
atggatcagtacaaattttacgatccgagcccacccagacgaagagggaattggatcactttaaagatgcgcaagctcattaagtccaagaaggacataaatcgcgaaaggcagaagtctctgaccttgacacccacaagatccgattcctcagaaggattcttacagcttccacatcaggatagtcaagatagtagtagtgtcgggagcaattcactcgaagatggtcaaaccctcggcacaaagaagagctccaataccacgtctttcgaggacatatcacctcagggagttagcgacgactcctcaacaggcagccgcgttcatgcgggagcagtgaacaaccagagcaggccccagagccactcctctggggagttctcacttctgcatgaccatgaagcctggagctctagcgggagctcaccaattcaatacttgaaaagacaaacacggagctctcccgtgttgcagcacaagattagcgaaactctggagtctagacaccataagatcaagacaggatcccctggctctgaggtagttacactccagcagtttctagaagagtctaacaagttaacctctgtgcagataaaatctagctcgcaggaaaatttacttgatgaggtgatgaaaagcctttccgtgtccagtgactttctaggcaaggataaaccagtgtcttgcgggcttgccagatcagtgtctgggaaaactcccggtgacttttacgacagaagaaccacaaagccagagttcctgcgtccaggacccaggaaaacagaggatacctatttcatcagctcagccggtaagcccacccctggcacccagggcaagattaaattggtcaaagagtccagcctctcccgtcagagtaaagactccaacccgtacgccacgctgccaagagcaagcagtgtgatatccaccgcggaaggcaccaccaggcggacgtctatccacgattttttgacaaaagactccaggctgccaatctccgttgattccccaccagctgcggctgactctaatactaccgcggctagtaatgtggacaaagttcaggaatcacgcaatagcaagagccggagccgtgaacaacaaagttcatag

SEQ ID NO: 218825 - DNA, 5615 bp, synthetic construct
  misc_feature 1..5615: note = Description of Artificial Sequence: Synthetic coding sequence
  source 1..5615: mol_type = other DNA
atggaaaatgagatattcactccgctgctggagcagtttatgacatcccctctggtgacgtgggtgaagacgttcggacccctggccgcaggcaatggcacaaatcttgatgagtatgtggcactagtcgacggtgtgttcctgaaccaggtaatgctgcagatcaaccctaaactcgagagccaaagagtgaacaagaaagtgaataacgatgcctccttgcgcatgcacaatctgtccattctcgtccggcagatcaagttttattaccaggaaacattgcaacaactcattatgatgagtttgccgaatgtgctaatcatcggcaagaatccattcagcgaacaaggtacggaggaagtgaagaagctgctgctacttctcctgggctgcgccgtgcagtgccagaagaaagaagaatttatcgagagaatacagggcctggatttcgatacaaaggccgctgtggcagcccatatacaggaggttactcataaccaggagaacgttttcgacttacagtggatggaagtgacggacatgagtcaggaagatattgaacctctgcttaagaacatggctcttcatctgaagagactgattgacgaacgcgacgaacactccgagaccataatcgagttatccgaggagcgggacgggctgcattttttgccacatgcctcctcatccgcccagtccccctgtggatcccccggtatgaagagaactgaaagtcggcagcacttgtccgttgagcttgccgatgcaaaagccaagatccgacggttgcggcaagaactcgaggagaagactgagcagcttttggactgtaaacaggaacttgagcaaatggaaatagagctgaagagacttcagcaagagaacatgaatctcctctcagatgcaagaagtgctaggatgtatagagacgaactagatgctttgagggaaaaggcagtgagagtagataaattggaatcagaggtgtcccgttataaggagcgcctgcacgatatcgagttttataaagctcgagtggaagaactaaaagaggataatcaagtgcttcttgagaccaagaccatgcttgaagaccagcttgaaggcactcgagccaggtctgacaaactgcatgagcttgagaaggaaaacctgcaactcaaggcaaagctgcatgacatggagatggagcgagacatggatcggaagaagatcgaggagttgatggaagaaaacatgacgctggagatggctcagaagcagagcatggatgagagcctgcatctaggatgggagcttgagcaaatctcaaggactagtgagctaagtgaagcccctcaaaagtccctgggtcacgaggtgaacgaactaacaagttcgaggctcctcaagctggagatggagaaccagagccttacgaagactgttgaagaactacgaactacggtcgatagtgtcgaagggaacgccagcaagatcctgaagatggaaaaagagaatcaacgtctgtccaagaaagtcgagattctggaaaatgaaattgtgcaggagaaacagagcctgcagaactgtcagaacttgtccaaggatctcatgaaagaaaaggcccaacttgagaaaacaattgaaacgctccgcgagaattcagagcggcagatcaagattctcgaacaggaaaatgagcacctgaatcaaaccgtgtcaagtctgagacagaggtcccagatcagcgcagaggcccgagtgaaagatatcgagaaagaaaacaagatactacacgagagtattaaggagacctccagcaaactctccaaaatcgagttcgaaaagcgacagataaaaaaagaactggagcattacaaagagaagggcgagcgggctgaagaattagagaatgagctgcaccacctggaaaaggaaaacgaactgctgcaaaagaagatcaccaacctgaaaattacttgcgagaaaattgaagccctcgaacaagagaacagcgagctggagcgagaaaatcggaagctgaagaaaacccttgactcgttcaagaacctgacgtttcagttggagagcctggagaaggaaaatagccagttggatgaggaaaaccttgaattgcgacgaaacgtggagtctctgaagtgcgcttcaatgaagatggctcagctacagctagagaataaagaactagagtccgagaaggagcagctgaaaaaaggattagaactgctgaaagccagctttaaaaagacggaacgccttgaagtttcctaccaggggttagatattgaaaaccaaaggctccagaagacactggaaaactctaataagaagatccaacagttggaatctgagttgcaggatcttgagatggaaaatcagaccctgcagaagaacctggaggagttaaaaattagcagcaaaaggctcgaacagctggagaaggaaaataagagcctcgagcaagagaccagtcagttggagaaggataagaagcagttggaaaaagaaaataaacggctgcggcagcaggccgagatcaaagacaccaccttggaggagaacaacgttaaaatcggtaatctggagaaagaaaataagactcttagtaaggaaatcggcatttataaggaatcctgcgtgaggcttaaggagctggaaaaggaaaacaaagaattggtgaaaagggcaaccatcgacataaagaccctagtgacccttcgggaagacctggttagtgagaaacttaagactcagcagatgaataacgatttggagaaactgacccacgaacttgagaagataggtctgaacaaggagagacttttacatgatgaacagtccaccgatgactccaggtacaagcttcttgaaagtaagctcgagagtacacttaagaaatccttagagattaaggaggaaaagatcgctgcccttgaagccagattagaagagtccaccaactacaaccagcagctacgtcaggagttaaaaaccgtcaagaagaactacgaagctctcaagcagagacaggacgaggaacgaatggtccagagctcaccacccataagcggtgaagataataaatgggagcgagagtctcaggaaaccacaagggagctgctgaaggttaaggatagactaatcgaagtggagcgcaataatgccactttacaggcagagaaacaagcactgaagactcagctgaagcagcttgagactcaaaataacaatctgcaggcacagatcctcgctttacaaagacagactgtgtctttacaggagcagaataccactctccaaacccagaatgctaaactccaggtggagaacagtactctcaactctcagagcacatctctgatgaaccagaacgcacaactgctgattcagcagagtagcctggagaatgagaacgagtccgtgatcaaggaaagagaagacttgaagtcactgtatgacagccttatcaaggaccacgagaagttggagctcttgcacgagcgacaggcgtctgagtacgagagcctgataagtaaacatggtacactgaaaagcgcacacaagaatctggaggtcgaacaccgggatctcgaagataggtacaatcagctgctgaagcagaaagggcagctggaagaccttgagaaaatgctgaaggtggagcaggagaaaatgctcctcgagaacaagaaccatgaaaccgtggctgcggaatacaagaaactttgtggtgagaatgatagattgaatcatacgtatagccaactcctcaaagaaaccgaagttctgcagaccgaccacaagaatctaaaaagtctgcttaataactccaaacttgagcagacccgattagaggccgagttcagtaagcttaaagagcagtatcaacagttagacataacaagcaccaaactgaacaaccagtgcgaactgctaagtcagctgaagggaaatttagaagaagagaaccgccacctgctggatcagattcagacattaatgctacagaacagaacattgctcgaacagaacatggagtctaaggatctgtttcacgtggaacaaagacagtatattgacaagctgaatgaattgagaagacagaaagagaagctcgaggagaagattatggaccagtacaaattctacgatcccagtccacctaggcggcgaggcaattggataacactaaagatgcgcaagctgattaaatcaaaaaaggatatcaacagggaacgccaaaagtcgctgacattgaccccgacacggtccgactcctctgagggatttttgcaactcccccaccaggatagccaggactcctcatcggtgggcagcaatagtctggaagacgggcagacgctaggcacaaaaaagagctctatggttgccctaaaaaggctcccatttttacgcaatcgtcccaaggataaggacaaaatgaaagcgtgctatcggaggagcatgagcatgaacgacctagtacagtcgatggtgctggctggccagtggactggaagcaccgaaaacctggaagtgccagatgatatctccaccgggaagcgcagaaaggagcttggagctatggctttcagtaccaccgcgataaatttcagtactgtgaactccagcgcaggattccgaagtaagcagctggttaacaataaggatacaacctctttcgaagatatctccccgcagggcgtgagcgacgactcctccaccggtagcagagtgcatgccagcaggcccgcatctctagatagcgggagaacaagtacatcgaactcgaataataatgccagtctgcatgaagtgaaggcgggtgcagtgaacaaccagagcaggcctcagagccactccagcggtgagttttccctgctgcatgaccatgaggcatggtcatcatcgggatccagtcctatccagtacctgaaacgccagacgagaagttcccccgtgctccagcacaagatctccgagactctggagtctaggcaccacaagatcaaaaccggaagccccggatccgaagtggtgacacttcagcagttcctggaggagtcaaacaagctgacgagtgtgcagatcaagagctccagccaggaaaatctgctcgatgaggtcatgaagtcactttcggtgtcgtctgatttcctcggcaaggataagcctgttagttgcggtttggctagatcagtcagcggaaagacacctggcgacttctatgatagacggaccaccaaacccgagtttctaaggcccggtccaagaaaaactgaagacacttacttcatctccagtgcgggaaaaccaacccctggtacccaggggaaaataaaactggtgaaagagtcttccctctcaagacagtcaaaagactccaacccgtacgctacactgccacgagcatcaagtgtgatatcaaccgccgaaggcaccacacggcgaacatccatccacgatttccttacaaaggactcccgattgcctatctctgtagactcccctccggctgctgccgattccaatactacggcggcttccaacgtggacaaagttcaggagagcagaaatagcaagtctcggtcccgcgagcagcagagttcata

SEQ ID NO: 218826 - DNA, 420 bp, synthetic construct
  misc_feature 1..420: note = Description of Artificial Sequence: Synthetic coding sequence
  source 1..420: mol_type = other DNA
atgccctgcgccgctcggagccggagctcttggaggagaagctggacaaacacagcttgttggtccttgtgcccatgtcccggacccagaagtccatcacccgctcctatgagaagagctcagagtagcctgtgtctgcgcgacgaaactctggcgggtggtcagaggcgcaagctcagctctcggttccctgttggccgatccagtgaaagcttctcccctggcgacaccccaagacagcggttcaggcagaggcatccgggtccgctgggcgctcctgtctcacactccaagggccctggcgtgggttgggaaaactctgctgagactctgcaggaacacgaaaccgatgccaacagagagggccctgaggtgcaggaacccgaaaagcggccactaacaccttcactgtcccagtag

SEQ ID NO: 218827 - DNA, 4431 bp, synthetic construct
  misc_feature 1..4431: note = Description of Artificial Sequence: Synthetic coding sequence
  source 1..4431: mol_type = other DNA
atggaaggaggcaaagggcctcgtcttagagactttctgtccggctcccttgccacatgggccttaggtctcgcgggactggtcggagaagcagaagattctgagggagaggaagaggaggaggaagaagagccacccctgtggctggaaaagaggttcctgcgacttagcgacggagccctacttctccgagttctgggaataattgccccatcaagccgaggcggaccaagaatgctccggggactcgatgggcctgctgcctggcgggtttggaacttgaaccacttatggggccgtttgcgggacttctaccaggaagagcttcagctgctgatactttcaccacctcccgatttgcaaacattgggctttgatcccttgtccgaggaggccgtagaacagctggagggagttctgcgcctcctcctcggcgcatctgttcaatgtgagcatcgagagctcttcattagacatatccaggggctcagcttagaagtgcagtccgaactggctgcagctatccaggaagtgactcaaccaggcgcaggggtcgtactggccctgtccgggccagacccgggtgaactggctccggctgagttggaaatgctctctagaagcttgatgggaacgctcagtaaactggccagggaacgtgacctgggggctcagcgccttgcagaattactgctggagcgagagcccctgtgtttgcggccagaggccccaagtcgcgctcccgcagagggcccaagtcaccatttggctttacagctggctaacgcgaaggcacagctacgtagactccgccaggagctggaagaaaaagctgaactgctcctggattcccaggctgaggttcaaggcctcgaggccgaaataaggcgcctacggcaggaggcacaggctctcagcggtcaagctaaaagggcagaactctaccgggaggaagccgaggccttacgcgaaagggccggtcgattacctcggctccaggaggaactaaggcgctgtcgcgagagactgcaggccgctgaggcctataagtcacagctcgaggaagagcgggtgctgtccggcgtcctggaagctagcaaagcgcttctagaggagcaactcgaggctgccagagaacggtgcgccaggcttcatgagacgcaacgcgagaacctcctgttacggaccaggctcggcgaagcgcacgccgagcttgactcccttcgacaccaggtggatcagctggctgaagaaaacgtcgagctggaattggagctacagcggtctctggagcctccaccaggttctcccggagaagctcctctggccggagcagcaccatctttacaagatgaagtccgggaagccgaggccggtcggttacggactttggagagagagaaccgcgaacttcgcggactactgcaggtgcttcagggccagccaggcggtcagcatccattgctggaagcccctcgcgaagacccagtgttgccagtcctggaggaggcaccccagacacccgtggccttcgaccacagcccacagggattggtccaaaaggccagagacgggggtccacaggcactggacctggcaccccctgcccttgattccgtgttggaagcctccgcagaatgtccacaggcccctgacagcgatccacaggaagccgagtcccctctccaagcagctgccatggacccacaggcatccgattggtcccctcaggaatctggcagtcctgtggaaactcaggagtctcccgagaaagccggacgccgttcctccttgcagtctccagcatctgtcgcaccacctcagggacccggaacaaaaatccaggccccacagttactagggggtgagacagagggcagagaggcaccgcagggagaattggtgccagaggcctggggcctgcgtcaggagggacccgagcacaagcccggtccctcagagccctcgtcagtccagctggaggaacaggagggaccaaaccagggtctggacctcgctactggtcaggctgaggccagggaacatgatcagcgcttggaaggtactgtgagagatccggcttggcagaagccacagcaaaagtccgaaggggctctggaagtacaggtgtgggaaggacccattcccggagaatctctcgcttctggtgtggccgagcaggaggccctgcgcgaggaagttgcccagctgcgcaggaaggccgaggccctgggcgatgagttagaagcacaggcccgtaagctcgaggctcaaaatacagaagccgcacggctgagcaaggagctggcccaagctcggagagctgaagcggaggcccatcgggaagcagaggcacaagcttgggaacaggctcgacttcgggaagcagtggaggcagccggacaggagctcgagagcgctagccaggaacgcgaggctctggtggaggcgctcgccgctgcaggccgagaacgacggcagtgggagcgtgaagggagccgccttcgcgctcaatccgaagcagctgaagagcgaatgcaggtgctagaatctgagggaagacagcacttggaggaggctgagagagagcgcagggagaaggaagccctgcaagcagagctggagaaggccgtggtcagaggcaaggagctgggcgacaggctggaacatcttcagcgcgagttggagcaggccgctttggagaggcaggagtttttacgtgaaaaggagagccagcatcagcgctatcaaggtctggagcaaagacttgaggccgagctgcaagcagctgccacaagtaaggaagaggccctcatggagctcaaaaccagggccctgcagcttgaggaggagcttttccaactgcgtcaaggtccagcagggctcgggcctaaaaagcgggcagaaccccaactggtagagacacagaacgtgagactgattgaggtggagcggagcaacgccatgcttgtcgcagagaaagctgctttgcagggccagctacagcatctggagggacagctgggatcattacagggacgggcacaggagctgctccttcaatcgcagcgtgcccaggagcattcatcacgcttgcaggctgaaaaaagtgtactggagattcagggacaggaactacaccgtaagctcgaggtcttggaagaggaggtcagagccgcacggcagtctcaggaggagacgagaggccaacagcaggcattactgcgtgatcacaaagcccttgcccagctgcagcgccgtcaggaagcagagttggaaggcttgcttgttaggcaccgagatctgaaggcaaatatgagggccctggagctcgcacatagagagctgcaggggagacatgagcagctgcaggcccaaagggcgtctgtcgaggcccaagaagtagcactgctagcggagcgcgagcgacttatgcaagatggacataggcagaggggtctggaagaggagctcagaaggctgcagtccgagcatgaccgggctcaaatgctgcttgctgagttgtcccgtgaacggggtgaacttcaaggggagcgtggggaacttaggggcaggcttgccaggctggagcttgagcgcgcacagctggagatgcagtcccaacaacttagggagtccaaccagcagcttgacctctccgcatgtcggctgaccacccaatgcgaacttctgactcaactgcggtcagctcaggaagaggagaataggcaactcctggccgaggtgcaggcactgtctcgagaaaatcgggaattgttagagaggtccctggaaagtagagaccacctgcatagggagcagcgagaatatctggaccagttaaacgccctgcggagagagaagcagaagcttgtggagaagataatggatcagtatagggtgcttgagcctgttcccctccccagaactaaaaagggctcatggctggcagacaaagtaaaaagactaatgcgtccgaggcgggaaggagggccacctggcggattacggttaggcgctgacggcgctggctctaccgagtccttaggaggcccacccgagaccgagctgccagaggggcgagaagccgatgggaccggcagccctagcccagctccaatgcgcagagcccaatcctctctctgcctgcgagacgagaccctagctggtgggcaaagaaggaaactgtcctctcggtttcctgtgggaagatcttccgagtccttttccccaggtgatacacccagacagcggtttaggcagcgccatcccggacctctaggcgctcctgtgagccacagtaaaggacccggtgtgggctgggagaacagtgcagaaacactccaggaacacgagacggacgctaacagggagggtcctgaggtacaggaacctgaaaaaaggccactgacaccatctctctcccagtag

SEQ ID NO: 218828 - DNA, 2139 bp, synthetic construct
  misc_feature 1..2139: note = Description of Artificial Sequence: Synthetic coding sequence
  source 1..2139: mol_type = other DNA
atggcaggcgtagccgctcatagagcacatcctccctttaccgctcatatgaaaaacagggggctccgggaagaactagaaaaagccgtagtgaggggcaaagagcttggggatcggctggaacacctccagagggagttggaacaggcagccctggaacgccaggaattcctgcgggaaaaggagagccaacatcagaggtatcaggggctagagcagcgcctggaggcagaactccaggcagccgctacttctaaggaggaagctcttatggagctgaagacgcgggctctacagctcgaggaagaactgtttcaattgcggcaggggcctgctgggctaggacctaagaaacgggctgaaccacagcttgtggagactcaaaacgtgcgtttaattgaagtggagcgctctaacgcaatgctggttgccgaaaaggctgctctgcagggtcaactccagcatttagaaggccagctgggtagtttgcagggcagagcccaagaactgctgttgcagtcccaaagagcacaggagcatagttccaggctgcaagctgaaaagtccgttctggaaattcagggccaagaactgcacagaaagttggaggtacttgaggaggaagtccgcgctgcgcgtcagtcccaggaagagactcgcggacagcagcaggctcttctcagagaccataaagcactggcacagctgcagcgacggcaggaagcagaacttgagggactgcttgtgaggcaccgggacctcaaagccaatatgcgagccctggagctggcccacagggaacttcagggacgccacgagcagctccaggctcaaagagcttctgtcgaagcccaggaggtggccctgttggccgaacgcgagagactcatgcaggatgggcaccggcaaagggggttagaggaggaattacgcagactgcagtcagaacatgatagggcccaaatgctccttgccgaactgagtagagagcggggagagcttcagggcgaacgaggtgaattgcggggaaggctggcccgattggagcttgagcgggctcaattggagatgcagagccagcaactgcgggagtctaatcagcaactagacctgtcagcgtgccggctgaccacacagtgtgagctcctgacccagttacggtcagctcaggaggaggagaacaggcagttgctcgccgaagtgcaggccctctctcgggaaaaccgggaacttctggaaaggagtttggaaagtcgcgaccacctgcacagggagcagcgggaatacctcgaccagcttaacgcacttagaagagagaagcagaagctagttgaaaaaatcatggaccagtatcgggtccttgaacctgtccccctgccacggaccaagaaaggctcatggttagctgataagggacccctgcctagacatccatgtgctgggcctagagctccgtctgcctgtggaatgagaccttggcaggctgggagtggaggcaattccgcccaaggatcccgttggggagaagccctctcacatagtgcgcttggcacccccctcgggaatgacagtgatagtgctatccaggccccttggggtagaccctcgccaacggccaaggacttggtgtgggatggcagaacaccgctgcggccatgccggaatacgaagcagatgcccacagagcgtgccctgaggtacaggaaccgcaggaatgtgccatccccccatccatctgcctctgatacagtgggaactgccggtcttggagtgcagcctagtcggcactggagcgtctctggaggccctcgacagccgaagtcctcagggtcacaaggaccccagggcgagagcctagacaaggaggcctgggccctgcgatccagcacagtgagtgctggggctcgccgttggtcttgggatgaatgcgttgaccgtggcgacgggtggcctcctcgagccgcacccggatggtctagtggaagtagccgctggctgcctctgcgacagcgcagcctaggagatccccctgccgaggggggttggcaagagctagcccgagagccaccagcgctgtccagatgggaggcggaatcacaatgctggggaacagtggcatgggccgacctggagccctag

SEQ ID NO: 218829 - DNA, 4077 bp, synthetic construct
  misc_feature 1..4077: note = Description of Artificial Sequence: Synthetic coding sequence
  source 1..4077: mol_type = other DNA
atggaaggaggcaaaggccctaggctccgggacttcctgtcaggatctctcgccacctgggcactcggcctggcaggcctcgttggcgaggcagaggacagtgaaggagaggaggaggaggaagaggaagagcctccactatggttggagaaacggttcctgagactgtctgacggtgcactgctactgcgcgtcctcggtatcatcgcaccatcctcacgcggaggaccccgaatgctgcgtggactggatggccctgctgcttggcgggtgtggaacctgaaccatctttggggcagactgagggacttctaccaggaggaactgcagttgctcatactgtcaccacctcccgatctgcagactctcggtttcgacccactgagtgaggaagcagtggaacaactcgagggtgtacttcggctgttattaggggcatccgtccagtgcgagcacagggaattattcatacgccacatccaggggctctctctggaggtgcaaagtgagctggctgctgccattcaggaggtaacgcagccaggagccggtgttgtactcgctctaagtgggccagatcctggcgagctggcacccgcagaacttgaaatgttgtcaaggtctctcatggggactctgtcaaagcttgcgagagagagagacctgggcgctcagcggttggcagaactgctcctcgaaagagagcctctgtgcctgagacccgaagcccctagccgcgcacccgctgaaggccctagtcaccacctggcacttcagctggctaacgctaaagctcagctgagacgactgcgacaggagctggaggaaaaggcagagctgttgttggatagccaggccgaggtgcagggacttgaagctgagatcagacgccttaggcaggaggcccaggccctctcaggccaggcaaagcgcgctgagctctaccgggaggaagccgaggccttgcgcgaacgggcaggcaggctgccacggctacaggaggaactgcgccgttgccgggaaaggctccaggccgctgaggcttataaatcacaactcgaggaggagcgagtgctctccggtgttttggaagcctccaaggcgctcctcgaagagcaactggaggccgcaagagagcgctgcgccaggttgcacgagactcagagagagaatctcctcttgaggacgcggcttggcgaagcccatgctgagcttgactccctcagacaccaggtcgaccaactcgcagaggagaatgtcgagctcgagctggagctacaacggagccttgagccacctcccggatctcctggagaagccccattggccggagctgcaccctccctgcaagatgaggtgagagaagccgaggcgggtcgcctccgcacactggagagagaaaaccgcgagctccggggtctgttgcaggtcctgcaagggcagcccggtggccagcaccctctcttagaagcccctagggaagatcccgttctgccggtgttggaggaggctcctcagactccggtagcttttgatcactccccccaaggcctcgtgcagaaagcccgtgacggtggcccacaagctctggacttagctcccccagccctggattcagtactggaggcttccgctgaatgtccccaagccccagatagcgatccgcaggaagctgagagtccacttcaggctgcggctatggacccccaggcgagtgattggtctccacaggagtctggtagccccgtggaaacccaggagagccctgaaaaggcagggcgacggtcctcactgcaatctccggcaagtgtggccccaccccagggaccaggaaccaagatccaggcgcctcaattactgggtggcgagactgagggccgagaagcaccacagggagagctggttccagaggcctggggcctccggcaggagggacctgaacacaagccaggcccttcggaaccaagcagtgtccagctggaggaacaggagggacccaatcagggcttagatctggccacaggtcaagcagaggcacgcgaacacgatcagcgcctggagggcaccgtccgggacccagcctggcagaaaccccaacagaaaagtgagggcgcactcgaggtgcaggtatgggaaggacccataccaggcgagtccttggcgtcaggggttgcggagcaagaggctctgagggaggaggtcgcccagctaagaagaaaagccgaggccctgggagatgagttggaggcccaggccaggaagcttgaggctcagaacaccgaagcggctagactgtccaaggaactggcacaagccagacgcgctgaggcagaggcacaccgggaggcggaagctcaggcctgggaacaggcgcgactgcgggaggctgtggaagcagctggacaggaattggaaagcgcttcgcaggaaagagaggctctggtggaagctctggcggctgctgggcgtgaacgtcgtcagtgggaacgggagggctctagattaagagctcagtccgaagctgcggaggagagaatgcaggtgctggagagcgaggggagacagcacttagaggaggccgaaagggagcgcagggagaaggaagcactgcaggcagaattagaaaaggccgtcgttcgaggaaaagaactgggcgataggctggagcacctgcaacgggaattggagcaggctgcccttgagcgccaggagttcctgagagagaaggaaagccaacatcagagataccaaggactcgaacagcgcctggaggccgaactacaggccgctgccacgtctaaagaagaggccctaatggagcttaaaactagagcgcttcagcttgaggaggagctatttcagctgcgccagggcccagctgggctgggacccaagaaacgcgcagagccacagctcgtagaaacacagaacgtacgacttattgaggtggagcgctcaaacgccatgctagtggcagaaaaagctgcacttcaagggcagcttcaacacctggagggacagctgggatccctgcaggggagagcgcaggagctgctcctggcggaaagagaacggcttatgcaagatggccaccgtcagcgcggactggaggaagaacttaggcgcctgcagtcagagcacgacagagcacagatgctccttgccgagttatcacgggaacgaggcgagctccagggcgaaaggggcgagctgcgcggacggctggcacgccttgagttagagcgagcccaattagagatgcaatctcagcagctgagggagtcgaatcagcagcttgatcttagcgcctgccgcctgaccacccagtgcgagcttctgactcagctgagaagcgctcaggaggaagaaaatcgtcaactactggctgaggtccaagcactatctagagagaatcgagaattgctggaacggtcccttgagtctagagatcatctccatagggaacaaagggaatacttggatcagctgaatgctctacgcagagagaaacagaagctcgtggaaaaaatcatggatcagtatagggttttggaacccgtgccgcttcccaggaccaagaaaggatcatggctggcggacaaagttaaaagactcatgcgtccacggagagagggtgggccacccggaggcctacgtctcggagccgacggcgctggttctactgagagtttggggggacccccagagactgagcttccagaagggcgtgaagccgatggaactgggtctccttctccagctccgatgaggagagcccagagctcgctgtgtcttagagacgagacactcgccggtggtcaacgcaggaaactgtcatcaagattccctgtaggccgaagttccgagtcatttagcccaggcgacactccaagacagagattccggcagaggcatcctggcccactaggagctccagtcagccatagtaagggccctggtgtgggctgggagaacagcgccgagacattgcaggaacatgagaccgacgcgaatcgagaggggcctgaagtgcaggagcccgagaaaaggcccctcacaccctcgctgtcccagtag

SEQ ID NO: 218830 - DNA, 684 bp, synthetic construct
  misc_feature 1..684: note = Description of Artificial Sequence: Synthetic coding sequence
  source 1..684: mol_type = other DNA
atggggggaacgacgtcaactcggagagtcacctttgaggcggacgagaacgagaacattaccgtggtgaaggggattcggctctcggaaaacgtgattgaccgtatgaaagaatcttcgccgtcgggatcaaaaagccaacgatactctggcgcatacggtgcgagcgtaagcgacgaagagctcaaacgccgtgtcgctgaagagttggcgttagaacaggctaagaaggaatcagaagatcagaagcgccttaagcaggcaaaagagttggatagagagcgggctgccgcaaatgaacaactgacacgggctatcctcagggaacgtatatgcagtgaagaagagcgcgcaaaagctaagcacctggccagacaactcgaggaaaaggaccgggtacttaagaaacaggacgcattctacaaagagcagctggctcgcctcgaagagcgctcctccgagttttatagggtgaccaccgagcagtaccagaaagcagcagaggaagttgaagccaaattcaagcgttacgagtctcatccggtgtgtgccgatctgcaggcaaaaattctacagtgctatagagagaacacccaccaaaccctgaaatgctccgccctagctacccaatatatgcactgtgtgaaccacgcaaagcagtccatgctcgagaaaggtggctag

SEQ ID NO: 218831 - DNA, 417 bp, synthetic construct
  misc_feature 1..417: note = Description of Artificial Sequence: Synthetic coding sequence
  source 1..417: mol_type = other DNA
atgggaggcacaacctcgacgaggagggtgacatttgaagcagatgagaacgagaacatcacagtggtcaaagggatcagactgtcggagaacgttattgataggatgaaagagtcctcacctagcggatcaaagtctcaaagatatagcggtgcttatggcgcatccgtctccgacgaggaactgaagcgcagagttgctgaggagctggcgttggaacaggccaagaaggagagcgaagaccagaagaggctcaaacaggcaaaggagctcgatagggaaagagccgctgcaaatgagcaactcaccagagcgattcttagggaaaggatttgcagtgaagaagagcgcgcaaaagctaagcacctgatcaaggtggaattactttgggtcaaacccggagtattgactgcctag

SEQ ID NO: 218832 - DNA, 333 bp, synthetic construct
  misc_feature 1..333: note = Description of Artificial Sequence: Synthetic coding sequence
  source 1..333: mol_type = other DNA
atgaaatgcgaggagacacacgctccaaatagtaactgggtctacgtcatgctccccagtaaaaagacagtgagaatgccatctgtcacccaacggttgagagatcccgacattaatccctgcctgagcgagagtgatgctagtacgcgatgcctagacgagaacaattatgacagggaaagatgtagcacttactttttaaggtacaagaattgtcgacgcttctggaactccatcgtgatgcagcgacggaagaacggcgttaagccttttatgcccaccgccgcagagagagacgagattctgcgcgcagttggcaatatgccatattag

SEQ ID NO: 218833 - DNA, 258 bp, synthetic construct
  misc_feature 1..258: note = Description of Artificial Sequence: Synthetic coding sequence
  source 1..258: mol_type = other DNA
atgccttctgtgacccaacgacttcgagatccagacattaatccttgccttagcgaatcagatgcgtcaaccagatgcctggatgagaataactacgatagagaacggtgtagtacatactttctccgctacaagaactgccgtaggttttggaattccatcgtcatgcagcgcaggaaaaatggagttaagcctttcatgcccacggctgccgagagggacgaaattttacgagctgtcggtaacatgccatactag

SEQ ID NO: 218834 - DNA, 285 bp, synthetic construct
  misc_feature 1..285: note = Description of Artificial Sequence: Synthetic coding sequence
  source 1..285: mol_type = other DNA
atgctcccaagtaaaaaaaccgtgaggatgccttcagtgacgcagcgtcttcgggacccggatattaatccatgtctttcagaatcagatgcctcaactcgctgccttgacgaaaacaattatgaccgggagcggtgcagtacatacttcctgcggtacaaaaattgtagaaggttttggaactcaattgtgatgcagagacgtaaaaacggcgtgaagccctttatgcccactgccgctgaacgagacgaaattttacgtgctgtggggaacatgccatattag

SEQ ID NO: 218835 - DNA, 135 bp, synthetic construct
  misc_feature 1..135: note = Description of Artificial Sequence: Synthetic coding sequence
  source 1..135: mol_type = other DNA
atgcccagtgtaacacagcgcctgagggatcctgatataaatccttgcctgagcgagtccgatgccagtaccaggtgtttagacgagaataattacgaccgcgagcggtgtagtacttactttttgcgctattag

SEQ ID NO: 218836 - DNA, 294 bp, synthetic construct
  misc_feature 1..294: note = Description of Artificial Sequence: Synthetic coding sequence
  source 1..294: mol_type = other DNA
atgcaccaaactcggacaggcaaaaaaacagtgcgtatgccaagtgtgacacaacgtctcagggaccccgacatcaacccttgtttgtcagagagtgatgcatccacaagatgtctcgacgaaaacaactacgacagggaacgatgcagcacatattttttgcgctataaaaactgtcgcaggttctggaactcaatcgtgatgcagcggaggaagaatggcgtgaagccatttatgcctacagctgccgagcgggacgaaattttacgggctgtgggcaacatgccctattag

SEQ ID NO: 218837 - DNA, 207 bp, synthetic construct
  misc_feature 1..207: note = Description of Artificial Sequence: Synthetic coding sequence
  source 1..207: mol_type = other DNA
atgcatcagacacgcactggcaagaagaccgtgcgcatgccatcagttacccagagactgagggacccggacatcaatccgtgtctgtctatccttttctacttgctgaatgatgcatctctcatttctgtaaggaacctaatgctgcccccagatgtctggatgaagatcacaatgacggggaagggcgtgcccctgacctcatag

SEQ ID NO: 218838 - DNA, 264 bp, synthetic construct
  misc_feature 1..264: note = Description of Artificial Sequence: Synthetic coding sequence
  source 1..264: mol_type = other DNA
atgtccacatcagtgccacagggtcatacatggacccagcgcgttaaaaaggacgacgaggaagaggaccccctggaccagctgatcagccgaagtgggtgcgccgcttcccacttcgcagtacaggaatgcatggctcagcaccaagattggcgccagtgtcaacctcaggtccaagcgttcaaggactgcatgagcgaacagcaggccaggaggcaagaggagttgcagcgcaggcaggaacaagccggtgcacaccattag

SEQ ID NO: 218839 - DNA, 264 bp, synthetic construct
  misc_feature 1..264: note = Description of Artificial Sequence: Synthetic coding sequence
  source 1..264: mol_type = other DNA
atgagcacatcagtgcctcaaggccatacctggacacaacgcgtcaagaaggacgatgaggaagaggaccctctcgaccagctgatctcccgatctggttgcgccgcttctcattttgctgtccaggaatgtatggcccaacaccaagactggaggcagtgccagccccaggttcaggctttcaaggattgcatgtcagaacagcaggccagaaggcaggaggaactccaacgtagacaggagcaagccggagcccatcattag

SEQ ID NO: 218840 - DNA, 291 bp, synthetic construct
  misc_feature 1..291: note = Description of Artificial Sequence: Synthetic coding sequence
  source 1..291: mol_type = other DNA
atgttctatcggctgccgattccgaggatgagcacgtccgtccctcaggggcacacgtggacccagagggtcaagaaggacgatgaggaagaggatcctctggaccagctcatcagccgctctggatgtgctgccagtcacttcgctgtgcaggagtgcatggcccaacatcaggattggcgccagtgtcagcctcaggtgcaagctttcaaagactgcatgtcagaacagcaggcccgacgtcaagaagagctgcaacgacgacaggagcaggctggtgcccaccactag

SEQ ID NO: 218841 - DNA, 264 bp, synthetic construct
  misc_feature 1..264: note = Description of Artificial Sequence: Synthetic coding sequence
  source 1..264: mol_type = other DNA
atgtccaccagcgtaccacagggacatacttggacgcagagagtaaagaaggatgacgaggaagaggaccctttggatcagctgatttctaggtctggctgtgcagcttcccatttcgcagtacaggagtgtatggcccagcatcaggactggaggcagtgtcagccccaagtgcaagcctttaaagattgcatgtcagaacagcaagctcgcagacaggaggaattacagaggagacaagaacaggctggcgctcatcactag

SEQ ID NO: 218842 - DNA, 1731 bp, synthetic construct
  misc_feature 1..1731: note = Description of Artificial Sequence: Synthetic coding sequence
  source 1..1731: mol_type = other DNA
atggctgctagtgagaccgtgagactgcgcttacaatttgattacccaccgccagccacgcctcactgcactgctttctggcttctggtggatctcaacagatgccgggttgtgacggacctgatatctctcatacgacaaaggtttggctttagctctggggcattcctcggtctttacctcgagggcggacttctacctcccgcagaaagtgccagactcgtgagagataatgactgccttcgcgtgaagctggaagagaggggagtggcggaaaactctgttgttataagtaacggggacattaatctgtcactgcggaaagcaaaaaagcgggcattccagctagaagagggggaggagaccgagcccgactgtaagtattccaagaaacactggaagtcccgcgaaaacaacaataacaacgagaaagtcttggatcttgaacccaaggcagttactgaccagacagtttctaagaagaacaagcggaaaaacaaagctacttgcggtacagttggggatgacaacgaagaggccaaaagaaaaagtccaaagaagaaggagaagtgtgaatataagaagaaggccaaaaacccgaaaagccccaaggtgcaggcggttaaggactgggctaatcagcgctgtagctcgcctaaaggatcagcccgtaatagcttggtcaaggctaagcgcaagggctctgtgagtgtgtgcagtaaggagtccccttctagctcttcagaaagcgagtcgtgcgacgagtctatctctgatggcccatcgaaagtcactctggaagctcgaaacagtagcgagaagctcccaactgaactatccaaggaggagccctccactaagaatactactgcggacaaactggcaataaagcttgggtttagtcttactccctctaaaggaaaaacttctggcacaacctctagttccagcgattccagtgccgagtccgacgatcagtgcctcatgagcagcagcacaccagaatgcgccgctggtttcctgaagacggtcggtctgttcgccggaaggggccgtcccggtcccggtctatcatcccagaccgcaggcgctgccggttggcggaggagcggctccaatggcggtggccaggctccgggtgcctcacctagcgtatccctgccagcgagtttgggaagggggtggggcagagaggaaaatctgtttagctggaaaggggctaagggcagaggaatgcggggtaggggccgtggccgtggacatccggtctcttgcgtcgtcaatcgcagcactgacaatcaaagacagcaacagctcaacgacgtagtgaaaaattctagcacaataatccagaatcctgtggagacgccaaagaaggactatagcctattacctctcctcgcagcagcccctcaggtgggggagaagatcgcttttaagctcctcgaacttacgagcagctactccccagacgtcagcgactataaggaaggccgaatcctaagccataaccctgagacacaacaggtggatatcgagatactgagctcattgccagccttaagagaacccggtaaatttgacctggtctaccataacgagaacggtgctgaggtcgttgaatatgccgtgacgcaagaatctaaaattacggtgttctggaaagaattgatcgaccccaggcttatcatagaatctccgagtaatacgtcaagtaccgaacccgcatag

SEQ ID NO: 218843 - DNA, 519 bp, synthetic construct
  misc_feature 1..519: note = Description of Artificial Sequence: Synthetic coding sequence
  source 1..519: mol_type = other DNA
atggcctctgatgaggggaaactgtttgtcgggggtctgtcatttgacacaaacgaacaatcgctggagcaagtgttctccaagtacggccagattagcgaggtggtagtagtgaaagatcgggagactcaacgctctagaggattcgggttcgtgacctttgagaacatcgatgatgccaaagacgctatgatggccatgaacggcaagtccgtggatgggagacagatccgggtagaccaggctggcaagtccagcgacaataggtcgcggggatatagaggcggaagtgcgggtggtaggggcttttttagaggcggtcggggaaggggacgcggattctctcgcggtgggggagatagggggtacggcggtaataggttcgaatcaaggagcggagggtatggcggatcccgagattattactcttctagatcccagtcaggaggatattcagatcggtcatccggaggctcttatagggactcttatgactcttatgcaacccacaatgaatag

SEQ ID NO: 218844 - DNA, 792 bp, synthetic construct
  misc_feature 1..792: note = Description of Artificial Sequence: Synthetic coding sequence
  source 1..792: mol_type = other DNA
atggccagcgatgagggcaagctgttcgtgggcggactctcttttgacactaacgaacagtcactcgaacaggtcttttccaagtatggacagatcagcgaggtggtggtggtgaaagatagggagacccagcggtctcgaggcttcggcttcgttacttttgaaaatatagacgacgccaaggatgccatgatggccatgaatggcaaaagcgtcgacggaagacagataagggtagaccaggctggagggggagatagagggtatggaggcaatcggtttgagagccgcagtggaggctatggcggatctagggactattacagctcccgtagccagtcaggcggttattccgataggtctagtggaggtagctaccgcgactcctatgactcttacggtaaaagtcacagtgagggtgccacactcctgtggccggctgtgggcgcacgttttacgctggtaccctccccctcgaccctcggctggacccttagaccctgtcactgtgcctgtcccgaagaggcccatctatctagccaatcacacttttatcgccgaacccaaaagcccaatgaaacggatcagaagggcaagggcgagcgcggacctgcaggtcaatcggccagatgtatgtgcggtcgcaggccggcaagtctcgggtgcggcggatggctcctgcccggtaggcgccctcggccaggcctagcctccggtgttaagttgcccttagtcgcctctgtgccgctgcattgtgcctgcttcctttccagcgccacacacaacgagtag

SEQ ID NO: 218845 - DNA, 735 bp, synthetic construct
  misc_feature 1..735: note = Description of Artificial Sequence: Synthetic coding sequence
  source 1..735: mol_type = other DNA
atgtcctcccgctggtcacggagtagccagtcaacggatcggtctttaaaatctgtggacgggcgacagatacgggttgaccaggctggtaaatcgtcagataatcggtccagagggtatcggggaggcagtgccggagggaggggattctttcggggaggtcgaggaagagggagaggcttctcacgcggaggcggagatcgaggatatggcggaaacagatttgagtctcgctccggcggttacggaggatcacgcgattattattcttcacggagccagtctggaggatattctgacaggtcctcaggtggctcttaccgcgacagttatgacagctatggcaagagccactctgagggggctacactgctttggcccgcagttggggctcggtttactctcgtgcctagtccatccacactgggatggaccctgaggccctgccactgtgcttgccctgaagaggctcatctgtccagtcagagtcacttttatcggaggactcagaagccgaacgaaactgatcaaaagggaaagggggaaaggggcccagctggacagtccgccagatgtatgtgcggtagacgcccagcctcactcggatgtgggggatggctgctgcccggacggagaccacggccaggattagcctccggcgtgaagttgcctctggttgcctcggtaccactacactgtgcttgctttctttcttcagcaacccataatgagtag

SEQ ID NO: 218846 - DNA, 519 bp, synthetic construct
  misc_feature 1..519: note = Description of Artificial Sequence: Synthetic coding sequence
  source 1..519: mol_type = other DNA
atggccagtgatgaggggaagctctttgtcggaggcctcagcttcgatacaaacgaacagtcactcgagcaggttttctctaagtacggacagatttcagaggtggttgtcgttaaagatagggagacccaaaggagtcgtggattcggctttgtgacctttgagaatattgacgacgctaaggacgcgatgatggccatgaacggcaagtctgtggatggaaggcagattcgcgtcgaccaggccggtaagagttccgacaatagaagcaggggctatcgaggtggaagtgctggcggtcgcggtttcttcagaggtggaagggggagaggcaggggattttcccggggaggtggcgatagaggctatggcggtaatagatttgagagcaggtctggaggttatggaggatcccgtgattattactctagccgcagccagtccggcggttactccgaccgaagctcaggagggagctaccgggacagctacgatagctacgccacacacaacgaatag

SEQ ID NO: 218847 - DNA, 2304 bp, synthetic construct
  misc_feature 1..2304: note = Description of Artificial Sequence: Synthetic coding sequence
  source 1..2304: mol_type = other DNA
atgagcttcgacccaaatctccttcacaataatggtcataatggctaccccaatggcacgagcgcagcactgagggaaacgggtgtcattgagaaacttctgacctcctatgggttcattcaatgttcagagagacaggcccgactctttttccactgcagtcagtacaacggtaacttacaggaccttaaagtcggggacgacgtcgagtttgaagtcagcagcgaccgccgtactgggaaacctatagctgtgaagctagtgaagattaagcaggagattctgccggaggaacggatgaacggccaggaggtgttctatcttacttatactcccgaagatgtggaaggtaatgtgcagctcgaaacgggagataagatcaatttcgtcattgacaacaataagcataccggcgcagtttcagctcgcaatataatgctcttaaaaaagaaacaggcacgctgccaaggtgtggtttgtgcgatgaaggaagctttcggctttatagaacgaggagacgtggtgaaggaaatatttttccactatagtgagttcaagggggacctggagacactgcagcccggagacgacgtggagtttaccatcaaagacaggaacggaaaggaagttgctacagatgttcgcctgttaccacagggaacagtgatctttgaagatatcagtattgaacattttgaggggacagtgactaaggtcatccccaaagtgccatccaaaaaccagaatgaccctttacctggacggatcaaagtggattttgtcatcccaaaggagcttccgtttggggacaaagacaccaagtcaaaggtcaccttactggagggcgatcatgtgcgctttaacatatccacagatagacgcgacaaactggagcgcgcaaccaacatcgaggtcctcagcaatacattccaattcacgaacgaagcccgagaaatgggggtaattgcagcaatgagagacggctttggatttataaaatgtgtggacagagatgttcgcatgttcttccacttttccgagatcctggatgggaaccagctgcacatcgccgatgaagtggaatttactgtagtgccagatatgctctcagcccagaggaatcacgccattaggatcaagaagctgcctaagggaactgtcagttttcacagccactcggaccatcgttttctgggcacggtggaaaaggaagccacatttagcaatcccaaaactacgagcccaaacaaagggaaagaaaaggaggctgaggatggtatcatagcatacgacgattgtggcgtgaaactaactatagcctttcaggctaaagatgtggaagggtccacgagccctcagattggtgataaggtagagttctctatttcagataaacaaagacccggacaacaggtggctacctgcgtgcgcttgctgggcagaaattcaaatagtaaacgattattagggtacgtggcaactctgaaggataacttcggattcatcgagacggccaaccatgataaggaaatattttttcactacagcgaattctcaggcgacgtagattctttggagttgggcgatatggtggaatactccttatctaagggcaaaggcaataaagtcagtgcagagaaagttaacaagacgcatagtgtcaacgggatcactgaggaagctgatcccaccatatattctgggaaggtgattcgaccccttagaagtgtcgacccaactcagacagagtatcaggggatgatagagattgtggaagagggtgacatgaaaggtgaagtgtacccattcgggatcgtcggcatggctaacaagggggactgcctgcaaaagggagaaagcgtgaagttccagttatgtgtactcggacagaacgctcagaccatggcgtacaatataacgcctctgagacgggctacagtggagtgtgttaaagatcaattcgggtttattaattacgaagtgggagattctaaaaaactattcttccacgtaaaagaggtacaggatggaatcgagctgcaggccggagatgaggtggagttttcagtgatcctcaaccagcgcactgggaagtgttccgcatgtaatgtttggcgtgtatgcgaaggcccaaaggccgtagccgcacctagacccgataggctggtgaacagactgaagaacataacccttgatgacgcctccgcacccagactgatggtgctgagacaacctcgaggccctgataatagcatgggatttggcgcagagaggaagatccgccaggcgggagtgatcgactag

SEQ ID NO: 218848 - DNA, 2304 bp, synthetic construct
  misc_feature 1..2304: note = Description of Artificial Sequence: Synthetic coding sequence
  source 1..2304: mol_type = other DNA
atgtccttcgatccaaacctgctgcataataatgggcacaacggttacccaaacggcacaagcgccgctcttcgagaaaccggggtgattgagaagcttctcacctcttatggcttcattcagtgttcagaaagacaagccaggctcttttttcactgctctcagtacaacggtaacctgcaggaccttaaggtgggtgacgatgtcgagttcgaagtctcctccgaccggagaactgggaagcctattgccgttaaattggtcaagattaagcaggagatcctaccggaggagcgcatgaatggacaggaggtgttctacctgacatacacccccgaggacgtcgaggggaacgttcagctggaaacaggggataaaatcaatttcgtcattgacaataataagcatactggggctgtgtccgctcgaaacatcatgctgcttaaaaagaagcaggcaaggtgtcagggggtggtttgtgctatgaaagaggcattcgggtttattgagaggggcgacgtggtgaaggagatctttttccactactccgaatttaaaggcgatctcgagacattacaacccggagacgacgtggagttcaccatcaaggataggaacggcaaggaagtggcaaccgatgttagactcctccctcagggcactgtaatttttgaagatataagcatagaacacttcgagggcacagtcaccaaagtgattccaaaagtgccaagtaaaaatcaaaacgaccccttgccgggtcggattaaagtagactttgtcattcccaaagaattgccctttggcgataaggacaccaaatccaaagttacactcctggaaggagatcacgtcagatttaacatctccaccgatcgtagagacaagttagaaagagcaaccaacattgaagtgctgtccaacacttttcagtttaccaacgaagccagagaaatgggggtaattgccgcaatgcgtgacgggttcggcttcattaagtgtgtggaccgagacgtccgtatgtttttccattttagtgagattctggacgggaatcaactccacattgctgatgaagtcgagttcactgtagtgcccgacatgctgtccgctcagcgtaatcatgccatccgtattaaaaagctgcccaaggggacagtctctttccattcacactctgatcacagattccttggtactgtggaaaaagaggctacgttcagtaatccaaaaacaacatccccaaataagggtaaggagaaggaagctgaagacggaatcatcgcttacgacgactgcggtgtaaaactcactatagccttccaagcaaaggatgtggaaggcagcactagcccccagatcggtgataaggttgaattctctatttccgacaaacagcgaccagggcagcaggtggccacctgcgtgcggttgcttgggcgtaactctaattctaaacgactgctcgggtacgtggccacgcttaaagataatttcgggtttatcgagacagcaaaccacgataaggaaatcttttttcattactccgagtttagtggtgacgtggactccctcgaactgggcgacatggtcgagtactcactgtccaaggggaaaggaaacaaggtatcagcagaaaaggtgaacaagacgcacagcgtcaacggcatcacggaggaagcggaccctaccatctattccggcaaggttatacgcccactgcggagtgtggacccaacacaaactgagtaccagggaatgattgaaattgtggaggaaggtgacatgaaaggtgaggtttacccatttggtatagtcggaatggccaataaaggggattgcctccagaagggcgagtccgtgaaattccagctgtgcgtgctgggacagaatgcccaaacaatggcctacaacataacacccctgcgacgggctaccgtggagtgtgtcaaggaccaatttggcttcatcaactacgaagtgggagacagcaagaaactgtttttccacgtcaaggaggtacaggatggtatcgagctgcaggcaggtgacgaggtggaattttccgtgatcctcaaccagaggacggggaaatgctctgcatgcaatgtatggcgggtgtgtgaggggcctaaagcggtagccgcaccgaggcccgatagacttgtcaatcgcctgaaaaatataacacttgacgatgcttccgcgccacgactcatggtgctgcggcaacctcgcggtcctgataattcaatggggtttggagccgagcggaagattaggcaagcgggagttatagactag

SEQ ID NO: 218849 - DNA, 2397 bp, synthetic construct
  misc_feature 1..2397: note = Description of Artificial Sequence: Synthetic coding sequence
  source 1..2397: mol_type = other DNA
atgtcatttgatccaaacttgctgcacaataatgggcacaacggctaccctaacggcacctctgcagcgctgcgcgaaaccggagtcatagaaaagttactcacatcctatggctttatacagtgctcagagcggcaggccagactttttttccactgcagccagtacaatggcaatttgcaggatttgaaggtgggcgatgatgttgaattcgaagtgagctccgatcgaaggaccggcaagccgattgctgtaaagctcgttaaaatcaaacaagagatcctgcccgaagagcgcatgaacggacaggtcgtctgcgcggtgccgcataatctggagtcaaaatctcccgcagcaccgggtcaaagtccaacaggtagcgtatgctatgagagaaacggtgaagtgttctacctgacctacacgccagaggatgtggagggcaatgtgcagcttgaaacaggtgacaaaataaactttgttatcgataacaacaagcacactggagccgtgtctgcacgaaacatcatgctcctgaaaaagaagcaggccaggtgtcaaggagttgtgtgcgctatgaaagaagctttcggtttcatagagcggggtgacgtggttaaggagattttcttccactatagcgaattcaagggtgacttggagaccctccaacccggagacgacgtggaatttactatcaaggacaggaatggtaaagaagttgcgacagatgtcaggctgctgcctcaagggacagtgatttttgaggacatctcaatagaacacttcgaaggtaccgtaacaaaagtgattcctaaagtgccatccaaaaatcagaacgatccactccctgggagaatcaaagtagatttcgtcatcccaaaagaattgccattcggggataaagataccaaaagtaaagtaaccctcctggagggggaccatgttcgatttaacatcagcacagaccgtagagataagctcgagcgcgcaaccaatattgaagtcctgtcgaacacttttcagtttactaacgaggctcgcgagatgggcgtcatcgctgctatgcgcgatggcttcggattcataaagtgtgttgatagagacgttagaatgttttttcacttttcggaaatcctggatgggaatcagctccatattgcggatgaagtcgagttcacagtcgtgccggatatgttgtctgctcaaaggaatcatgccattcgtatcaagaaactacccaagggtactgtgagtttccactcacactccgatcaccgattcctgggcaccgtggaaaaggaggccacgttctctaacccaaaaaccacctctcctaacaaagggaaggagaaggaggcagaagatggtattattgcttatgatgactgcggggtcaaactgaccatcgcgttccaggccaaagacgtggagggcagtacaagtccccagattggagacaaagtggaattctctatttctgacaaacagcgcccagggcagcaagttgccacatgcgtgcggctgctgggacggaattctaactctaagagactgttgggttacgttgccacactgaaggataatttcgggtttattgagactgctaatcatgacaaagagattttcttccactacagcgagttctcaggagacgttgactccctagaactcggcgacatggttgagtactcgctgtctaagggaaagggcaacaaagtcagtgccgaaaaggtgaataagactcacagcgtgaatggaatcacagaagaagctgatcctaccatctatagtggcaaggtaattagacctctgagaagtgtggacccaacgcagacagagtaccagggcatgattgaaatcgtcgaggaaggggacatgaaaggcgaggtgtacccgttcgggatcgttggcatggccaacaaaggggattgccttcagaagggtgagtccgtcaaatttcagttgtgcgtgcttggacagaacgctcaaactatggcctataacattactcccttgaggcgcgcaaccgtggagtgtgtgaaggaccaatttggctttattaactacgaggttggcgacagcaaaaaattattctttcacgtgaaagaagttcaggacggaatcgagctccaggctggcgatgaagtagaattcagtgttattttgaaccagagaacaggcaagtgcagtgcttgcaacgtctggagagtgtgcgaaggtcctaaggcagtggctgccccacgacccgacaggctggtcaacagattgaaaaacattactctggacgacgcctctgcaccaagattaatggtgctgagacaacccaggggaccagacaacagtatgggttttggtgctgagaggaaaatacgccaagctggtgtcatcgactag

SEQ ID NO: 218850 - DNA, 2442 bp, synthetic construct
  misc_feature 1..2442: note = Description of Artificial Sequence: Synthetic coding sequence
  source 1..2442: mol_type = other DNA
atggagaacgtctttaccgtaagtagtgatcctcacccttctcctgccgcacctccttccctgtcgctgcccttgagcagcagctctacctcgagcggaaccaagaagcagaaacgcacaccaacttatcagaggtcaatgtcgttcgatcctaatcttctacataacaacggtcacaacggctaccctaacgggacctcagctgccctgcgggaaaccggcgtgattgagaaactgctcacatcatacggcttcatccagtgttctgagaggcaagccagacttttcttccactgctcacagtacaacggtaacctgcaggacctcaaggtgggcgatgacgtcgaatttgaagtgtcttccgatcggcgtactggtaagccgatcgccgttaagttagtgaagatcaagcaggaaatcctgccagaggaaagaatgaacggccaggaggtgttttacctcacctatactcccgaggacgtagaaggcaatgttcaactggaaactggggacaaaattaactttgtgatagataataataagcatacaggagcagtgtctgccagaaatataatgctgctcaagaagaagcaggcaagatgccaaggtgttgtctgcgccatgaaggaggccttcggcttcatcgagcgcggagacgtagtaaaagaaattttttttcactattcagagtttaaaggcgatctggagacactgcagccgggagacgacgtggagtttaccattaaagataggaatggtaaagaggtggcaactgatgttcgcttattgccgcagggcactgtcatctttgaagacatttcaatcgagcacttcgaaggtaccgttacaaaggtgatcccaaaagtcccttccaagaaccagaatgatcccctgccaggcaggataaaagtggatttcgtgatccctaaggagctgccgtttggcgacaaggatactaaaagcaaagtgacactactagaaggagaccatgtgcggtttaacatttcgaccgatcggcgagacaagctcgaacgagcaaccaatatcgaggtgctatctaacacgtttcagttcacaaatgaagcacgcgagatgggggtgattgcagctatgagggacggtttcggcttcataaagtgtgtggacagagacgtcaggatgttttttcacttcagcgaaatcctggatgggaatcagttgcatatagccgacgaggttgaatttaccgtcgtgccagatatgttatccgctcagcgaaaccatgcaattcgcattaaaaagttgccaaaaggcactgtgtccttccattcccattccgaccatcgctttctcgggacagtagagaaagaggcaacattttccaatcccaaaacaacttcccctaacaaaggtaaggaaaaagaggctgaggacgggatcatcgcgtatgacgactgtggggttaagttgaccatcgcatttcaggctaaagatgtggagggaagtaccagcccacagataggggataaagtggagttctccatcagcgataaacagcggcctggccagcaggtggctacatgtgtgcggttgctggggcgtaacagcaacagcaaacgactactgggctacgtggcaacactgaaggacaactttggatttatcgagacagccaatcatgataaagagatctttttccattactccgagtttagcggcgatgtcgacagtctcgaacttggggacatggtggagtactccctttcaaaagggaagggaaacaaagtgtccgcagagaaggttaacaaaactcactcagtaaacggtataactgaagaggctgaccctaccatctattcaggcaaggtgattcgcccacttcgatccgtggaccctacccagacagaatatcaggggatgatcgaaatagtcgaggagggggatatgaagggtgaggtctaccccttcgggatagtgggaatggccaacaagggcgattgcttacagaaaggtgaatcggttaaattccaattgtgcgttcttggccagaacgctcaaacaatggcctataatatcacacctttacgtcgggctactgtggaatgcgtcaaggaccagttcgggttcatcaattatgaagtgggcgactccaagaagctgttttttcatgtaaaagaagtccaggacggtatcgagttacaggcaggcgatgaggtggagttctccgtcatcctgaaccaacggacaggaaagtgctcggcatgcaacgtgtggcgtgtgtgcgaaggccctaaagccgttgctgcaccacgacctgacaggctcgttaatagattaaaaaacattaccctcgacgacgcatcagctcccagactgatggtgctcagacagcccaggggccctgataattccatgggatttggggcagagcgcaaaattaggcaggcgggtgtgatcgactag

SEQ ID NO: 218851 - DNA, 2535 bp, synthetic construct
  misc_feature 1..2535: note = Description of Artificial Sequence: Synthetic coding sequence
  source 1..2535: mol_type = other DNA
atggagaatgtattcacggttagttccgatcctcacccatccccagcagcccctcctagcctgtctctgccactgtcaagcagctccacaagttccggtaccaaaaaacaaaagaggacgcctacctaccagcgcagtatgagcttcgatccaaacttgctgcataataatggacacaacgggtatcccaacggaaccagcgctgcactgagggaaacaggtgtgatcgaaaagttattgacttcttatggctttatccagtgtagcgagaggcaggcccgtctcttctttcactgttcccagtacaacggcaatcttcaggatcttaaggtgggcgatgacgtagagttcgaagtgtcaagcgaccgtaggacaggaaagcccatcgcagtcaaacttgtcaagataaaacaggaaattcttcccgaggaacgtatgaacgggcaggttgtgtgcgccgtgccacacaatcttgaatctaagagcccggctgccccaggacagtctccaacgggatcagtatgttacgagagaaatggcgaagtgttctatcttacatacaccccagaggacgtggaaggcaatgtacagttggagacgggtgacaaaatcaactttgttatagataacaacaagcacacaggagcagtgagtgccagaaacatcatgctgctcaagaagaagcaagctcggtgccagggcgtcgtatgtgctatgaaggaggctttcgggtttatcgagaggggggatgttgttaaggagatcttcttccattatagcgaattcaaaggtgacctggagacactgcagcccggagatgacgttgagttcaccattaaagatcgcaacggcaaggaggtggcaaccgacgtgcggcttctgcctcagggcacagttatcttcgaagatatctctatcgaacactttgagggcacggtgacaaaagtcatccccaaggttccatcaaagaaccaaaatgaccccctgccgggaagaattaaagtcgattttgtcatccctaaggagctccctttcggggataaggacaccaagtcaaaagttactctgctggaaggtgaccacgttcgctttaacatctcaacagacaggagagataagttagagagggctacgaacattgaggtattatctaacacctttcagtttacaaatgaggcacgggaaatgggcgtaatcgccgctatgcgtgatggatttggcttcatcaaatgtgtcgatcgagatgtaagaatgttcttccattttagtgaaatcctggacggaaatcagctgcatattgccgacgaagtcgagtttaccgtcgtgccagatatgctctcagcgcagagaaaccacgctattcgaataaaaaagctccctaaagggacagtatctttccactcccacagcgatcaccggttcctgggaacggtggaaaaggaggctacattctccaacccgaagaccacatcgcccaataaggggaaagagaaagaagccgaggatggcatcattgcctacgatgactgtggcgtcaagctgaccatcgccttccaggccaaagacgtggaaggtagtacgtccccccagatcggtgacaaagtggaattttccataagtgacaaacagcggccaggacagcaagtcgccacatgtgtgcgacttctgggacggaacagtaatagcaagaggctccttggttacgtggccactctgaaggataatttcgggttcatcgaaaccgctaaccacgataaggaaattttctttcattactctgaattctcgggtgacgtggacagcttggaactgggggatatggtcgagtactcactgagcaagggcaagggaaataaggtgtcagcagagaaagtcaacaagacacattctgttaatggaatcaccgaagaagccgaccctacaatttactccggtaaagtgatccgaccgctccggagcgtagatcccacccagaccgaatatcaaggcatgattgaaattgttgaggagggagatatgaaaggtgaggtgtaccccttcgggattgtcggaatggctaacaagggggattgtctacagaaaggggagagcgtgaagtttcaattatgcgtgcttggacagaacgcccaaacaatggcatataatattaccccgctcagacgggctaccgttgaatgcgtgaaggaccaattcggttttatcaactacgaagttggggatagcaaaaaattgttttttcacgtgaaggaggtacaggatggaatcgagttgcaggcaggagacgaggtggagtttagcgtaattctgaaccagcgcaccggaaagtgttccgcctgcaacgtatggcgggtgtgcgaggggccaaaggctgttgcagccccacgtccagatcgattggtgaatagactgaagaacatcactctggacgatgcatccgccccaagactgatggtgttgcgacaacccagggggcctgacaactcaatgggctttggggcagagagaaaaattaggcaagccggtgtgattgactag

SEQ ID NO: 218852 - DNA, 141 bp, synthetic construct
  misc_feature 1..141: note = Description of Artificial Sequence: Synthetic coding sequence
  source 1..141: mol_type = other DNA
atgtcctttgaccctaatcttttgcataacaatggccataacgggtatccaaacggtaccagtgccgctctccgggagacaggagtcattgagaaactactaacttcctacggcttcatccagtgcagcgagagacagtag

SEQ ID NO: 218853 - DNA, 24 bp, synthetic construct
  misc_feature 1..24: note = Description of Artificial Sequence: Synthetic coding sequence
  source 1..24: mol_type = other DNA
atgtcatttgaccctaatctctag

SEQ ID NO: 218854 - DNA, 2007 bp, synthetic construct
  misc_feature 1..2007: note = Description of Artificial Sequence: Synthetic coding sequence
  source 1..2007: mol_type = other DNA
atgaatggccaggaagttttttacctgacctacacacccgaggacgtggaaggcaacgttcagctggagacaggtgacaaaatcaactttgtcatcgacaacaataagcataccggtgccgttagtgctagaaatatcatgctcctgaagaagaagcaggctcgctgccagggcgtcgtgtgtgccatgaaggaggcatttggtttcatcgagcggggagatgtggttaaagaaatcttcttccattacagtgagttcaagggcgatctggagaccctgcagcctggggatgatgtggaatttacaattaaagatcggaatggtaaagaagttgccactgacgtccggctgctaccccaggggaccgtgattttcgaggatattagcatcgagcattttgaaggcaccgtgactaaggtgatcccgaaggtgccatccaaaaaccagaatgaccctctccccggacggatcaaggtggatttcgtgatacctaaagaactgccgttcggagataaggacacaaaatccaaggtaacgctgctggagggagatcatgtaagattcaacataagcactgatagaagggataaactggaaagagccactaatatcgaggtactctctaatacatttcagttcaccaacgaagctagggaaatgggagttatcgctgctatgcgggacggtttcggatttattaagtgtgtggatagagacgtaaggatgtttttccatttctcagagatcctagatgggaaccagctgcatatcgcagacgaggtggagttcaccgtcgtacccgatatgctgagtgctcagcgaaatcacgctatcaggattaagaagctcccaaagggcactgtgtcatttcatagccactcggaccatcggtttctgggcaccgtggagaaggaagcaacctttagcaatcccaagaccacaagccctaacaaagggaaagagaaggaggctgaagacggaatcattgcttacgatgactgtggtgtgaaactcacaattgcgttccaggctaaagatgtggagggatcaacctcccctcagatcggagacaaggtggagttttccatttctgacaaacagaggcctgggcagcaggtcgctacctgcgtgaggcttctggggaggaatagcaattctaagcgacttctgggatatgtggcgaccttgaaggacaacttcgggttcatcgaaacagctaatcatgataaagaaatctttttccactattctgaattcagtggagatgtggattctctggagctgggcgatatggtggagtatagcctctccaaaggcaagggtaataaggtgtcagcagaaaaagtcaataagactcatagcgtgaacggtatcacagaagaggcagatccgacaatctacagcggtaaggtgattaggcctcttcgctctgtcgatccaactcagactgaatatcagggtatgatcgagattgtggaggagggagacatgaaaggtgaggtgtatccctttggcatagtcggaatggccaacaagggagactgcctccagaagggcgagagtgttaagtttcagctttgcgtgttaggacaaaatgctcagaccatggcatataacatcactcccctgcgcagagctacagttgagtgcgtgaaagaccagttcggcttcataaactacgaggtgggcgactcgaagaagctcttctttcacgtcaaggaggtgcaagacggtatcgagttacaggccggagatgaagtagaatttagcgtgatcctcaaccagcgcactgggaagtgcagcgcctgtaatgtctggcgggtgtgcgagggacctaaggcagtcgcggctccccgaccggatcgtctagtcaatcgtctgaaaaatattacattagacgatgcgagcgccccacgcctcatggttctgaggcaaccacgcggaccagacaatagtatggggtttggggctgaaaggaagatccgtcaagctggcgttatcgactag

SEQ ID NO: 218855 - DNA, 288 bp, synthetic construct
  misc_feature 1..288: note = Description of Artificial Sequence: Synthetic coding sequence
  source 1..288: mol_type = other DNA
atgtcatttgaccccaacttgctgcataacaatggccacaacggctaccctaacggcacctcagccgctctgagggagaccggcgtgattgagaaactcctgacaagctacggatttatccaatgtagtgagagacaggcacgactctttttccactgcagtcagtacaacgggaacctgcaagacttaaaggtgggggacgatgtagaatttgaagtatcctccgaccgcagaacaggaaagcccatagctgttaagcttgtgaagatcaaacaggagattctgtag

SEQ ID NO: 218856 - DNA, 2397 bp, synthetic construct
  misc_feature 1..2397: note = Description of Artificial Sequence: Synthetic coding sequence
  source 1..2397: mol_type = other DNA
atgtccttcgacccgaatctgctccacaataatggtcataacggataccccaacgggacttctgccgctctgcgggaaactggtgtcatcgaaaagctcctgacttcctacggctttatccagtgctccgaaagacaggcaaggctcttcttccattgcagccagtataatggtaatctccaggacctgaaagtgggggacgacgtggagtttgaggtgagcagcgaccgcaggacaggcaaacctattgcagtcaaactagtgaaaattaaacaggagattctgcccgaagagagaatgaatggccaggttgtttgcgccgtgccgcacaacttggagtccaaaagcccagcggctcccggtcaatctcccacaggttccgtctgctacgaacggaacggtgaggtgttttatctgacctacaccccggaagatgttgaaggtaacgtgcagcttgagactggcgataagatcaacttcgtgatagataacaataaacacaccggggctgtgtcagccaggaatatcatgcttcttaagaagaaacaagccagatgccaaggtgtggtgtgcgcaatgaaggaggccttcggatttatcgagaggggtgacgtcgtgaaggaaatcttcttccattactcagagttcaaaggggatctcgagacactgcaacccggagatgatgtggagtttacaataaaggaccggaatggcaaagaagtcgcgacagatgtgaggctgctccctcagggcacagtaatattcgaggatatctccatcgagcactttgagggcactgttactaaagtcatcccaaaggtcccctcaaagaatcagaacgatccgttgcccggaagaatcaaggtagactttgtgatacctaaagaactcccctttggtgataaagacacaaagagcaaggttactttgctggagggggaccatgttcgatttaacatttcaactgacagaagagataagctcgagcgcgcaaccaacattgaagtgttaagcaacaccttccaatttaccaatgaggctcgggagatgggtgtcatcgcggcaatgcgggatggctttggttttattaagtgtgtcgatagagacgtgcgcatgttctttcacttttcagagatccttgatggtaaccagttgcatattgcagacgaagtcgagttcaccgtggtgcccgacatgttgtccgcccagcgcaaccacgcaatcagaatcaagaaactgcccaagggaaccgtgtccttccatagccactccgatcatcggttcctgggtacagtggaaaaggaagccacattttctaaccccaagaccacttccccgaacaagggcaaggagaaagaggccgaggatgggataatcgcttacgacgactgtggggtgaaacttacaatcgcctttcaggcgaaagatgtggaaggaagtacttctccgcagatcggtgataaggttgagttcagtatcagtgacaaacaaaggccaggacagcaggtggccacttgcgtacggctattggggaggaatagcaacagtaaaaggctacttggttacgtcgctactctgaaggataattttgggttcatcgagaccgccaaccatgataaggaaatattctttcattactccgagttctcaggcgatgtcgactctctggaactaggggacatggttgaatatagcctgtctaagggtaagggcaacaaagtctcagctgagaaggttaacaaaacccatagtgtgaatgggataaccgaggaagcagatccaacaatctactctgggaaggtgatccgccctctgagatccgtggaccctactcagacagaatatcagggcatgatcgagatcgtcgaagaaggcgatatgaagggcgaggtgtacccttttggcatagtcggtatggccaacaaaggcgactgtcttcagaaaggggaaagcgtgaaattccagctttgcgtgctgggtcaaaacgcccaaactatggcttataatattaccccactccgtagggccacagtggagtgtgtgaaggatcagtttggtttcatcaactacgaagtgggtgactccaaaaagctgtttttccatgtcaaggaggtgcaggatggcatcgagctgcaggccggagatgaagttgaattcagtgtcatcctgaaccaaaggactggcaagtgctctgcctgcaatgtctggcgggtctgtgagggtcccaaagctgtggctgcacctagaccggacagactggtaaatcggttgaagaatatcaccctggatgacgcatccgcgccacgccttatggttcttagacaaccaagaggacctgacaactcgatggggtttggcgctgagcggaagattcgtcaggccggagtaatagactag

SEQ ID NO: 218857 - DNA, 1329 bp, synthetic construct
  misc_feature 1..1329: note = Description of Artificial Sequence: Synthetic coding sequence
  source 1..1329: mol_type = other DNA
atggaggcatccagatgtaggttatccccatctggcgactcagtttttcatgaagaaatgatgaagatgcggcaagcaaagctggactatcagcgcttgttgctggagaagcgccaacgcaagaagcggctggagccctttatggtccagccaaatcccgaggcacggttgaggcgcgcaaagcccagagcctccgatgagcaaacccctctagtgaattgtcacacacctcactccaacgtgatcctgcacggcattgatggacccgcagcggtgctgaagcccgatgaggtacacgctccctcagtgtcatctagtgtcgtggaggaggacgcagaaaacactgtggatactgctagtaagcctggcctgcaggaaaggctgcaaaaacatgatattagcgagagcgtaaatttcgacgaggagacagatggtatctctcagtccgcatgcctggagcggccaaattcagcttcaagccagaacagtactgatacaggcaccagcggtagcgctactgctgcccaacccgcagataatcttttaggggatatagatgacctagaagattttgtttattcgcccgcaccacaaggagttactgtccggtgccggatcatccgagataagagaggaatggacagagggctattccccacctactatatgtacctggagaaagaggagaatcagaagatcttcctgctggcagcgcgaaaaagaaagaaaagtaagactgctaattacttgatcagcatcgacccagtggacctgagcagggagggagaatcctatgtgggtaagctcaggagcaacttgatggggaccaaatttacagtttacgaccggggaatctgccctatgaagggaagaggactggtgggtgcagctcatacccgacaggagttagccgctatttcgtacgagactaacgtgttgggatttaaagggccacgaaagatgtctgttatcattcctggcatgaccctcaaccataagcaaatcccgtaccagccccagaataaccacgacagtctgctcagccgctggcagaacagaactatggagaatcttgtggagctacacaataaggcccctgtctggaattccgatacccagagctacgtgctgaacttccggggacgagttacccaggcaagtgtgaaaaatttccagattgtccataagaatgatcccgactatatcgtcatgcaatttggcagagtggctgacgacgtgttcaccctcgattacaactatcccttgtgcgcagtgcaggcatttggcatcggtctcagctcttttgactctaaattggcatgtgaatag

SEQ ID NO: 218858 - DNA, 912 bp, synthetic construct
  misc_feature 1..912: note = Description of Artificial Sequence: Synthetic coding sequence
  source 1..912: mol_type = other DNA
atgtcagaggctggggaggctactaccaccacaacaaccacattgccccaagcacccaccgaggcagccgctgcagctccccaagatccagccccaaaatctcccgtggggagcggagcaccccaagctgccgctcctgcccctgccgctcacgtggccggaaatccgggtggggatgccgcacctgccgctacgggcaccgctgccgcagccagcctcgcgaccgctgcagggagtgaggatgcggagaagaaagttcttgctacaaaggttctcgggacagttaaatggttcaacgttcgcaatggctacggtttcatcaataggaacgacacgaaagaggatgtttttgttcatcagactgcaattaaaaaaaataatcccagaaaatacctgagaagtgtcggggacggggaaacagtcgaattcgacgtggtggagggggaaaagggagccgaagcagcgaacgtcaccgggcctgatggtgtgccagtggagggttcacgatatgcggctgatcggagacggtaccgcaggggttattacggtcggagaagggggccacccagaaacgcaggggaaatcggcgagatgaaagacggggttccagagggcgcacaactgcaggggcctgtacacagaaacccaacctaccggccaagataccggagtcggggtccaccaagacccagaccggcacctgccgtgggtgaggctgaggacaaggaaaatcagcaggccacttcggggcctaaccagcccagcgtccgacgagggtatcgccgtccatacaactacaggcggcgacccagacctccaaatgcaccgagccaggacggcaaagaggcgaaggccggagaggcgccaaccgaaaacccggctccacctacccagcaatcctctgcggagtag

SEQ ID NO: 218859 - DNA, 339 bp, synthetic construct
  misc_feature 1..339: note = Description of Artificial Sequence: Synthetic coding sequence
  source 1..339: mol_type = other DNA
atggagaaaatactgatacttttgcttgtggccctgtcagtagcctatgccgctccagggcctagagggatcataatcaaccttgaaaacggcgaactgtgtatgaacagcgctcaatgcaagagcaactgttgtcagcactcctctgcactaggtctcgctcggtgcacgagtatggcctcagaaaattccgaatgttccgttaaaaccctctacggaatttattacaagtgtccctgtgaacgcggtctcacttgcgaaggcgataaaaccatcgtcggatccatcactaacaccaattttgggatctgtcacgatgctgggagatctaaacagtag

SEQ ID NO: 218860 - DNA, 216 bp, synthetic construct
  misc_feature 1..216: note = Description of Artificial Sequence: Synthetic coding sequence
  source 1..216: mol_type = other DNA
atggaaaaaatcctgatcctcctgcttgtggcactctccgtggcctatgccgctcccggtcctcggggaattatcatcaatcttacactgtatggcatctactacaagtgcccctgcgagcgcggactgacgtgtgagggcgataaaaccatcgttgggagcattacaaatacaaactttggaatttgccacgacgcaggccgttctaagcagtag

SEQ ID NO: 218861 - DNA, 408 bp, synthetic construct
  misc_feature 1..408: note = Description of Artificial Sequence: Synthetic coding sequence
  source 1..408: mol_type = other DNA
atgcagttaacatgggcttcgattagcctcgtaacccggtgttggccccagactccaacgtttcaggatttgctggcttgtctgggcgctagggcattgccgggaccacctggggctccaggcagagacggcagcaaaggggagaggggggcacccggtccacgtggcagtcctggccctcccggatctttcgattttctcctgctcatgctcgctgacatccgaaatgacattacagaactgcaggagaaggtgtttggacatcggactcactcttcggccgaggagttcccactgccccaggagttccctagttaccctgaggcaatggatttgggctccggcgatgaccatccgagacggactgagacacgggacctgagggcacctcgagatttttacccttag

SEQ ID NO: 218862 - DNA, 1221 bp, synthetic construct
  misc_feature 1..1221: note = Description of Artificial Sequence: Synthetic coding sequence
  source 1..1221: mol_type = other DNA
atggttcccccaccaccctcccgaggtggtgctgcaaggggccagctggggcgatctttaggcccattgcttctgctcttggcccttgggcatacctggacctacagagaggagccggaagacggagacagggagatttgctctgaatccaaaatcgccactacgaaatacccatgcctgaaaagcagtggagagctcacaacctgttaccgaaaaaagtgttgtaagggttataagttcgtgcttggccagtgtatcccagaggattacgacgtgtgcgccgaagcgccatgcgaacagcagtgcaccgataattttggcagagtgctgtgcacatgctatcctggatatcggtacgatcgagagaggcacagaaagcgggaaaagccatactgtctggacatcgatgagtgcgcatcatcaaacggtaccctttgtgcgcacatctgcataaacaccctaggctcttacagatgtgagtgtcgtgagggctacattcgggaggatgatggaaaaacttgtacacgtggtgacaagtatcccaatgatactgggcacgagaagtcagagaatatggtaaaggcaggcacatgttgtgcgacctgcaaggaattctatcagatgaaacagaccgttctccagttgaagcagaagattgccctgctcccgaataacgcagccgacctggggaagtatatcactggcgacaaggtgttggctagcaacacatatctcccaggccctcctggtctgccagggggacaggggcctccgggatcccccggacccaagggctctccgggtttccccggaatgccgggtccccctggccaaccaggaccccgaggatccatggggccaatgggcccaagccccgacttaagccacatcaaacaggggagaaggggccctgtaggccctcccggagctcctggacgtgatgggagcaagggtgaacgtggagccccaggccctcgtggctcccccggacccccaggcagtttcgactttctgctgctcatgctcgctgacatccgcaatgacatcacagagttgcaggagaaagtatttgggcacaggacacatagttcggccgaggaattccccctcccccaggaattcccctcatatcccgaggccatggatctggggtccggcgatgaccacccacgacgcactgaaacccgcgatctcagagccccacgagacttttacccctag

SEQ ID NO: 218863 - DNA, 699 bp, synthetic construct
  misc_feature 1..699: note = Description of Artificial Sequence: Synthetic coding sequence
  source 1..699: mol_type = other DNA
atgtggcctcctggccgttctatcactgtgaagctgcgcgaaaaaaccgtgtcgcgcaaactagagatgaacggaccttccgcttttcaggggctgatctgcgggaaatataacgggatgtgtctgcaggggcctgcaggagtgcccggacgggacggcagcccgggtgctaacggcattccaggaactcccggaatcccgggacgagatgggtttaagggagagaagggagaatgtctaagagaatcctttgaagaaagctggacccctaactataagcagtgctcatggtctagtctgaattacggcatagacctgggcaaaatagctgagtgtaccttcacaaaaatgaggagcaactccgccttacgcgttctgttcagtggatctctccggctcaaatgccgaaacgcctgctgccagagatggtatttcactttcaacggcgctgaatgcagcgggccacttcctatagaagctatcatctacttagaccaggggtccccagaaatgaattccactataaacatccacaggacctccagtgttgagggcttgtgcgaaggaatcggagctggcttggttgatgtagcaatttgggttgggacttgctcagattatcccaaaggtgacgcatctactggatggaactccgtcagccgcattattattgaggaacttcccaactacctgttctag

SEQ ID NO: 218864 - DNA, 732 bp, synthetic construct
  misc_feature 1..732: note = Description of Artificial Sequence: Synthetic coding sequence
  source 1..732: mol_type = other DNA
atgagaccacagggaccagcggcttccccacaaaggctccggggactgctgcttctcctgctgctgcagttgccagctccgtcaagtgctagcgaaatccccaaggggaaacagaaggcacaattgcggcaacgagaagtcgtagatctgtataatggcatgtgcttacagggccctgcaggggtgcccggaagggacggatcaccaggagccaatggaattccagggacacctggcattccaggacgggacggctttaagggtgagaagggagagtgcctccgggagtctttcgaagagtcttggacccctaattacaagcagtgttcttggagctcactgaactacggaattgatctcggaaagatagcagagtgcaccttcacgaaaatgagatccaactctgccctccgtgtgctgttttccggctcgttgaggctcaagtgccgcaacgcttgctgccaacgatggtatttcacattcaatggtgccgaatgtagtgggccactccctatcgaggcaataatttatctggaccagggtagccccgagatgaattccaccattaacatccatcggacatcatctgtcgaaggcctgtgcgagggaatcggtgcgggactggtcgacgtcgcaatttgggtcggtacctgtagcgattatcctaagggggacgcaagcaccggctggaattccgtttccaggatcattattgaagaactcccaaagtag

SEQ ID NO: 218865 - DNA, 690 bp, synthetic construct
  misc_feature 1..690: note = Description of Artificial Sequence: Synthetic coding sequence
  source 1..690: mol_type = other DNA
atgtggcctcctggcaggagtatcaccgtgaagttgagagagaagactgtttctcgtaaactggagatgaacggcccatcagcgtttcagggacttatctgcggtaaatacaatgggatgtgcctgcaggggccagccggagttcccggtcgagatggctctccgggtgccaacgggatccctggcactcccggtatccctggcagggacggcttcaaaggagagaaaggggagtgtttgagagagagttttgaggagtcctggacacctaactacaaacaatgctcctggtcatcactgaactatggcatagacctcggcaagattgcagaatgtactttcacaaagatgcgttcaaattccgccctgagagttctattttccggatctctccgccttaagtgccgaaatgcatgttgccaacgatggtacttcacattcaatggggctgagtgctctggccctctccctattgaggcgatcatctacctggaccagggctcaccagagatgaactctacaatcaacatccaccgcaccagttcggtagaaggcctttgtgagggaatcggtgctggtctcgtggacgtggccatctgggtagggacctgtagcgactatcccaagggcgacgccagtactgggtggaactcggtgtcacgaattatcatcgaggagctgcccaaatag

SEQ ID NO: 218866 - DNA, 5036 bp, synthetic construct
  misc_feature 1..5036: note = Description of Artificial Sequence: Synthetic coding sequence
  source 1..5036: mol_type = other DNA
atgcatccaggtttgtggctgctgctggtcacgctctgtctcacggaggagttggcagctgctggagaaaaaagctacggcaagccatgcggagggcaggactgctccgggagttgccaatgcttccccgaaaagggcgcacgaggtcgcccaggccctatcggtatccagggacctactggccctcagggcttcactgggagcacagggctgtcaggtttgaagggggagcggggtttcccaggtttgctggggccttatggtcccaaaggggacaaaggacccatgggggtacccggattcctgggcattaatgggatccctggccacccgggacagccagggcctagaggaccacccggtctcgatggatgcaacggaacccaaggcgctgtcgggtttccaggccctgatgggtatcctggtctgctcggacctccaggattgccgggacagaagggcagcaaaggggaccctgtgctggcccctggaagcttcaagggcatgaagggggatcctgggctgcccggattggacggaatcaccgggcctcagggcgctcctggttttccaggcgctgtgggcccagctggtcccccaggactccagggacccccagggccaccaggcccattgggacctgatggtaatatggggttgggatttcagggcgaaaaaggagtcaagggggatgtgggcttgccaggtccagcaggacctcccccaagtacgggagaattagagtttatggggttcccaaaaggtaaaaaaggatctaaaggggagcccggtccgaagggctttcccggaatcagcggcccaccaggctttcccggacttggaacaaccggtgaaaaaggcgagaagggtgagaaaggcatcccaggactcccgggacccagaggacctatgggcagtgagggcgtgcaaggcccacccggacagcaggggaagaagggcactttaggattccccggtctgaatggcttccaggggatcgaggggcagaaaggcgatattggcttgcctggacccgacgttttcatcgacatcgatggcgcagtgattagcggaaaccccggtgatcctggagttccaggcctacccggactgaaaggagacgaggggatacagggcctgaggggaccctctggcgtcccagggctgcccgcactgtccggagtccccggagcactgggccctcagggatttcctggcctaaaaggcgatcaaggaaaccctggcagaactacgattggtgcggctggtctgccaggacgagatggcctcccaggcccacctggacccccagggccacctagccctgagttcgagactgagacgctccacaataaggagtccggttttcccggtctcaggggagagcagggccctaaagggaacttggggttaaaaggcatcaaaggggattcgggcttctgcgcctgtgatgggggagtgccaaacacaggccctcccggagaacccggacctcccggtccttggggtctgatcgggctacctgggttaaaaggtgccaggggcgaccggggaagcggcggtgcacagggcccagctggagcccctgggttggtgggcccactggggccttccggacctaaggggaagaagggagaacctatcctctcaactattcaaggaatgccaggagaccgtggcgattctggctcccagggatttaggggcgtgatcggcgagcccggaaaagatggagttcctggcctccctggcctccctggcctccctggcgatggcggtcaaggctttcccggagaaaaaggactgccgggactaccaggggagaaagggcacccaggtccgccaggattgccaggaaatggcctgcctggcttgcccggacccagaggcctccctggggacaaagggaaagatggactcccaggtcaacagggcctgccaggaagtaaaggtatcaccctaccctgtattattccaggaagctatggaccctccgggtttcccggaacacccggattcccgggtcctaagggaagtcgcggattgccagggaccccgggtcagccgggatcttctgggtcaaaaggcgaacctggcagccccggtctggtgcaccttcccgagctccctggatttcctgggcctagaggcgagaaaggtctccctggctttccaggcctgcctgggaaggacggcctgcccggaatgatcggctctcccggactgcccggaagcaaaggagccactggagatattttcggggcagaaaatggagcccctggagagcagggcctgcaaggcctgaccgggcacaaaggctttctgggtgactctgggctgcccggactgaagggggtgcatggaaagcccggtctgcttgggcctaagggtgaaagaggttcaccgggtactcccggacaagttgggcaaccgggaacccctgggtcatctggtccctacggcattaagggcaagtcaggccttcccggagctcccggatttcctggcatcagcggccatccaggcaagaagggaaccaggggaaagaaagggcctcccggatccattgtgaaaaaaggcctaccgggtctgaagggactcccaggcaacccagggttggtgggtctgaaaggctctcctggctcacccggagtggccggtctacctgcgttgtctggacctaaaggcgaaaagggcagcgtaggatttgtggggttccccggtattcccggactgccaggtattcctggcacaagaggtctcaagggcataccagggagcactggaaagatgggcccttccggacgtgccggaacgcctggcgagaagggtgataggggtaatcctggtcccgtggggattccctccccccgaaggccaatgagtaatctgtggctgaagggggacaagggatcgcagggttccgctggcagcaacgggttccccggacctcgcggagacaagggagaagctggaagacctggaccaccaggcctgcctggggctcccggactgcctgggataatcaagggagtctccggaaagcccggtcctccgggattcatgggcatccggggacttccaggactgaagggctcttcaggaattaccggcttccccggaatgccaggcgagtcgggatcccagggcatccggggaagcccaggcctaccgggagcttctggcctgccaggtctgaagggtgataacggacagactgtggagatctccggcagtccaggacctaagggacaaccgggtgagagcggctttaaagggaccaaggggagagatggactcatcgggaatatcggcttccctggtaacaaaggtgaggatggtaaagtcggcgtgagcggcgatgtgggactgccgggagcccctggatttccaggcgtggctggcatgcggggtgaacccggactgccgggatcatctgggcaccagggagccattgggcctctgggaagtccaggactgattggaccaaaagggttccccggtttccccggtctgcatggcttgaatggacttccaggaacaaagggcacacatggaacacctgggcctagtatcacaggtgtgccaggacctgccggactgccaggaccaaagggggagaaaggctaccctgggatcggcatcggcgctcccggaaagcccggactccgagggcagaaaggtgataggggctttcctggcctgcaagggcctgcaggtctacccggtgccccaggaatttccctgcccagtcttatagcgggacaacccggagatcctggacggccaggcttagacggcgagcggggtaggcccggacccgcagggccacctggcccacctggtcctagttccaaccaaggcgacaccggagaccccggtttccccggaatacccggatttagcggactgcctggagaactcggcctgaagggaatgagaggagaaccgggatttatgggcaccccgggaaaggtggggccaccaggagaccccggatttcctggaatgaaaggaaaggcgggacccagaggcagctccggactgcagggagatccgggtcagacaccgactgctgaagcagtacaggttcccccaggcccactaggcctgcctggaatcgatgggatccctggactgaccggagacccaggggctcaaggtccagtgggacttcagggaagcaaggggctacccggaatcccgggtaaggacggcccatcaggcttacctggccctcctggagccctcggagacccaggtctccccggattgcaaggccctcccggattcgagggtgcccctggtcagcaggggccttttggcatgcccggaatgcctgggcaatccatgagagtcggatatacccttgtcaagcattcccagtccgaacaagtgcctccttgtccgatcgggatgagccagctctgggtcgggtatagtctgttgttcgtggagggacaggagaaggcacataatcaagatctgggatttgctggaagctgtctccctaggttttccacaatgccttttatctattgtaacatcaacgaggtctgccactacgcacggcgaaacgacaagtcctactggttatccaccacagcccctatccctatgatgcctgttagccagacacagatccctcaatacatcagtagatgttccgtgtgcgaggctccgagtcaagcaatcgccgtacattctcaagatatcacaattcctcagtgcccgctgggttggagatcactgtggatcggctacagctttcttatgcacaccgcagccggtgcagagggcggtggtcagtcgctagtgagccccggatcttgtctggaggatttccgggctacaccctttatcgagtgtagcggagccagagggacatgccactacttcgccaataagtatagcttctggctgacaaccgttgaggagcgtcagcaattcggagagctcccagtttctgagactttgaaagccggtcagctgcacactcgggtatccagatgccaggtatgtatgaaaagtcttta

SEQ ID NO: 218867 - DNA, 3087 bp, synthetic construct
  misc_feature 1..3087: note = Description of Artificial Sequence: Synthetic coding sequence
  source 1..3087: mol_type = other DNA
atgagggcagcccgagctctcctccctcttctgctgcaggcctgttggacagccgcacaggacgaacctgaaacccccagagccgtggccttccaagattgtcctgtggatttattctttgtgctggacactagtgagtccgtggcccttcgactgaaaccttacggcgctctcgtggataaggtcaagtcctttactaagcggttcattgacaaccttagggaccggtattaccggtgcgacagaaacttagtgtggaatgctggcgctctgcattactctgacgaggtggagattatacaaggcctcacaagaatgcccggaggaagggatgctctgaagtcttcagtagatgccgtcaagtacttcggaaagggtacatacaccgattgtgcaattaagaaagggctggagcaactgttggtaggtggaagccacctgaaggaaaacaagtacctcatagtagtgaccgatggccaccctctggaggggtataaagagccttgtggcggactggaagacgctgtgaatgaggcaaaacacctgggcgtcaaggttttttccgttgcaatcactccagaccacttagaaccacgcctgtctattatagcaacagaccatacataccggcgaaatttcacagctgccgattgggggcagagccgagacgcggaagaggccatctcccagacgatagatacaatcgtggacatgatcaagaataacgtagagcaggtttgctgctccttcgagtgtcaaccggcaaggggtcctcctggtctccgcggagacccaggcttcgagggcgagcgcggaaagcctggtttacccggtgagaagggagaggctggcgatcccggaaggcctggggacctcgggcctgtgggttatcaaggaatgaaaggtgagaagggctcccgtggagaaaaaggatcacggggtccgaagggctataaaggagaaaaaggaaagcgtggtatcgacggagtggatggcgtcaagggcgagatgggttaccccggactcccaggatgcaagggctcacctggctttgacgggatccagggccctcctggaccaaaaggagaccccggagcgttcggccttaagggcgagaaaggggaacctggagcagatggcgaggccggtaggcccggatcctcaggacctagcggagacgagggccagccaggcgagccaggcccacctggtgaaaagggtgaagccggagacgagggcaatcctggcccagatggagccccaggggagagaggagggccaggcgagagaggcccaagaggcacacctggaacacgcggtccgagaggggaccccggtgaagcagggcctcagggggaccaggggagggaaggccctgtaggagtccctggcgacccaggagaggccggtcccatcggccctaagggatatcgaggcgacgagggacctccagggtctgagggtgccaggggggctcctggaccagctggaccccctggggatcctggactcatgggtgagcggggagaagatggcccagcgggtaatggaacagagggatttcctggattccccggatacccgggtaatagaggagcccctgggatcaatggaaccaaaggctaccctggactgaagggcgacgaaggcgaggcaggggatcctggcgatgataacaacgacattgcccctcggggtgtgaaaggggctaaagggtaccggggacctgaaggtccccagggacccccagggcatcagggacctcctggacccgacgagtgcgagattctagatataatcatgaagatgtgcagctgttgtgaatgtaagtgcggacctattgacctgctgttcgtgctggattcttccgaaagcatcggcctccaaaatttcgaaattgcaaaggacttcgtagtgaaggtaatcgatcgtctctcccgagacgaactcgtgaagttcgaacctgggcagtcctacgcaggggtggtgcagtactcccacagccagatgcaggagcacgtcagccttcggagcccatcgatccgtaacgtacaggagctaaaggaagccatcaaatccctccagtggatggcgggaggcactttcacaggggaggccttgcagtacactagggatcagctgttgcctccgagcccgaataataggattgcgctggtgatcacagatggcagatccgatactcagagggatacaactcctttgaatgtcctgtgcagccctggcatccaggtggtgtccgtgggaatcaaagacgtgttcgacttcatccccggaagtgaccagctgaacgtgatctcatgccagggcttagcaccctcacaaggccgacccggactgagcctggtaaaagagaattatgccgaactactggaggacgcctttctcaagaatgtgaccgcccagatctgcatcgacaagaagtgtcctgattacacctgtcccattacgttttcgtcgcccgcagacatcacgatcctcctggatggtagcgcttcagtgggaagtcacaacttcgacaccacgaagcgatttgctaaaagactcgcagaacggtttttgactgcgggtaggaccgacccagcccatgacgtcagagttgccgtggtccagtatagcggaaccgggcagcagagacctgagagagccagtcttcagtttcttcagaactacactgccctagcttctgctgtggatgcaatggatttcattaacgacgcaaccgacgtcaacgacgccctgggatatgtcacacgcttctaccgcgaagcaagtagtggcgcagccaagaagcgccttttgcttttcagcgacggcaattctcagggcgctacaccggctgccattgagaaagccgtccaggaagcccagagggcaggtattgagatatttgttgtggtggttgggcgtcaggttaatgagccccacatccgcgttttggtaaccggaaaaacagcagagtacgatgttgcttacggggagtctcatttgtttagagtgccttcttaccaggcattgctgagaggcgtctttcaccagaccgtgtcccgtaaggtggccctcgggtag

SEQ ID NO: 218868 - DNA, 1770 bp, synthetic construct
  misc_feature 1..1770: note = Description of Artificial Sequence: Synthetic coding sequence
  source 1..1770: mol_type = other DNA
atgcgagcagccagggcactgctgcctctcctgctgcaggcatgctggacagcggctcaagatgagcctgagactcctagagctgttgcgttccaagattgtcccgtggacctctttttcgtgttggacacgtcagaatccgtggccctgcgtctcaagccctatggtgccctcgtggacaaagtcaaatcttttacaaaacgctttatagataacctccgggacaggtattacaggtgcgatcggaatcttgtttggaacgccggtgcattgcactacagcgatgaggttgagatcatccaggggctgacccggatgcccggaggccgagatgcacttaagtcctcagtagatgcagtgaagtatttcggcaagggcacatacacagactgtgccattaaaaaaggactcgagcagctgctggttgggggatcacatctcaaggaaaacaagtacctcatcgtggtaaccgacggacacccccttgagggttataaggagccttgtgggggactggaggacgccgtgaatgaggctaaacatcttggggtcaaagtcttcagcgttgctatcacacccgatcacctcgagccgaggctatctattatcgctactgatcatacctaccggagaaacttcaccgccgcagactggggacagtcccgcgacgcagaagaagcgatatctcagaccattgacaccattgttgacatgataaagaacaacgttgaacaggtctgttgttccttcgagtgtcaacccgcaagaggaccccctggactgagaggcgacccagggttcgagggcgagcgaggaaagccaggcctgcccggagagaaaggggaggcaggagatcctggacgccctggggatttggggcctgtcggctaccaaggaatgaaaggtgagaagggctcgcgcggagagaaaggttctaggggccctaaggggtacaaaggagaaaagggtaagagagggattgatggcgtggacggagtgaaaggagaaatgggataccccggattgccagggtgcaagggcagtcccggtttcgacgggattcagggaccacctggccctaagggcgatcctggcgctttcggccttaagggggaaaaaggagaacccggtgctgacggggaagctggaagacccggttcaagcgggccatccggtgacgagggtcagcccggtgagcctggtccacccggagagaagggcgaggcaggagacgaaggaaaccctgggcctgacggtgcgcctggcgagaggggcggacccggtgagagagggccacggggaacaccaggaaccaggggcccacgcggagaccctggggaggccggtccacagggagatcagggcagagaaggtccggtaggagtgccaggagacccaggagaagcaggcccaataggacccaagggatataggggggatgaagggcctcccggtagcgagggggctaggggcgctcccggtcccgcaggaccacctggggatccaggcctgatgggagagcgaggtgaggacggtcccgctggaaacggcacagaaggcttccctggctttcctgggtatccaggcaaccggggagctcctggaattaatgggaccaagggttatccaggcttaaaaggagatgagggtgaagccggagaccctggagatgataataacgacatcgcacccagattgctcagggtattgctcgttacagggctggacctcggcccaacagccctagaggctgcagcggatcagcactag

SEQ ID NO: 218869 - DNA, 324 bp, synthetic construct
  misc_feature 1..324: note = Description of Artificial Sequence: Synthetic coding sequence
  source 1..324: mol_type = other DNA
atgagagcagcaagggccctgctccctttgctgttgcaagcatgttggactgccgctcaggacgaaccagagacaccgagagctgtggccttccaagactgtcctgttgatctcttcttcgtactggatactagcgaaagtgtggctctccgactcaaaccgtacggagctttagtggataaagtaaagtccttcacaaaaaggtttattgataatctgcgagaccggtactaccgatgcgatcgaaacctcgtgtggaatgccggagctcttcactacagtgatgaggtggagattatccagggattgacccggatgccttag

SEQ ID NO: 218870 - DNA, 3060 bp, synthetic construct
  misc_feature 1..3060: note = Description of Artificial Sequence: Synthetic coding sequence
  source 1..3060: mol_type = other DNA
atgttgcaaggaacatgcagcgttttgctgttgtgggggatccttggcgcaatccaggctcaacagcaagaggtgatctcaccagacactacggaacgcaacaacaactgtccggaaaagaccgattgtccgatccacgtatactttgtgttggacacctctgaatccgtgacgatgcagagccctaccgacatactgctgttccatatgaaacagtttgtccctcagtttatctcccaattgcagaatgaattctatcttgatcaggttgctctcagttggaggtacggcggactccattttagtgatcaagtggaggtgtttagcccccctggtagcgaccgcgcaagctttataaagaacctccagggaattagcagcttcagaagaggaactttcacggactgtgccttggctaacatgacagaacagatacgccaggatcgatccaaaggcacagtacattttgccgttgtgatcacagacggccacgtgactggatccccttgcggaggaataaagttgcaagccgagagggctcgggaggaagggatccgtttattcgccgtggcccctaatcagaatctgaaggaacagggattacgcgatatcgcaagcacgccacacgagctatacagaaatgactatgccactatgctcccagatagcaccgaaatagaccaagacaccattaaccggattattaaagtgatgaagcatgaggcttacggcgagtgctacaaggtctcctgtctggaaatccctggcccttctggaccaaagggatacaggggccagaagggtgcaaagggcaacatgggtgagcctggtgaaccaggacagaagggcaggcagggggaccctggcatcgaagggccaattggttttcctggcccaaaaggagtgccaggcttcaaaggtgagaaaggcgaattcggcgctgatggacgaaagggcgcacctggcctagcagggaagaacggaacagatgggcaaaaggggaagttgggaaggatcggacctccagggtgcaagggcgatcccggaaatagaggtcccgacgggtatcccggagaggctggttctcccggagagcgtggagaccagggagggaaaggagatcccggtagacccggacgcagggggcctcctggtgagatcggggcaaaaggctcaaaagggtaccagggaaactctggagcgccaggcagcccaggtgtcaaaggggctaaaggagggcctgggccacgtggcccaaagggcgaaccaggtagaaggggtgatcctggcaccaaaggctcccccggtagcgatgggcctaaaggcgagaaaggagaccccggtcctgaggggcctcggggattggctggagaagtggggaataagggcgcaaagggtgatcggggtttgccaggccctcgtggtccccagggcgcactcggtgagcctggtaaacaggggtctcgtggcgaccctggcgacgccggacctcgaggggatagcggacagcctggacctaagggagatccagggagaccaggtttcagttatcctgggcctagaggtgcccctggcgagaagggagagcctgggccacgtggaccagagggaggacggggtgatttcgggctgaaaggcgagcctggccgtaagggcgagaagggcgaacccgcagatcccggacccccaggcgagcccggacctagaggtcctagaggggtccccggacccgaaggggaacccggaccccctggggatcccggacttacagagtgcgatgtgatgacttacgtgagggaaacttgcggatgctgcgattgcgagaagagatgtggtgcactcgacgtcgtttttgtgatcgattcgtccgagagtatcggctatacaaattttaccttggagaagaattttgtaattaatgtagttaaccgcttgggcgcaattgctaaggatcccaagtccgagacaggaactcgagttggagtggtgcagtacagtcacgagggcacttttgaggcgattcagctcgatgatgagcgaatcgattctctgtcctcatttaaggaggcagtcaagaatcttgagtggattgcaggtggcacctggacaccttctgcgttaaagtttgcttacgatcgcttgatcaaggagtctaggcgacagaagacccgcgtatttgctgtcgttataaccgacggaaggcacgaccccagggatgatgatcttaatctaagggcactctgcgatagggacgtgactgtgactgcgatcggaatcggagacatgttccacgagaagcatgagtcagagaatctgtatagtatcgcgtgcgataaaccgcagcaggttcggaatatgaccctgttctctgatctggtcgccgaaaaatttatcgacgacatggaggatgtgctgtgtcctgatccccagattgtgtgccctgatttgccatgtcagaccgagctcagcgtcgcccagtgtacccagcgccctgtcgacattgtgtttcttcttgacgggtctgagaggcttggtgaacaaaactttcacaaggctaggcggtttgttgagcaggttgcccgaagactcaccctcgctcgtcgcgatgacgatccactcaacgcacgcgtcgctctcctgcaattcggcggtcctggagaacagcaggtggcgttccctctgtcccacaaccttactgccattcatgaagctctggagactacccagtatctgaatagttttagccacgttggggctggggtggttcatgccattaacgccatcgtgcggtctcctcgcggaggggcaaggcggcacgcagaactctcatttgttttcctgacagatggggtgaccggcaacgatagtctgcacgaatccgcccattctatgcgaaagcagaacgtggtgccaacagttcttgctctggggagtgacgtcgacatggacgtgctcacaacgctgtcactgggtgaccgtgcggctgtgttccatgaaaaagactacgattctcttgcacagcccggtttcttcgatagatttattagatggatctgttag

SEQ ID NO: 218871 - DNA, 2487 bp, synthetic construct
  misc_feature 1..2487: note = Description of Artificial Sequence: Synthetic coding sequence
  source 1..2487: mol_type = other DNA
atgcttcaggggacctgcagtgtgttgctgctttggggcatattaggtgccattcaggcccagcagcaagaggtgatctcaccagacaccaccgagcgtaataataattgccctgagaagactgattgcccgatccatgtctactttgtgctcgacacctctgagagcgttactatgcaaagccctacagacattctactcttccacatgaagcagttcgtgccccagttcatcagtcaactgcagaatgaattctatctggaccaggtagccctgtcctggcgatacgggggactgcatttcagcgaccaggtggaggtcttttcgccaccgggatcggaccgcgcttcctttatcaagaaccttcaggggatatcaagctttagacgaggaacctttaccgactgcgccctagcgaacatgactgagcaaatcagacaggatcgatcgaagggaaccgtccactttgccgtggtgatcactgacgggcacgtcacaggcagtccgtgcggcggtatcaagctacaagccgaacgggcacgggaggaaggcattcgactctttgctgtagctcccaatcaaaacttgaaggagcagggcctgcgggacattgcatccacaccccacgaactttaccggaacgattatgcgaccatgttaccggacagcacagaaatcgaccaagacactatcaaccggatcataaaggtgatgaagcacgaggcatacggcgagtgttacaaggtctcttgcctagagatacccggaccgagtgggccaaaggggtaccgaggtcagaagggtgccaaaggcaatatgggtgagccaggagagccaggtcaaaagggacgccagggggatcctgggatcgagggaccgatcgggttccccggacccaaaggtgtgcctggcttcaaaggagaaaaaggcgaatttggcgctgacggtcgcaaaggcgcacctggactcgccggaaagaacggaacagacggacagaaaggaaaattgggccgaattgggcctcccggatgcaagggtgatcctggcaaccgcggacctgatggctatccgggagaagccggaagtccaggagaacggggtgaccaaggcggtaaaggcgacccagggcgtcccggaaggcgcggacccccaggagagatcggtgcaaagggctctaaagggtatcaggggaacagcggcgcacctgggtcacctggggtgaaaggcgctaagggagggccaggtccgagggggccaaagggggagccaggcaggcgcggtgacccgggtaccaaagggtcccctggtagtgatggtccaaaaggcgaaaagggcgatcctgggccagaggggcctaggggtttagcaggcgaggtcgggaacaaaggtgcaaagggagacaggggtctgccaggccctcggggtcctcagggcgctttgggcgaaccgggaaagcaaggaagcaggggagacccgggtgatgcgggtccacgcggagactcaggccagccgggacctaagggagacccaggaagacctggattctcatatcctggtcccagaggcgctccaggcgagaagggggagcccggtccgaggggacctgagggaggaagaggagattttggactgaagggggagccagggagaaagggcgaaaaaggagagcccgcagaccctggccctcctggggagcctgggccacgtggtccccgaggagtccctggccctgagggtgagcctggccctcctggagatccagggttgaccgagtgtgatgttatgacttatgtgcgcgaaacctgtgggtgctgtgactgtgagaagagatgcggtgccctggacgtggtcttcgtgatcgatagctcagagagtatcggttataccaattttactctggagaaaaacttcgtgatcaacgtggtgaacaggctgggggcaatcgcgaaggatcctaaatctgagactgggacacgagtgggagtcgttcaatactcccatgagggtacttttgaggccatccagctggatgacgagaggatcgacagtctctccagttttaaggaggccgtgaaaaacctggaatggatcgccggtgggacctggaccccctcagcgctgaagtttgcctatgacagactgattaaggagtcgcggcgacaaaaaactagagtgttcgctgtggtaataaccgacggtcgacatgatcctcgcgacgatgaccttaaccttagagcactctgtgatcgggacgtgacagttaccgcgataggcataggcgacatgtttcatgaaaagcacgagagcgaaaatctgtattccatcgcgtgtgataagccacagcaggtcaggaacatgacactgttcagcgatctcgtagcagagaagtttatagacgatatggaagacgtgctgtgcccggatccgcagatcgtgtgtcctgatctgccttgccaaactggtctggatggcgctgtgctttgttag

SEQ ID NO: 218872 - DNA, 2757 bp, synthetic construct
  misc_feature 1..2757: note = Description of Artificial Sequence: Synthetic coding sequence
  source 1..2757: mol_type = other DNA
atgctgcaagggacttgcagcgtgcttctgttgtggggaattctcggcgctattcaagcccagcagcaagaggtgatttctcctgatactacagagagaaataacaactgtccagagaaaacagactgccccatccacgtctattttgtgcttgacaccagcgagtccgtgactatgcagtccccaacagacatcctgctcttccacatgaaacagttcgttccgcagtttatctcccagttgcagaatgagttttatctggaccaggtggcgttgagctggaggtacggcggactgcactttagcgatcaggtagaagtgtttagcccccctggatccgatagagctagcttcatcaaaaatcttcagggaatctcgagctttaggcgtggcaccttcactgattgcgccctcgccaatatgacagaacagatcagacaggacaggagcaagggcaccgtccacttcgcggtggtgattaccgatgggcacgtcacaggatctccatgtgggggaatcaaattacaggcagaacgtgctagggaggaaggaattcggctttttgcggtcgccccaaaccagaacctgaaggagcaaggtctgagagacatcgcttctaccccccatgaactgtatcggaatgactacgccacaatgctcccagacagcacggaaatagaccaagacacaatcaatcggatcatcaaggtgatgaagcacgaggcttacggcgagtgctataaggtttcttgccttgaaatccccggacccagcgggccaaaaggataccggggacagaaaggtgctaagggaaacatgggcgagcctggcgagcctggacagaagggccgacaaggggatccgggaatcgaaggcccaattggctttcccggaccaaaaggtgtgccaggcttcaagggggagaagggcgaatttggcgcagatggacgcaaaggggctcccggactcgcaggcaagaatggcactgacgggcagaagggcaagctgggaaggatcggtcccccaggctgcaaaggcgacccaggcaataggggcccagacgggtaccccggagaggccggaagcccaggggaaaggggggaccagggaggcaaaggtgaccctggcagacccggtcggagaggtcccccaggagagatcggagccaagggctctaagggttaccaggggaatagtggcgctccaggctctcccggtgtgaagggagctaagggagggccagggccaaggggcccaaagggcgagccaggtcggcgtggcgacccaggcacaaaggggtcccctggcagtgatggacccaagggggaaaagggagaccccggtccagaagggcctagaggattggccggagaggttggcaataaaggcgctaaaggcgatcggggactgcccggacccagggggcctcagggcgctctgggcgagccaggtaaacagggctctaggggcgaccccggtgacgcaggccctagaggggattctggacagcccggtcccaagggggatccaggaaggcctggcttcagctacccaggccctcgaggcgctcctggtgagaaaggtgagcctggccctcgcggtccagagggtggcagaggcgactttggcctcaagggagagcctggacggaaaggcgaaaagggggagcccgctgacccaggccctcccggagagcccggtcccagaggccctagaggcgtgcctggaccggagggagaacccggacctccgggagaccctggtctgacggaatgtgatgtaatgacatatgtccgagagacatgtggctgctgcgattgcgagaaacgttgtggtgcattggatgtggtgtttgtgattgacagttccgagagcataggctacaccaattttactcttgagaagaatttcgtgatcaatgtcgttaacagattgggcgctattgctaaagatccaaaatccgaaactggcacaagagtgggcgttgtgcaatactcacacgaggggacctttgaagcgatccaactggatgacgagaggattgacagcttgagctcatttaaggaggccgtgaagaacttggaatggattgcaggcggtacatggaccccatcagccctaaagttcgcctatgatcgtctgattaaagagtctcggagacagaagactcgggtatttgccgtagtgatcaccgacgggaggcacgaccctagggacgacgacctgaatctacgggcattatgtgatagagatgtgaccgtcacagcaatagggattggagacatgttccacgagaaacacgaatcagaaaatctttattccatagcctgcgacaagccacagcaagtacggaacatgaccctcttctctgatctggttgcagaaaaattcatagacgacatggaagacgtgctgtgtcccgatcctcagatcgtttgcccggatctcccttgccaaactgatgctccatggccaggaggtgaacctccagtcacattcttacggacagaagaggggcctgacgccaccttccctcgtacaattcctcttatccagcagttacttaacgccaccgaacttacccaggatcctgcagcctattctcagctggttgccgttctggtatatacggcagaacgggctaagtttgctacaggagtcgaaagacaagattggatggagttattcatcgacacgttcaagttggtgcaccgagatatcgtgggggaccccgagaccgccttagctttatgctag

SEQ ID NO: 218873 - DNA, 2757 bp, synthetic construct
  misc_feature 1..2757: note = Description of Artificial Sequence: Synthetic coding sequence
  source 1..2757: mol_type = other DNA
atgttacagggtacctgtagcgtgctgctgctgtggggtattcttggtgcaatccaggcccagcagcaggaggtaattagtccggacacaacagaacgcaataataattgcccagagaagactgattgtccaatccatgtatacttcgttctggacacaagcgagtccgttactatgcagagccctacagacatcttactttttcatatgaagcagttcgtgccccagtttatctctcagctgcagaatgagttttatttagaccaagtggcactgagctggaggtacggcggacttcatttttcagatcaggttgaagtcttttctcccccaggctccgaccgggcaagcttcattaagaatttacaaggtatttcctccttccgcagggggactttcaccgattgtgccctggctaatatgacagaacaaattaggcaggaccgctccaaaggaacggtgcacttcgcagtggttattacagatggccacgtgactgggtctccttgcggtgggatcaagctccaggcagagcgcgctcgcgaggagggcataagattgtttgccgtggctcccaaccagaacctcaaagagcaaggcctgagagatatcgcctccacgccgcatgaattgtaccgaaatgactacgctacaatgttacctgatagcacagagatcgatcaggacactatcaatagaatcatcaaggtcatgaagcatgaggcctatggcgaatgctataaggtatcttgtttagagatcccaggaccctccgggcctaagggctatcggggacagaagggggctaagggcaatatgggcgaacctggagagcccggacagaagggtcgtcagggagatccgggaattgagggccctatcggctttcctggaccaaaaggggtacctggcttcaagggcgaaaagggggaatttggggcagacggccgaaagggagcccctggtctcgcgggtaaaaacggaactgacggtcagaagggcaagctcggtcgtattggacctcccggatgcaagggcgaccccggaaatcggggacccgatgggtatcctggcgaagctggctcaccaggcgaaagaggcgatcagggaggcaagggggacccaggcaggccagggagaaggggtcccccaggtgaaattggcgctaaaggttctaaagggtatcaggggaacagcggggctcctggttcccccggtgttaaaggagctaagggcggacccggtccgaggggccctaaaggagagcctgggaggcggggagatcctgggactaaggggtccccgggatccgatggccctaagggtgagaagggtgacccaggaccggaagggcctcgcggactggctggagaagtcggaaataagggcgctaaaggcgatagggggctgcctggacctcgcggtccccagggggcactgggtgaacccggtaagcagggctcgaggggcgacccaggcgatgccggtccccgaggagattcaggacagcccggtcccaagggcgatcctgggagacccggattttcctaccccggacccagaggcgctccaggcgagaagggggaaccaggccctagagggccagaagggggacgcggagactttggcctgaaaggggagcccggtaggaaaggcgaaaaaggcgagcccgcagatcccggaccccctggggagccaggaccccgagggccaagaggtgtccccggacctgagggggagcctggaccccctggggaccctggcctcaccgagtgtgacgtaatgacatacgtcagggagacttgcggatgctgtgactgcgagaaaaggtgtggtgctctggacgtggtgtttgttattgactctagtgagtcaatcgggtataccaactttacactggagaagaactttgtgattaacgtggtcaacaggcttggtgcgattgcaaaagaccctaagtcggagacaggaaccagagtaggggttgtgcagtattcccacgagggcacttttgaagcaattcagttggacgacgagcggatcgattccctctccagttttaaagaggccgttaaaaatcttgaatggattgccggagggacatggacaccgtcagcgttgaagttcgcctatgaccgcctaataaaagagtcacgcaggcagaagacaagagtgtttgctgtggtgatcaccgatggtcgacacgaccctagagacgacgatcttaacttaagggccctctgtgaccgcgatgtaaccgtgaccgctattggtataggcgatatgttccacgagaagcacgagagtgagaatctttacagcatagcctgtgacaagccgcaacaagtgcgaaacatgacgctctttagcgacctggtagccgagaagtttatcgacgacatggaggacgtcctgtgcccagatccacagattgtgtgtcccgatctcccgtgtcaaacggacgccccatggcccggaggggaaccaccagtgaccttcctgaggactgaagaagggcctgatgccacgttcccacgcacaatcccactaatccagcagttgctaaatgcaacggagttgacccaggatcctgcagcctacagtcagctggtggctgtgctggtgtataccgctgaaagggccaagttcgccactggggtggagcgccaggattggatggagctgtttatcgacacgttcaaattagttcacagagatatcgtgggtgatcccgaaacagcactggcactatgttag

SEQ ID NO: 218874 - DNA, 2487 bp, synthetic construct
  misc_feature 1..2487: note = Description of Artificial Sequence: Synthetic coding sequence
  source 1..2487: mol_type = other DNA
atgcttcaggggacgtgtagtgtattacttttatggggtatactaggcgcaattcaggctcagcagcaggaggttatcagtcctgatacaacagaacgcaataataactgcccagaaaaaacagactgcccaatacacgtgtatttcgtcctagacacttcagagtctgtgactatgcagtccccaacagacatcttactgttccatatgaagcagtttgtcccccaattcatcagtcaactccagaacgagttttacctcgatcaggtcgctttatcctggaggtacggtgggctccacttcagtgatcaagtcgaggtgttctcgcctcccggaagtgaccgcgcaagcttcattaagaatctgcaggggatcagtagttttagacggggaacttttaccgattgcgcgctggcaaatatgactgagcaaatccgccaggaccgaagcaagggcactgtgcactttgctgtcgtgatcacagatgggcacgtcaccggctcaccttgtggtggaatcaagctgcaagcagaaagggcaagagaggagggaatccggctatttgccgtagctccaaaccagaatctgaaagagcagggtctgcgtgacatcgcatctactccacacgagctgtatagaaacgactatgctacgatgctgcccgattcaacagagatcgatcaggacaccattaaccggattatcaaagtcatgaagcatgaagcatacggcgaatgttacaaagtgtcctgtcttgaaatacccggaccatctgggccaaaaggctatagaggccagaagggagctaaaggtaacatgggagaaccaggagaacctggccagaagggtagacagggagatcctgggatagagggccctatcgggttccccggtccaaagggagttcctggattcaaaggagaaaaaggcgagttcggggctgatggcagaaagggagctccgggactggccggaaagaacggcaccgacggccaaaaaggaaaacttggacggatcgggccacctggctgcaagggcgaccctggcaatcggggtccagatggttacccaggcgaagccggatcacctggtgagagaggtgaccagggagggaagggcgaccctggcagacccggacgaagagggcctccaggcgaaatcggagctaaggggtctaaagggtaccaggggaactccggggcaccaggctcacccggagtcaaaggtgccaaggggggtcccggtccacggggacccaaaggcgaacccggacgtaggggggaccctggtactaaggggagcccaggaagcgacgggccaaaaggggagaaaggggatcctggtcccgagggccctcggggtctggccggtgaagtggggaataagggtgccaagggcgacagaggcttgccaggacctcggggtccgcagggagctctaggggagccgggaaaacaaggaagtcggggagatccaggggatgcagggcctcgcggagattccggacagcctgggcctaaaggagaccctgggaggcctgggttctcctacccagggccacgtggtgccccaggggagaagggggagccaggtcccaggggccctgaagggggtcgaggagatttcggactcaagggggagccgggtagaaagggggaaaagggggagcccgctgacccgggtccacctggagagccaggccctagaggcccaaggggggttcccggtccagaaggggaacctggcccacccggtgatcctgggctgaccgagtgcgacgtgatgacatatgtccgagagacttgcggttgctgcgattgcgagaaacggtgcggcgctctggatgtcgtgttcgttatagattcctccgaatctatcggttatacaaacttcaccctcgagaagaatttcgtgatcaacgtcgtcaaccggcttggagctattgcgaaagatcccaagagtgaaactggaactagagtgggagtggtccagtattctcatgaaggaacattcgaagcgattcagctggacgacgaacgaatcgactccctgtcttcatttaaagaggcagtcaagaacctggagtggatcgccggaggcacgtggacgcctagtgcattgaaatttgcctacgatcgactgatcaaggagagccgtaggcaaaagacaagagtgttcgccgttgtgattaccgacggcagacatgacccaagggacgatgacctcaatctgcgcgcattgtgtgatcgagacgtcacagttacagctattggaatcggagatatgtttcacgagaaacacgaatccgaaaacctgtacagcatcgcatgcgacaagcctcagcaagtaagaaacatgacgttattctcagatctcgtagcagagaaatttattgacgatatggaagacgtgttgtgtcctgacccgcaaatcgtttgtccagatcttccctgccagaccggcctggatggagccgtcttgtgttag

SEQ ID NO: 218875 - DNA, 543 bp, synthetic construct
  misc_feature 1..543: note = Description of Artificial Sequence: Synthetic coding sequence
  source 1..543: mol_type = other DNA
atgctgcagggaacttgctctgtgcttctcctctggggtatcctcggagccatccaggcgcaacaacaagaagtcattagcccggacacaaccgagcggaacaataattgtccagagaaaactgattgtccaatccatgtctactttgttctggatacttccgagtctgtcacgatgcaatcgcctacagatatcctccttttccacatgaaacaatttgtaccacaattcattagccagctgcagaatgaattttatttagatcaggtggccctctcctggcgatatggagggttgcatttcagtgatcaagtggaggttttttctccacccggttcagatcgggcatctttcattaaaaatctccaaggtatctcatccttccggcgtggcacgtttacagactgcgctctggcaaatatgactgagcagatccgtcaggaccgatcaaagggcactgtgcatttcgcggtggtgattacggatggtcatgtaactgggagcccatgtggaggtatcaaactccaagccgaacgcgcttag

SEQ ID NO: 218876 - DNA, 2235 bp, synthetic construct
  misc_feature 1..2235: note = Description of Artificial Sequence: Synthetic coding sequence
  source 1..2235: mol_type = other DNA
atggcggtccttccaggtcccttgcaactgcttggcgtgctgttaaccatctcactcagcagtattcgcttgatccaggccggagcttattatggaataaaacccctaccaccgcagatccccccacagatgcctccacagatcccccagtaccagccattggggcagcaggttccacatatgcccttggctaaagacggactggccatgggaaaggaaatgccccacttacagtatggcaaggagtacccgcacctgccccagtacatgaaggaaattcaaccagctcccagaatgggaaaagaggccgttcctaagaaggggaaggagatacccctggcttctctcagaggcgagcagggaccgaggggagagcccggacctagagggcctcctggacccccaggtctccctggccatgggatccctggtattaaaggcaagccaggcccacagggttaccctggagtggggaaacctggcatgcccggaatgcccggaaagcctggagcgatgggcatgcctggagccaagggcgaaatcggccaaaagggagagataggaccaatgggtatccctggcccacagggtcccccaggaccgcacggtctaccaggtatcggcaagcccggtgggccaggcctgccgggacagcccggaccgaagggcgatagagggcctaaggggttgcccggaccacaaggcttaaggggcccaaaaggcgacaaaggatttggcatgccaggcgcaccgggagtcaaaggccctccaggtatgcacggccctcccggacctgtggggctcccaggtgtggggaagcctggggtgacaggctttccaggccctcagggccctttaggaaagcccggagccccaggcgaacccggtccacagggtccaatcggcgtgccaggcgttcaaggaccgcctggcatacctgggataggaaaaccagggcaggacggcattcctggccagccagggtttccgggagggaagggggaacaaggcctgcccggtctcccgggaccgcctgggttgccaggcatcggcaaacctggattcccaggccctaaaggcgaccgcggaatggggggtgtccctggtgcgttggggcctagaggcgagaaaggccctattggcgcacctggaatcggtggcccacccggtgagcccggtctaccaggcatcccaggcccaatgggaccccctggtgctatcggattccccggtcctaagggggaggggggaatcgtgggccctcaggggccaccgggtcccaagggcgagcctggtcttcagggctttccagggaagccaggtttcctgggggaggtgggcccacccggaatgcgtggactgccgggacctatcggccctaaaggggaggctggccagaaaggagtgccaggcctgcctggcgttccgggtttgctaggcccaaagggcgagccaggcatcccaggcgaccaggggctacaagggcctcccggaatccccggaatcgggggaccatctggcccaattggccctccaggaattcccggaccaaagggagaaccagggctccccggaccaccgggattccctggcattggcaaacctggagtcgcgggactgcatggaccgcctggtaagccaggtgcgctgggccctcaggggcagccaggcctgcctggccctccgggtcctcccggaccgcctggcccaccggcagtgatgccaccaacaccaccccctcagggggaatatttgccagatatgggcctcggcattgacggagttaagcctccccacgcatacggtgcaaagaaaggcaaaaatggcggtcctgcctacgagatgccagcatttacggcagaactcactgctccgttccctccagtcggcgctcccgtgaaatttaataaactgctgtacaatggacggcagaactataatcctcagaccgggattttcacttgtgaagttccaggtgtatattatttcgcttaccatgtgcactgcaagggagggaatgtgtgggtcgccctctttaagaacaacgagccggtgatgtatacatacgatgaatacaagaagggctttctcgaccaggccagtgggtccgctgtcctgctcctgcggccaggagatagggtgttcctgcaaatgccatcagaacaggctgcgggattatatgctgggcagtacgtccactcgagtttctccggataccttctctacccaatgtag

SEQ ID NO: 218877 - DNA, 2235 bp, synthetic construct
  misc_feature 1..2235: note = Description of Artificial Sequence: Synthetic coding sequence
  source 1..2235: mol_type = other DNA
atggccgtgttgccagggcctctccaactgctaggggtcctgcttacaatttctctgagctctatcagacttattcaggccggagcttattatggcattaagccattgccgccacagatcccgcctcagatgcccccacagattccccagtatcagcctctggggcagcaagtgccacacatgcccttggctaaggacggtctggccatgggaaaggagatgccgcatcttcagtatggcaaagaatatcctcatctcccccagtatatgaaagagatccagccagcccctagaatggggaaagaagcggtgcccaaaaagggaaaagaaatccctttggcatcactgcgcggtgaacagggtcctcggggtgaaccaggcccaagaggtccccctgggccaccagggcttcctggtcatgggatccccggaataaaaggtaaacctggccctcagggatatcccggtgtagggaagcctggaatgcccggtatgccagggaaaccaggggcaatgggaatgcctggagccaaaggcgaaattggccagaagggggagattggcccaatgggcatccccggaccccagggtcctcctgggcctcacggcctgccgggaatcgggaaacctggaggtcccggacttcctgggcaacctggccctaaaggagatagaggtccgaagggactaccagggccacaaggcttgcgaggtccaaagggggacaaagggtttgggatgccgggagcccctggcgtcaagggccctcctggtatgcacggacccccagggcctgtggggctccccggagttggtaaacccggagtcacgggctttcctggacctcaagggcctttgggcaaaccaggggcacctggcgaacctggccctcagggaccaataggcgtgcctggggttcaaggacctcccggaatccctggcatcggaaaacctgggcaggacgggattcctggccagccgggtttccctggaggaaagggggaacagggattaccaggactgcccggacctccgggactcccgggaatcggaaaaccaggttttcccggacccaagggtgacagaggaatgggaggcgtgccgggagcactgggcccacgaggagagaaggggccaatcggggcaccgggaatcggaggcccacctggcgagccgggacttcccggtatcccgggacccatggggcctcctggcgcaatcggatttcccggaccaaaaggcgagggagggattgtgggtccccaagggcctcccggtcccaagggagagccaggcttacaaggcttccccggtaagcccggattcttgggcgaggtaggcccacctggaatgagaggtcttcccggtcctattggacctaaaggggaggccggtcagaaaggtgtgcctggattacctggagtgcctggactcttagggccaaaaggggagcccggaatcccgggtgaccagggccttcagggcccacctgggatccctggaatcggcggtccgagtggcccaataggcccacccggaatccctgggccaaaaggtgaaccgggtctgccaggccctcctggatttccaggcatcggcaagccgggagtggctggcctccatggaccccctggcaagcccggtgccctcggcccacagggacagcccggactcccagggcctcctggaccaccgggacccccaggccctcctgccgtcatgcctcccacccccccacctcagggcgaatacctgccagatatggggttggggatagacggcgtgaagccacctcatgcttacggggctaaaaagggaaagaacggagggccagcgtatgagatgccagccttcaccgctgaattgaccgccccattccctccagttggagccccagtgaagtttaacaaactcttgtacaatgggagacagaactataacccccagacaggtatcttcacttgcgaggtgcctggagtttattatttcgcttaccatgtacattgtaagggaggaaacgtgtgggtcgctctgttcaaaaataacgaacctgtgatgtatacttacgacgaatacaagaaggggttcctcgaccaagcatcgggcagtgccgtgctgctgttacggcctggcgaccgggtattcctgcaaatgccctccgaacaagcagccggactctatgccggacagtatgttcactcgtccttttctggatatctcttgtaccccatgtag

SEQ ID NO: 218878 - DNA, 345 bp, synthetic construct
  misc_feature 1..345: note = Description of Artificial Sequence: Synthetic coding sequence
  source 1..345: mol_type = other DNA
atggccgtgctgccagggccactccagctgctcggcgttctcctaacaatctccctgagtagcatcagacttattcaggctggagcctactacggtattaagcccctaccaccccagatccccccacagatgcctccccaaatcccccagtaccaacctctggggcagcaggtcccccatatgcctctggctaaagatgggttggccatgggtaaggaaatgccccaccttcagtatggaaaggaatatccacacctgccccaatacatgaaggagattcagccagcccctagaatggggaaagaggccgtacctaagaagggcaaggagataccactcgcctag

SEQ ID NO: 218879 - DNA, 2061 bp, synthetic construct
  misc_feature 1..2061: note = Description of Artificial Sequence: Synthetic coding sequence
  source 1..2061: mol_type = other DNA
atggtggcagaacgcacgcacaaagccgctgctaccggggcacgtggcccaggagagttgggagctcccggtaccgtggctttagtagctgccagggctgaaaggggagccagattgcctagccctggtagttgcggccttctgaccctcgcgttgtgctctttggctctgtcccttctggcccattttaggacagctgaactgcaagctagggttcttcggctggaagctgaaagaggtgaacaacagatggagaccgcaattttaggtcgggttaatcaactgttggacgagaaatggaaactccattctcggagacggagagaagcgcctaagacctcccccggatgtaactgcccccctggcccacccggtccgaccggccgtccaggactccccggtgacaagggtgccatcgggatgccaggacgagtgggcagcccaggcgatgctgggctatcaatcatcggccctcggggtcccccaggccagccaggtactcggggattcccagggtttcctgggcctattggcctcgacggtaaacccggacatcctggcccaaagggggatatgggtctcacggggcctcctggccagccagggccacaggggcagaagggcgaaaagggtcagtgcggtgaatacccacacaggctcttgcccctgctaaatagcgtcagactggctccaccaccagtaatcaagcgaagaactttccagggtgagcagtctcaggcctccatccaaggccctcccggtccccctggaccacctggaccttccgggcctctgggccatcctggcctccctggaccgatggggccaccagggctccctggacccccaggccctaaaggagacccaggaattcagggttaccacggcaggaaaggggagcggggaatgccaggtatgcctggtaagcacggagctaagggagctcctgggattgctgtggctggcatgaagggcgaacccggtattcctggcacaaaaggagagaagggggctgaaggctccccgggtctgcctgggcttttgggccaaaaaggggaaaaaggtgacgcaggcaacagcatcggcggtgggcgaggagaaccaggtccacccggtcttcccggacctccaggcccaaaaggcgaggctggcgtagacggacaggtgggtccacccggacagccaggcgataaaggtgagcggggagctgccggagagcaggggccagatgggccaaagggaagtaaaggagaacctgggaagggggagatggtggattacaacggcaacatcaacgaggctctgcaggaaatcaggacacttgccctgatgggaccgccaggcctccccggtcagatcggaccgcctggcgctcccggtatccctggccagaagggagaaatcgggcttcctggccctcctgggcatgacggagaaaaagggccacggggaaagccaggagatatgggcccacccggtccccagggtcccccagggaaggacgggccacctggcgttaaaggtgagaatggtcacccgggaagcccaggtgagaaaggtgagaaaggcgagacagggcaggcgggaagtccaggtgagaagggggaagctggtgaaaaaggcaatcccggtgccgaggtcccaggcctgcccggtcctgagggcccacctggtccaccaggtctacaaggtgttcctgggccaaaaggggaggcagggctcgatggcgcaaaaggggagaaaggattccagggcgaaaaaggggatagggggcctctagggctccctgggacccccggtcccatcggagttcctgggcctgctggcccaaagggggaacgcggttctaaaggtgacccaggcatgacaggccctacaggggcagcgggtttgcccggactgcacgggccacccggtgacaaagggaaccggggtgagagaggtaaaaagggatcccgcggaccaaagggggataagggtgatcagggggcaccaggcctggacgccccatgtcctttgggggaggatgggctccctgtccagggatgctggaacaaatag

SEQ ID NO: 218880 - DNA, 1338 bp, synthetic construct
  misc_feature 1..1338: note = Description of Artificial Sequence: Synthetic coding sequence
  source 1..1338: mol_type = other DNA
atgacaggcagctccttctctctggcgcatcttctaataatttctgggctgttgtgctactccgccggatgtctggctctaccctccctcgatcagaagaaacgcggaggccataaggcttgctgccttcttacccccccaccgccacctctgtttccccctcctttttttagaggcggtagaagccccttgctgtcacccgacatgaaaaacctgatgctggaactagagacttcacagagcccttgtatgcagggatccttaggatccccagggccacccggaccacagggacccccagggcttcccggtaagaccggcccaaaaggtgaaaaaggggagttgggtaggccgggtaggaagggcagaccaggaccaccaggggtccccggtatgccgggacctattggttggcctggccctgagggacccagaggcgaaaaaggcgacctcgggatgatggggttaccaggtagtcgaggcccaatgggaagcaagggctatccagggtcccgtggggagaagggatccagaggcgaaaagggagacctaggccctaaaggagagaaaggctttccaggctttccagggatgttaggacagaagggagagatgggccctaagggtgaaccagggatcgccggacataggggccctacaggcagacctggcaaaagaggtaagcagggccagaaaggagatagcggcgtcatgggcccacctggcaagcccggaccttctggacagccaggtcgaccaggccctccgggaccaccccctgcaggccaactgataatgggtcctaagggcgagcggggattccctgggccaccaggtcggtgcctatgtggacccaccatgaacgtgaataatccttcttatggggagtcagtttatggaccatcttcgccacgcgtgcccgttattttcgtcgttaataatcaggaagagctggaacgattgaatactcagaatgctatcgccttccggcgtgaccagcgctctctatacttcaaggactcactcgggtggcttccgatccagctgacccccttttacccagtggactataccgctgaccaacatggaacctgcggcgacgggctgttgcagccaggcgaggaatgcgacgacggcaatagcgacgttggagacgattgcatccgctgccaccgggcatattgcggagacgggcacaggcacgagggagtggaggactgcgacggtagtgacttcggatatcttacctgtgaaacatacctccccggtagctacggcgacttgcaatgcacccagtattgctatattgactcaacaccttgtaggtactttacctag

SEQ ID NO: 218881 - DNA, 876 bp, synthetic construct
  misc_feature 1..876: note = Description of Artificial Sequence: Synthetic coding sequence
  source 1..876: mol_type = other DNA
atggtggtgctgaaccccatgaccctgggcatatacctccagttgtttttcctttccatcgtctctcagcccacattcatcaattccgtgctcccaatttctgccgctcttccctccctggaccagaaaaagaggggaggacacaaggcatgctgtttgctcacaccaccgccaccgcctttgttccctcctccatttttcagagggggacggtcccctctgctgtcacctgacatgaaaaacctgatgctagaattggaaaccagccaaagcccgtgcatgcagggctccctcggtagtcccggacccccagggcctcaggggcctcccggactgcccggtaagacaggacccaaaggcgagaagggggagctgggtcgccctggtcgaaaagggaggcccggacctcctggcgtacctggaatgcctggacccataggatggccagggccagaaggacctaggggggagaaaggcgacctaggcatgatggggctgcccggtagcagaggcccaatgggcagtaagggttaccctgggtcgcgcggagaaaaggggagccgaggggagaaaggcgacctaggtccaaaaggagagaagggcttccctggcttccccggtatgctgggtcagaaaggagaaatgggacccaagggggaaccgggaattgctggccacagagggccaacgggtcgcccaggcaagaggggtaagcagagcagtagaactccctgcacactgcctcgccgacctcctgtgccatgcgggcaagggagtagaagcccggtgacagttgttgctggcaaggagtcccaggcttgccttctgccacgttttgaggaggactacataagctcagggactgaacgcggatag

SEQ ID NO: 218882 - DNA, 1266 bp, synthetic construct
  misc_feature 1..1266: note = Description of Artificial Sequence: Synthetic coding sequence
  source 1..1266: mol_type = other DNA
atggtcgtcctcaaccctatgacattgggaatatacctgcaattgttctttctgtcaatcgtgtctcagcctaccttcatcaacagtgtgctgcccatcagcgccgcactacccagccttgatcagaaaaagagaggtggacacaaggcgtgttgtttgcttacgcccccacctccacccctttttcctccaccttttttcagggggggaaggagtcccggaccccctggccttccaggtaagacggggcctaagggggagaaaggcgaattggggaggcccggacgtaagggtcggccaggaccacccggagtgccaggtatgccaggccctatcggttggcctggtcctgagggccctcgaggagagaagggtgacctggggatgatggggctccccggatctagaggcccaatgggttcaaagggttacccaggctcgagaggagaaaaaggcagccggggtgagaaaggcgacttaggtccaaaaggtgagaaaggttttccgggttttcccggaatgcttggacagaaaggcgaaatgggtccaaaaggggaacccggaatcgcagggcatcgcggaccaactgggagaccgggtaagcggggaaaacaggggcaaaagggtgattcgggtgtgatggggcctccgggtaagcccggtccctcgggccagcccggtaggcccggtccccctggccctccaccagctgggcagctgattatgggtccaaaaggcgagcggggattccccggaccccctgggaggtgcctctgcggcccaacaatgaacgtcaacaatccctcctatggcgagagcgtctacggtccatcatcacccagggtgcccgtgattttcgtcgttaataaccaagaggaactcgaaagactgaatacccagaatgctatagccttcagacgggaccaacgcagcctctacttcaaagatagtctgggatggctgcctatccaactgaccccattttatcctgtggattacactgccgatcagcacgggacctgcggcgacggcttgcttcagcccggagaagaatgcgatgatggaaattcagatgtgggggatgattgtattagatgtcatcgcgcatattgcggcgacgggcaccgacacgaaggggttgaggattgtgatggctcagacttcggttacctgacttgcgaaacctatctaccgggatcttatggagatctgcagtgcacacaatactgttacatcgactctaccccctgtcgttacttcacctag

SEQ ID NO: 218883 - DNA, 1341 bp, synthetic construct
  misc_feature 1..1341: note = Description of Artificial Sequence: Synthetic coding sequence
  source 1..1341: mol_type = other DNA
atggtggtgctgaatcccatgacactggggatttacctccaactgttctttctatcaatcgtcagccagcccactttcattaacagcgttctgccaattagcgcagcactgcccagcttggaccagaaaaaacggggaggtcacaaagcctgttgtctcctgaccccacccccacctccgctgttccctcctccctttttcagaggcggacggtctccactcctttcacccgacatgaagaacctgatgctcgaactcgaaactagccagagtccctgcatgcagggctccctgggtagcccaggcccaccagggccacaggggcctcccggactccccggtaaaactggccctaagggagagaagggccgtccaggacctccaggggttcctggcatgccagggccaatcggatggccaggcccagaaggccctcgaggcgagaagggagacctcgggatgatgggtctgcctgggagcaggggaccgatgggctctaaaggctatcctggaagcagaggggagaagggcagtagaggagagaagggggacctcgggcctaagggagaaaaaggattccccggattccccggtatgctgggtcagaaaggcgaaatgggccctaagggcgagcccggtatcgctggtcataggggcccaactggtaggcccggaaagaggggcaagcaggggcagaagggggatagcggtgtgatggggccaccaggaaagcccggtccgtctgggcagcctggtcggcctggccctcctggcccaccaccagccggacagctgatcatgggacccaagggggagagagggttcccgggaccccctggacggtgtttgtgtggcccaactatgaacgtgaataatccttcctatggcgaatctgtgtatggtcctagcagccccagggtccctgtcattttcgtggtgaacaatcaggaagagcttgaaagactcaacacacagaacgctattgcctttcgacgcgaccagcgtagcctgtattttaaggactccctgggctggctgccaatccagctaacacccttctacccggttgactacacggccgaccagcatggcacttgtggggatggtctgcttcagccgggtgaggagtgcgacgatggcaactccgacgttggcgacgattgcattagatgtcaccgggcttattgtggtgacgggcaccgccatgaaggtgtggaagattgtgatggttccgatttcggctatttgacctgtgagacctatcttcccggtagctacggtgatttacagtgtacccagtattgttatatcgacagcactccctgtaggtactttacatag

SEQ ID NO: 218884 - DNA, 1368 bp, synthetic construct
  misc_feature 1..1368: note = Description of Artificial Sequence: Synthetic coding sequence
  source 1..1368: mol_type = other DNA
atggtggtgcttaacccgatgacactcggaatctatcttcaacttttttttctgagcatcgtgtcccagcctaccttcatcaactctgtgcttccaatctccgctgcgctgcctagtctcgatcagaagaaaaggggaggacacaaagcatgctgtctgctcaccccaccacctcctcccctgttcccacccccatttttcaggggagggagatctccccttctgagtccagatatgaaaaatctgatgcttgagctggagactagccaatcaccttgcatgcagggctcactgggctcacccggtcctccgggaccacaaggacctccaggcctgcctgggaaaactggccctaagggcgagaagggcgagttaggcagacccggaaggaaaggcagaccaggccctcctggggtgccgggtatgcctggacccatagggtggcctggccctgagggcccaaggggcgagaaaggtgacctaggtatgatggggctgcctggaagtagaggtccgatgggaagcaagggctatccaggcagtaggggagagaaagggagccgtggcgagaagggggacctcgggcctaagggagagaaaggcttccccggtttccccggaatgctgggtcagaagggcgagatgggccctaaaggtgaaccaggaatcgcaggccaccgaggacccacaggaaggcctggtaaaaggggcaaacagggacagaagggtgattctggggtgatgggcccacctggaaagcctggcccttccggtcaaccagggcgtcccggacctcctggcccaccacccgcaggccaactcattatgggccctaaaggcgagcggggatttcctggaccacctgggagatgtctttgtggacctactatgaatgtgaataatccaagttatggggagtctgtctacgggccaagttcccccagggtaccagttatcttcgtcgtcaataaccaggaggaactggagcgccttaacacccagaatgccattgcctttagacgcgatcagagatcgctgtatttcaaggacagcctgggctggctccctatccaactcacaccattctatccagtcgattacacagcggatcagcatggaacatgtggggatggactcctgcagcctggggaagagtgcgacgatgggaattctgatgttggggacgattgcatcagatgtcatcgcgcatactgtggagacggccaccgtcatgaaggcgtggaagactgcgatgggtcggatttcggctatctgacatgtgaaacctatctgcctggctcctacggtgacctgcaatgtactcaatactgctatatagattctacaccatgccgttatttcacctag

SEQ ID NO: 218885 - DNA, 1338 bp, synthetic construct
  misc_feature 1..1338: note = Description of Artificial Sequence: Synthetic coding sequence
  source 1..1338: mol_type = other DNA
atgacaggctctagtttctctctcgcacacttactgattatcagcgggctactctgttatagcgccggatgcctcgcgttgcccagcctggaccagaaaaagcgcggaggacataaagcctgctgtctgctgactccacccccaccaccacttttccccccaccattcttccgcggtggacggtcccctctgttatcacccgacatgaaaaacttgatgctggagctcgaaacgagccagtcaccatgcatgcagggctccctcggaagccccggaccgcctgggcctcaggggcctccgggtttacctggcaaaacaggacctaagggggagaagggagagctagggcgtcccggaagaaagggccgacccggtcctccaggagtcccagggatgccgggacctatcgggtggcctggacccgagggaccacgaggggaaaagggggacttggggatgatgggactgccagggtcccgtgggccaatgggaagcaaaggctatcctggttcccgcggagaaaaagggagtagaggcgagaaaggagacctggggccaaagggggaaaagggctttccaggattcccgggaatgctgggtcaaaaaggagaaatgggtcccaagggggaacctgggattgccggacacagaggccctaccggacgtccgggaaagagagggaagcagggccagaaaggcgactctggggtcatgggccctccaggtaagcccggaccttcggggcagccagggcgacccggaccccctggtccaccgccagccggtcagctgatcatgggcccaaagggtgaaagagggtttccaggacctccgggtcgttgtctgtgtggccctacaatgaacgtaaacaacccttcctacggtgaatccgtgtatggaccttcaagtcctcgggtcccagtgatcttcgtggtgaacaaccaggaagaattggagaggctcaatacacaaaacgcaattgcctttaggcgcgaccagaggtccctgtacttcaaagattccctgggctggctgccaatccagctgactccattttatcccgtggattacaccgcggatcagcatggaacctgcggcgacggcctgctgcaacccggtgaagagtgcgacgatgggaattcagatgtcggagatgactgtatccgatgccacagggcctactgcggcgacgggcaccgacacgagggtgtagaggattgcgatgggagcgattttggatatctcacctgtgaaacttatttgccgggtagctatggggacctgcagtgtacacagtactgctacattgactctacaccatgccgatactttacctag

SEQ ID NO: 218886 - DNA, 585 bp, synthetic construct
  misc_feature 1..585: note = Description of Artificial Sequence: Synthetic coding sequence
  source 1..585: mol_type = other DNA
attagtggacttctgtgttattccgcgggttgcctcgctcttccatctctcgaccagaagaagagggggggacataaagcttgctgccttttaaccccacccccacccccattgtttcctcctccatttttccgtggtggacgatcaccaggccctcctgggctgcccggtaagaccgggccaaaaggggaaaagggggagctgggacgcccagggcgaaagggccgacccggacctcccggagtgcccggtatgccaggccctattgggtggcccggacccgaggggccacggggagagaagggcgatctaggaatgatggggttaccgggtagccggggacctatgggtagcaaaggataccctggatcaagaggggagaagggttctagaggcgagaaaggggacttgggcccaaaaggcgagaagggctttcctggcttccctggtatgctggggcagaaaggcgagatgggcccaaagggcgagccagggattgccggtcaccggggaccgacaggacgcccagggaagaggggcaagcagggccagaaaggtgacagtggggtgatgggacccccatag

SEQ ID NO: 218887 - DNA, 1338 bp, synthetic construct
  misc_feature 1..1338: note = Description of Artificial Sequence: Synthetic coding sequence
  source 1..1338: mol_type = other DNA
atgacagggtctagttttagtctcgcacatctgcttataataagcggattgttgtgttatagtgcgggttgcctggccctgccgtcgctggatcaaaagaaacggggaggccacaaagcttgctgtttgttaacacctccaccaccccctctgttccctcccccattcttcagaggcggacgatctcccctgctgagcccagatatgaaaaacctgatgcttgaactggagacatcacagtcaccctgcatgcaaggatctctgggaagccccggaccccctgggcctcaaggtcccccaggactgcctggaaaaacgggcccaaaaggggaaaagggcgaactgggcaggcctggcagaaaggggagacccggaccaccgggtgtgccgggaatgccgggacccatcggatggcccggacctgaaggccctaggggagagaaaggagacctgggaatgatggggctgcctgggtcaagggggcctatgggttctaagggctatccaggctccaggggggaaaaggggagcaggggggaaaagggagatcttggacccaaaggagaaaaatgcaatcctctgctcctattgttcccctcattccagggagagatgggccctaaaggcgaacccggaatcgctggtcatcgaggtcccacaggcagacctggaaaaagaggaaagcaggggcagaagggagactctggagtgatgggtccacccggtaagcctgggccttctgggcagccaggaaggccaggacctcccggtcccccacccgcaggacagctcatcatgggccctaagggcgagagaggatttcccggaccacctggaaggtgtctgtgtggtccaaccatgaacgtaaataacccctcttacggagagtcagtatatggaccctcctcccccagagtgcctgtgattttcgttgtaaataaccaggaagagctcgagaggctaaatacgcagaacgcgatcgccttccgacgagaccagaggagtctctattttaaagattccctgggctggctccccattcaactgacgccattttaccctgttgactacaccgccgatcaacacggcacatgcggggatggtctgctgcaaccaggcgaggagtgtgatgatggtaatagcgacgtgggggatgactgtatacgatgccatagagcctactgcggagatggccaccggcatgagggggttgaggactgcgatggctcagatttcgggtatctaacctgtgaaacctacttgcctgggtcttacggcgatctgcagtgtacgcagtactgttacatcgattccactccctgcaggtatttcacatag

SEQ ID NO: 218888 - DNA, 2061 bp, synthetic construct
  misc_feature 1..2061: note = Description of Artificial Sequence: Synthetic coding sequence
  source 1..2061: mol_type = other DNA
atggctgaccgcaggagggcatggaacacggaggatgatctgcccgtatatctagctaggccaggttcggcagcccagactcccaggcagaagtatggtggaatgtttgccgcagtagagggggcatatgaaaataaaactatcgattttgatgcttacagcgtggggagaaggggctccgcacgcacacccagatcggcgggacgccctgacgccgttgggctgccaggcccagggggaagcgaggatactgccagtgacgtatcagaaccttcagggagtgccgtgtcctcccccggagaacgtgatgaacggcctcctacactcagaatcagacgccctgccccacgggacctgcctctggggagagacaatggtcaatccgatagactcctgattaaagggggtaggataataaacgatgatcagagcctctatgcagacgtctatctcgaagacggactgataaagcaaatcggcgagaatctgatcgtgcccggaggagtcaagacgatcgaagctaatggtcggatggtgatacccggaggaattgatgttaatacatacctgcaaaaaccttcccagggcatgacggccgctgatgattttttccagggaacccgagcagccctggtgggaggtactaccatgattattgaccacgtggtccctgagcctggctcttccctccttacgtcctttgagaagtggcacgaagctgcagacactaagtcctgttgcgactactctttgcacgttgatatcacgagctggtatgacggagtcagagaagagttggaagtgttggtgcaggataaaggggtgaattccttccaagtctacatggcatacaaggacgtgtatcagatgtccgacagtcagctttacgaggccttcacattcctcaaggggctgggagccgtaatcctcgtgcatgccgagaatggcgatttgatcgcccaggaacagaagcgcatccttgaaatgggaattacaggcccagaagggcacgccctgtcacgccctgaagagctggaggcagaagctgtgtttcgtgcgatcactattgcaggcagaattaactgccccgtgtacattacgaaagtgatgagcaaatctgccgctgacattattgctctcgcaagaaagaaagggccactcgtgtttggcgagcctattgcggctagcctcggaacggatggtacccattactggtccaagaattgggccaaggccgctgcatttgtaacatctcccccactgtcaccagaccctacaacaccggattacctaactagcctcctggcctgcggggacctccaggtcaccggcagcggccattgtccatattcaactgcccagaaggccgttggaaaagataacttcacactgataccagagggagtaaacggcatcgaggagagaatgacagtggtgtgggacaaagccgtggccaccggaaaaatggacgagaaccaattcgtcgcagtaaccagtactaacgccgcaaagatcttcaacctttatccgagaaagggtcgcatcgcagtcggaagcgacgccgacgtggtgatatgggatcccgacaagctgaagaccataaccgctaaatcccataagagcgcggtcgagtataatattttcgaagggatggagtgccacggaagccccctcgttgtgatcagccaaggtaagattgtctttgaagacggcaacattaatgtcaataagggaatgggtcggttcatcccgcgaaaggcgtttccagaacacctctaccagcgagtcaagatccgaaacaaggttttcggtctccaaggcgtgtcccgcggtatgtatgatggcccagtgtacgaggtacccgctactcccaaatatgctacaccagccccatctgcgaaatccagcccgtctaagcatcagccacccccaatccggaacttacaccagagtaacttctctctttccggggctcagatcgacgacaacaatccaagacggaccggtcacagaatcgtcgctccccctggcggtcgttccaacattacctctcttggatag

SEQ ID NO: 218889 - DNA, 1719 bp, synthetic construct
  misc_feature 1..1719: note = Description of Artificial Sequence: Synthetic coding sequence
  source 1..1719: mol_type = other DNA
atgtcatatcaaggtaagaaatctatccctcacattacgagtgacaggctgctaattaagggcggacggatcattaatgacgatcagtctctgtacgccgacgtttatttggaggacggactgattaagcaaattggcgagaatttgatagtacctggaggcgtgaaaactatagaagccaatgggagaatggttattcctggcggaattgatgtcaatacctacctccagaagccctcacagggaatgacagctgctgacgatttctttcagggaacccgagcagcactcgttggtgggacaacaatgatcattgaccatgtggtgccagagccaggctcgtccctgctgacctccttcgagaaatggcacgaggctgcagatactaagtcttgctgtgattacagcctgcacgtggacataacatcctggtatgacggtgtaagggaggaactggaggtattagtgcaggacaagggtgtcaacagttttcaggtgtatatggcttataaagacgtctaccagatgagtgatagccagttgtatgaagcttttaccttcctaaaggggctgggtgcagttatccttgtgcatgctgaaaatggggacttaatcgctcaggaacagaagcgcattctagaaatggggatcacgggaccagaagggcacgcgctatcccgaccagaggagctagaagcggaggccgttttccgggcaataaccatcgcaggtagaatcaattgcccagtttacataaccaaggtcatgagtaagagcgcggctgacattatcgcgctggcaagaaaaaagggccctctggtgtttggtgagcctattgccgcaagcctgggcactgacggcacccattattggtcgaagaactgggctaaggctgctgcctttgttacctccccacctctgtccccagatccaactacgccagactacctaacctcattgctcgcatgcggagatctgcaggtcacaggctcaggccattgcccttattccaccgctcagaaagctgtaggtaaggacaacttcactctgattcctgaaggcgtcaacggcattgaagaacgaatgacagtggtgtgggataaagccgtggctaccgggaaaatggatgaaaatcagtttgtagcagtgacaagtacaaatgcagctaaaatttttaatctgtatcctcgaaagggtagaattgcagtcgggtccgatgcggacgtggtgatttgggaccccgataagctgaagaccattaccgcaaagtctcacaaaagcgccgtcgagtacaacatcttcgaaggcatggaatgccacggatctcccctggtggttatctctcaaggcaaaattgtttttgaagacgggaatatcaatgtaaacaagggcatgggccgattcatccctcgcaaggctttcccagaacatctgtaccagcgggtgaagataagaaacaaagtgtttggcctccagggcgtctcacggggtatgtacgacggcccagtttacgaagtccctgcgacgccaaaatacgccaccccagccccttccgccaagtctagcccaagcaagcaccagcccccacccattaggaatctgcaccaaagcaactttagtctgtcaggggcacagattgacgacaataacccacgacgaaccggccacagaatagtggctccacccggaggtcgaagtaatatcacatctctcggctag

SEQ ID NO: 218890 - DNA, 1713 bp, synthetic construct
  misc_feature 1..1713: note = Description of Artificial Sequence: Synthetic coding sequence
  source 1..1713: mol_type = other DNA
atgcagaagatgaacaatgaagtggtagacaagtccgatcggctgttgataaaaggaggccgaattattaacgacgatcaatcactgtacgctgatgtttacttggaggatggtctgatcaagcagattggggagaatttgatcgttccaggaggtgttaagaccatcgaggccaacggccgaatggttatcccaggaggcatagacgttaacacttacctgcagaaacccagtcaaggcatgacggcagcagacgacttcttccagggcacccgtgccgcactcgtgggtgggactacaatgatcatcgatcacgtcgtgcccgagccaggcagctcattgcttacctcattcgaaaagtggcacgaagcagccgataccaagtcatgctgtgattattccctgcacgttgacatcacctcttggtacgacggcgttcgcgaagagctggaagtactcgtgcaggataaaggcgtgaactccttccaggtatacatggcctacaaagacgtatatcaaatgtcagacagtcagctgtacgaggcgtttacgttcttgaaaggccttggtgccgttattctcgttcatgccgagaacggtgacttgatagcacaggagcagaagcgcattctcgaaatggggatcaccggcccagaaggtcatgccttaagtaggccagaggaactcgaggctgaggccgtcttccgcgctatcactatcgcaggcagaatcaattgccctgtgtacatcactaaagtgatgagcaaaagcgcagctgatatcattgctttggctagaaagaaggggcctcttgttttcggagaaccaattgcggctagtctgggtaccgacggaacccattattggtccaaaaactgggccaaggctgctgccttcgtgactagcccccctttatcacccgatcccacaaccccagattatcttacctccctcctggcctgtggcgatctccaagtgacaggcagcggccattgtccatacagcaccgctcagaaagctgttggaaaggacaattttacattgatacccgagggcgtgaatggtatagaggaaagaatgaccgtcgtttgggacaaggctgtagcaacggggaagatggacgagaaccagttcgttgccgtaacaagcaccaacgcagcaaagattttcaacttgtacccaaggaaaggcagaatcgccgttggcagcgacgcagatgtcgtgatctgggacccagacaagttgaagaccatcacagcaaagtcacataaatctgctgtcgagtacaacatcttcgagggaatggaatgtcacggttccccactggtggtgatatcacaaggcaaaatagtctttgaggacggcaacattaacgtcaacaagggtatggggcgattcatcccacggaaagcctttcctgagcacttgtaccagagagtcaaaataagaaataaagtgtttggtctgcagggcgtgtcacgcggtatgtatgacggacctgtgtacgaggtgcccgcaacacctaagtatgccacccctgcacccagcgccaaatccagccctagtaaacaccagcccccacccatcaggaatctgcaccagtcgaatttcagcctgtctggagcccaaatcgacgataacaaccccaggcggacaggacatagaatcgtcgcacctccaggcggaaggtcaaacataacatcactgggctag

SEQ ID NO: 218891 - DNA, 1719 bp, synthetic construct
  misc_feature 1..1719: note = Description of Artificial Sequence: Synthetic coding sequence
  source 1..1719: mol_type = other DNA
atgtcttaccaggggaagaagtctatccctcacattacttcagaccgcttgctgataaaaggaggacgtataataaatgacgaccagagtttgtacgccgacgtgtaccttgaggatggcctgatcaaacagattggagaaaaccttattgtgcctggtggggtgaagaccatcgaggcgaacggacgaatggttatccccggaggtatcgatgtcaacacatacctccaaaagcctagtcagggtatgaccgcagctgatgacttttttcaggggactcgcgctgccttagtcggcggaaccactatgattatcgaccacgtggtgccagaaccgggatcctcattgctcacatcctttgaaaaatggcatgaggccgcagataccaaatcatgttgtgactactctttacacgttgacattacgtcttggtacgatggtgtcagggaagagcttgaggtattggtccaggacaaaggagtgaattcttttcaggtgtacatggcctataaagatgtgtaccagatgagcgactctcaactctatgaggcctttacatttctaaagggtcttggtgccgtcatcctggttcacgccgagaacggggacctgatcgcgcaggagcaaaaaagaattctggagatgggaattactggccctgagggtcacgctctgtccaggccagaagagctggaggctgaggccgtcttcagagccatcaccatcgcaggtcgaatcaactgtccagtgtacattacaaaggtgatgagcaagagcgccgcagatataatagctttggccaggaagaaaggtccgctggtgttcggcgaaccaatcgctgcgagtctaggtaccgatggcacccactattggtctaagaattgggccaaggccgctgcattcgtgacatcacccccactctctcctgatcccacaacccctgattaccttaccagcctcctggcatgcggagatctccaagttaccggatccggccactgcccttactccaccgcccagaaggctgtgggaaaggataacttcacactgatccccgaaggtgtgaacggcattgaagagcggatgactgtcgtgtgggacaaggccgtggccacaggcaagatggatgagaaccagttcgtcgccgttacttccactaatgccgctaagatttttaatctctacccaaggaaaggtcgcattgccgtcgggtctgatgcagatgtagttatttgggatcccgacaaactgaaaactatcacggcaaaaagtcacaaatcggcagttgaatacaacattttcgaaggaatggagtgccacgggagccctttggtcgtcatcagtcaggggaagattgtgtttgaggatgggaatatcaatgtgaataaagggatgggacgatttatccccaggaaggccttcccagaacatctgtatcagagggtaaagatcagaaacaaggtattcggccttcagggtgtgtccagaggtatgtacgacggacccgtatacgaggtgcctgctacacctaaatacgcgacacccgctccatcagctaaatctagccctagcaaacaccagcccccaccaatcaggaatcttcaccagtcgaacttttccctgtctggggcacagatcgacgataataacccccgacgaaccgggcatcgcatagtagcgccaccaggtggcaggagtaatatcacctcactcggctag

SEQ ID NO: 218892 - DNA, 834 bp, synthetic construct
  misc_feature 1..834: note = Description of Artificial Sequence: Synthetic coding sequence
  source 1..834: mol_type = other DNA
atgaatggattcgccagtctgctcagaagaaaccagttcatcctgttagtgctcttcctcctgcaaattcagagccttgggctggacatcgattctcgccctaccgccgaggtgtgtgctacacatacgataagccctggccctaaaggagatgatggggaaaagggcgaccccggagaggaagggaaacatggcaaggtgggtcggatgggcccaaagggaataaagggggaactcggcgacatgggagatcagggaaacattggaaagacgggtccaattgggaaaaaaggcgacaagggagaaaaaggcctgctcggcattccgggagaaaagggcaaagctggcacagtgtgtgactgcggcagataccgaaagtttgtgggccagttggatatatcaattgcacggctgaagacttcaatgaaattcgtcaaaaacgtgatcgctggaatccgtgagaccgaggagaaattttactacattgtgcaggaggagaaaaactaccgggagtccctcacccactgtcgtattcggggtggtatgttagctatgcccaaagacgaggcggctaataccctgatcgctgactacgtcgccaagagcggctttttccgggtcttcattggcgtgaacgaccttgagcgcgagggccagtacatgttcaccgataacacgccattacagaattactcaaactggaatgagggagagccatcagacccctacggtcatgaggactgcgtggagatgcttagctctggcagatggaacgataccgaatgtcatttaacaatgtactttgtctgcgaattcattaaaaagaaaaagtag

SEQ ID NO: 218893 - DNA, 807 bp, synthetic construct
  misc_feature 1..807: note = Description of Artificial Sequence: Synthetic coding sequence
  source 1..807: mol_type = other DNA
atgactcctgccttgtgcagaagctcctctctcgccagtaaagggatgagagagcgcagagagacaaaggcgccaccagatggtctggaagaaagtgcaccccgtgaaaaaaaacagtctcagcctgtggtaacagctagcgacattagtaagaggaagtgcaccagctccttcgttgagatgggatcacaaggagacatgggagataaaggtcagaagggttcagtggggaggcatggtaagattggtccaatcggaagtaagggggagaaaggtgattccggcgacatcggaccgccaggccctaacggggaacctggcctcccttgtgagtgctcgcagctgcggaaggccattggggagatggataatcaggtatctcagctcacaagcgaactgaagttcatcaaaaacgccgtggctggggttcgtgaaactgaaagcaagatttatttgctggttaaagaggaaaagaggtacgcggatgctcagttatcttgtcagggtcgtggcggaacgctgtccatgccgaaagatgaagctgcaaacggcctgatggcagcctatctggctcaggccggtctggcaagagtctttatcggtatcaatgatctggagaaggaaggcgctttcgtgtatagtgatcactctcctatgaggactttcaacaaatggcggtccggcgagcctaataacgcatacgatgaagaggactgcgtggaaatggtcgcctcaggaggctggaacgatgtggcgtgtcacaccactatgtactttatgtgtgagtttgataaggaaaatatgtag

SEQ ID NO: 218894 - DNA, 816 bp, synthetic construct
  misc_feature 1..816: note = Description of Artificial Sequence: Synthetic coding sequence
  source 1..816: mol_type = other DNA
atgaggggcaatctggcactggtcggagtcctgatctcattagcctttctgagtttattaccctctggccatccacagcccgctggagatgacgcgtgctcggttcagatcctggtaccaggcctaaagggcgatgctggcgagaaaggagataagggggcaccgggaagaccaggacgtgtcggacccaccggagagaaaggggacatgggagacaagggtcagaagggcagtgtcggaagacacggcaagatcggcccaataggctcgaagggggaaaagggagacagcggcgacatcggtccaccgggaccaaacggcgagcctgggctgccatgtgagtgctcacagttgcgtaaggctattggggaaatggataatcaggtgagccagctcaccagcgagctcaagtttattaagaacgcagttgctggcgtgcgcgagacagagtccaagatttatctactcgtcaaagaagagaagcgctatgcagatgcacagttgtcctgtcaagggcgaggcggaactctgtcgatgccgaaggatgaagcggctaacggactaatggcagcatatctggcacaggcgggactggccagagtttttatcggcatcaatgacctcgaaaaagaaggtgccttcgtctattcagaccacagcccaatgaggaccttcaacaagtggaggagcggggagcctaacaacgcatacgatgaggaggattgtgttgagatggtggcatctgggggttggaacgacgttgcttgccacaccacaatgtactttatgtgcgaatttgataaggagaacatgtag

SEQ ID NO: 218895 - DNA, 744 bp, synthetic construct
  misc_feature 1..744: note = Description of Artificial Sequence: Synthetic coding sequence
  source 1..744: mol_type = other DNA
atgcgaggaaacctggccctcgtaggtgtcctgatttccctggcttttctctctttgctaccttccggacacccccaacccgctggggacgatgcgtgttcagtgcagattttagtgcccggacttaagggagatgccggtgagaaaggggacaaaggcgcacccggacgaccgggacgcgttggaccgacgggtgaaaaaggggagaagggtgattctggggatataggaccaccaggtcctaatggggaacccggactaccttgcgaatgtagccaacttcggaaagcaatcggcgaaatggataatcaggtgtctcagcttacatccgagctcaaattcattaaaaacgctgtcgccggagtacgcgagacagagagcaaaatctacctcctcgtgaaggaggagaagcggtatgccgacgcacagcttagctgtcagggaaggggaggcacgctctccatgccgaaggacgaggccgctaacggacttatggcagcttacctagcccaggcgggactggccagagttttcataggaatcaacgatttggaaaaggaaggggcatttgtgtacagtgatcatagcccaatgcgcacttttaacaagtggcgatccggtgagccaaacaacgcctacgacgaagaggattgcgtggaaatggtagccagcggcggatggaatgatgtggcttgccatacaaccatgtactttatgtgcgaattcgacaaggagaacatgtag

SEQ ID NO: 218896 - DNA, 858 bp, synthetic construct
  misc_feature 1..858: note = Description of Artificial Sequence: Synthetic coding sequence
  source 1..858: mol_type = other DNA
atgaaaaaacagaggggtgttggcgtccttcccgctcttcgcatgaggggcaatctcgccctggtgggtgtgcttattagcctcgctttcctgtcccttcttccgtccgggcatccccaaccagccggagatgacgcctgctccgtgcagattttggtcccaggcctcaaaggagacgcaggagagaaaggggataaaggtgccccaggacgcccaggtagagtgggaccgaccggggagaaaggagacatgggcgacaaaggacaaaaggggagcgtgggtcgtcacggcaaaattggccctatcgggagcaagggcgagaagggtgacagtggggacatcgggcctccagggcctaatggtgaacccggactgccttgcgagtgcagccagctgcggaaagctatcggagagatggataatcaggttagccagctgacatcagagctgaagttcataaagaacgcagttgccggtgtgcgggaaaccgaaagtaaaatatacctgttggtgaaagaggagaagcgctacgcagacgcccagctctcttgccagggcagaggcggtactctgtctatgcctaaagacgaggccgcaaacgggctaatggctgcgtacctggcacaggcgggtcttgctagggtgttcattggaatcaacgatttggagaaggaaggcgcatttgtatattctgatcatagtcccatgagaaccttcaacaagtggagatccggggaaccaaataatgcatatgatgaggaggattgcgtggagatggtggcctcagggggatggaacgatgtcgcctgccacactacgatgtactttatgtgcgagtttgataaggaaaatatgtag

SEQ ID NO: 218897 - DNA, 666 bp, synthetic construct
  misc_feature 1..666: note = Description of Artificial Sequence: Synthetic coding sequence
  source 1..666: mol_type = other DNA
atgtggtgggtaccccctagcccatacggctgtctcccgtgtgctctgccgggagacatgggtgataagggccagaagggtagcgtagggcgtcacggaaagatcggccctattggctctaaaggagagaagggagatagcggggacattggcccaccaggaccgaatggcgagcccggactaccttgtgagtgttctcaattgcggaaagcaatcggcgaaatggacaaccaggtaagccagctcaccagtgagttgaagttcattaagaacgctgtggccggagtgagagaaaccgagagcaaaatctatctgctggtcaaagaggaaaagaggtatgccgacgcacagctgtcatgccagggcagaggcggaacactgtccatgccgaaagacgaagctgcaaacggacttatggctgcttacctagcacaggcaggcctggccagagtcttcattggaattaatgatctggagaaagaaggcgcttttgtgtactccgatcactctcctatgaggacatttaataaatggaggagtggagagccgaacaatgcttacgacgaagaagactgtgtggagatggtggcaagtggtggatggaacgatgttgcatgccatactacaatgtattttatgtgcgaattcgataaggagaatatgtag

SEQ ID NO: 218898 - DNA, 666 bp, synthetic construct
  misc_feature 1..666: note = Description of Artificial Sequence: Synthetic coding sequence
  source 1..666: mol_type = other DNA
atgtggtgggtgcccccatccccctatgggtgtctgccgtgtgccttgcccggtgacgcgggtgagaaaggggacaaaggcgcaccgggacgccctgggagagtagggccaacaggggaaaagggggaaaagggcgacagcggtgacatcgggccacccggacctaatggtgaacccggactgccatgtgaatgttcccagctgcgcaaagccattggcgaaatggacaatcaagtgagtcagttaacatccgagctgaagttcatcaagaacgcggtggcaggcgtacgggagacagaatcgaagatttaccttctagtgaaggaggagaaacgctacgcagacgcccagttgtcctgtcaaggcagggggggaactctcagcatgcctaaggacgaggccgcaaacggactgatggccgcatacttggcccaagctggactggctcgagtgtttattggtataaacgacttggagaaggagggtgccttcgtctactctgatcatagccctatgcgcaccttcaataagtggcgaagcggggagcccaataatgcttacgacgaagaagactgcgtggaaatggtggcgtccggtggctggaatgacgtggcttgtcatacaaccatgtactttatgtgcgaattcgacaaagagaacatgtag

SEQ ID NO: 218899 - DNA, 594 bp, synthetic construct
  misc_feature 1..594: note = Description of Artificial Sequence: Synthetic coding sequence
  source 1..594: mol_type = other DNA
atgtggtgggtacctccgagcccctatgggtgtctcccctgcgctctaccaggcgagaagggggactccggcgacattggcccacccggaccaaacggcgaacccggtctcccttgtgagtgctcccagctacgtaaagccataggagaaatggacaatcaggtctcccagttaacatccgagctcaagttcatcaaaaacgctgtggccggtgtccgcgagaccgagagcaagatttacttactggtaaaagaggaaaagcgctacgcagacgcccaattgtcctgtcagggcaggggtgggacactcagtatgccaaaggatgaagccgcaaatgggctcatggccgcttatcttgcccaagcaggcctggctcgggtcttcatcgggattaatgaccttgaaaaagagggcgctttcgtgtattctgatcacagtcctatgagaacctttaacaaatggcggagcggtgaacccaataatgcttatgacgaagaagactgtgtcgaaatggtcgcttcaggcggatggaacgatgtggcttgccacacgacgatgtattttatgtgcgagtttgataaggagaatatgtag

SEQ ID NO: 218900 - DNA, 2229 bp, synthetic construct
  misc_feature 1..2229: note = Description of Artificial Sequence: Synthetic coding sequence
  source 1..2229: mol_type = other DNA
atgaaggacgacttcgctgaggaagaggaggtccaatctttcgggtataaacgctttggcattcaagagggtacacaatgtaccaagtgcaagaacaactgggcgctgaaattctctatcatcctactgtacatactgtgtgctctgctgacaatcactgtggcaatactggggtacaaggtggttgagaaaatggacaacgttaccggaggcatggaaacatccagacagacgtacgatgataagttaaccgctgtagagagcgatctgaaaaagttaggtgatcaaacgggcaagaaagctatctcaacgaactcagagctgtccacttttcggtccgacatcttagatctcaggcagcagttgcgagagatcaccgaaaagacctctaaaaataaggacaccctggagaaactgcaggccagtggtgacgcgctggtcgacagacaatcccagctcaaagagaccctggaaaacaatagtttcctgatcacgaccgtaaataaaaccctacaggcctacaatgggtatgttacaaacctgcaacaggacacatctgttcttcaggggaatcttcagaaccagatgtattctcacaatgtcgtgataatgaaccttaataatctcaatctgacccaggttcagcagcgaaatctcatcactaacctccagaggtccgtcgatgacacctcacaggccatccagagaatcaaaaatgactttcagaacctccagcaggtcttcctgcaggctaagaaagacactgactggctcaaagagaaggttcaaagcctccagaccttagcagcaaataattccgctctcgccaaagctaacaacgataccctcgaagatatgaattctcagctcaatagcttcaccggacagatggaaaatataaccaccatttcacaggccaatgagcagaacctgaaagacctccaggacctgcacaaagatgcggagaatagaaccgccataaagttcaaccagttggaagagaggttccagctgtttgaaactgacatcgtgaatattatttccaacatcagctatactgcccaccaccttaggacattgactagcaatttaaatgaggttcgaacaacatgcacagatacactgaccaaacacaccgacgatctcacgtccctaaataatacattggcaaatatacgcctcgattccgtctctctgcgtatgcagcaggatctgatgcgctctagactggacactgaggtggccaatctctccgttatcatggaggagatgaagctcgtagactcgaagcatgggcagcttatcaagaactttacaattctccagggccctccgggtccccgaggacctcggggagacagaggctcccaaggccctcccggtcctactgggaataagggtcagaaaggagaaaaaggggagcccggacctccaggtcccgcaggcgagaggggccctatcgggccagccggaccaccaggcgaacggggaggaaaaggctccaagggctcccaaggacctaaagggtctcggggatcacctggcaagcccggaccccagggatcttctggagatcctgggccacctggacctcccggaaaagagggcctgccgggtccgcagggaccacctggcttccagggattgcaaggcaccgtaggcgaacctggggtaccaggccctaggggactgcccggtcttcctggagtcccagggatgcctggacccaagggacctccaggaccgcctgggcctagtggggctgtagtccctctggccctccagaacgagcctacgcccgctcctgaggataacggatgcccaccccactggaagaactttaccgacaaatgttactatttctcggtcgaaaaagagatctttgaggacgcaaagctcttctgtgaggacaagtcatcgcatctggttttcatcaacactcgcgaggaacagcagtggatcaaaaaacagatggttggaagagagtcccattggattggccttacagattccgagcgggagaacgagtggaagtggttggacggtacctccccggattataagaactggaaggccggacaacctgacaactggggccacggccacggcccaggagaagactgtgccggactgatctatgccggacaatggaacgacttccagtgcgaggacgttaacaatttcatttgcgagaaagaccgcgagacggtgctatcctcggccttatag

SEQ ID NO: 218901 - DNA, 2919 bp, synthetic construct
  misc_feature 1..2919: note = Description of Artificial Sequence: Synthetic coding sequence
  source 1..2919: mol_type = other DNA
atgggtcccggtgtgctattgctgcttctggtggcaaccgcctggcatggacaaggcatccctgtgatagagccttccgttcctgaattggtggtgaaacccggtgcaacagtgacactgcggtgcgtgggcaacggaagtgtggagtgggatggcccaccctcccctcactggacgctatactctgacgggtcctctagcattttgtctaccaataacgccaccttccagaataccgggacataccggtgcacggagccgggagatccacttggcggttccgccgcaatacacctttacgtgaaggaccccgcacgaccttggaatgtcttggctcaggaggtggtagtgtttgaagaccaggacgccctcctgccttgcctccttactgatcccgtgctggaggccggtgtgtcactggtccgagtgcgtggcaggccccttatgcggcacaccaactactcattctcaccatggcacgggtttactattcatcgagccaagttcatccagagtcaggactaccagtgttccgccttaatggggggaaggaaggtgatgtccatatccatccggttaaaggtccagaaggtcattccgggtccccctgctctcacccttgttccagccgagttagtccgaattaggggggaagccgcacagatcgtttgctcagcttccagcgtggacgttaactttgatgtatttctgcagcataacaataccaagctcgccatccctcaacagagcgatttccacaataatcggtaccagaaggtcctcactctcaatctcgaccaagtagacttccagcatgccggaaattatagttgtgtcgcttctaatgtgcaaggcaagcactctacctctatgttctttagggtggtggaatctgcctatctaaatttatcgtcagagcagaacctgattcaggaagtgacagtgggggaaggactgaacctcaaagtgatggttgaggcctatcctgggcttcaaggctttaactggacctacctggggcctttctccgaccaccaacctgaacctaagttagccaatgccaccacaaaggatacttaccggcacacattcaccctcagcctgcctagacttaaaccctcggaggcaggacgttactctttcctggcaagaaaccccggaggctggagggcattgacattcgagctcacgctgaggtatcccccagaagtttccgtgatctggaccttcattaatgggtctggcacacttctctgtgcagcatcaggttacccacaaccaaacgtgacttggctccaatgcagcggccacacagacagatgtgacgaggcccaggtgctacaggtctgggacgacccttatcctgaggtactgagccaagagcccttccacaaagtcaccgtgcagtccctattaactgtggaaaccctcgagcacaaccaaacttatgaatgccgggctcataattctgttgggtctgggtcctgggccttcattcccatcagcgcaggggctcacactcatccacccgacgaatttctgttcacccccgtcgtggtggcttgcatgagtatcatggctttgctgctgctgcttttgctcttattattatacaaatacaaacagaagccaaagtatcaagttagatggaagattattgaaagctatgagggaaattcatatacttttatagaccctacccagcttccctataacgaaaagtgggagttcccaaggaataatttacagtttgggaagactctgggagcaggcgcattcggaaaagtggtggaggctactgcttttggccttggaaaggaagatgctgtccttaaggtggcagttaaaatgctcaagagcactgcccatgccgatgagaaggaagccctgatgagcgagttgaaaattatgagccatcttgggcagcacgaaaacatcgtaaatctcctgggggcatgcacccatggcggacctgtgctcgtgattaccgagtactgttgttacggcgatctgttaaatttcctgaggcgcaaggccgaggccatgctgggaccaagtttgtctcccggtcaggaccccgaagggggtgtcgactataagaatattcatctggagaagaaatatgtgcgacgcgactccgggttttcttcacagggtgtcgacacatacgtcgaaatgagacccgtctcaaccagctcaaacgatagcttttcagaacaggacctggataaggaagacggccgaccgctagagctaagagatctgttacatttttctagccaggtcgcccaggggatggccttcttagccagtaagaattgcattcaccgcgacgtagctgccagaaatgtactcttaaccaacggacacgtggccaaaatcggagatttcggtctggccagggatattatgaacgacagcaactacattgttaagggaaacgcaagattgcctgttaagtggatggctcctgagtctatattcgattgtgtttatactgtgcagtcagacgtctggtcgtacggcatcctgctgtgggagattttcagtctaggtttaaacccctatcccggaatactggtgaattcaaaattttacaaactcgtcaaggacgggtatcagatggcccaaccagcctttgctcctaaaaacatttactcaattatgcaggcttgctgggccttggaacctacccaccgccctactttccagcaaatatgttcttttcttcaggaacaggcccaagaagataggcgggaaagggactataccaacctcccttcctcctcccgttcggggggatcaggcagttccagcagtgaactggaggaggagagctcttccgaacacctgacctgttgcgagcaaggcgatatcgcccagcctctgctacagcctaataattaccagttttgttag

SEQ ID NO: 218902 - DNA, 1506 bp, synthetic construct
  misc_feature 1..1506: note = Description of Artificial Sequence: Synthetic coding sequence
  source 1..1506: mol_type = other DNA
atgcgccatacaaattactccttcagcccctggcatggatttactattcatcgggcaaagttcatccagagccaggattaccagtgctctgccctcatgggcggtcgcaaggttatgtctatctcaatccgactgaaggtacaaaaggtgatacctggcccaccggctctgactttggtacctgccgaactggtcaggatacgaggtgaagccgctcagatcgtttgtagcgcttcctctgtggatgtgaacttcgatgtttttctacagcacaacaataccaagttggctatcccccagcaaagtgacttccataacaatcgttatcagaaggttctcaccctgaatctggatcaggtggactttcagcatgctgggaactattcctgcgtggcatcaaatgtgcagggtaaacactcaacttctatgttcttcagggtagtagaaagcgcttacctgaacttgtccagtgagcagaatttgattcaggaggtcacggttggcgagggactgaatcttaaggtgatggtggaggcttatcccggtctgcaaggcttcaactggacctacctgggacccttcagcgaccatcaaccggagcctaaattggccaatgcgactacgaaggacacctataggcatacctttacactgtctctgccccgtctcaagccttctgaagctggtagatatagctttctggccaggaacccgggaggatggcgagcactcaccttcgaattaaccttgaggtatccacccgaagtatcagtgatctggacgtttataaatggcagcgggactctgctgtgtgcagcatctggataccctcaacccaatgttacttggctgcaatgctctggtcataccgaccgttgtgacgaggcgcaggttctgcaagtgtgggacgatccctacccagaggtgctatcacaggaaccatttcacaaggtaaccgtgcagagcctccttactgtagagacactcgaacacaatcagacctatgaatgtagagctcataacagtgtggggtccgggagttgggcattcatcccaatttccgccggagctcatacgcaccccccagacgagttcctttttacacccgtggtggttgcgtgtatgagtatcatggctctgctcttactgctactcctgctgctgctctacaaatacaaacagaagccaaagtaccaggtccgttggaagattatcgagagttatgagggcaatagttacaccttcattgaccctacacagttgccctacaatgagaaatgggagtttcctaggaacaaccttcagtttggcaagacactgggggctggagcctttggtaaggtggtggaagccactgctttcggcctgggaaaagaagacgcggtcctgaaggtagctgtcaagatgctcaagtcaaccgctcatgccgatgagaaggaagcctccggtctgtaccaatcggccgaacagcagcaaaaacgctggcaacgacagcagcagcagtag

SEQ ID NO: 218903 - DNA, 2016 bp, synthetic construct
  misc_feature 1..2016: note = Description of Artificial Sequence: Synthetic coding sequence
  source 1..2016: mol_type = other DNA
atgggtcccggtgttctactgctcctgctcgtcgcgaccgcatggcatggccagggaatacctgtgatcgagccgagtgtccctgagctcgtggtgaaacccggagccactgtaactcttaggtgtgtcggcaacggcagcgtcgaatgggatggccctccctcccctcattggaccctgtatagtgacgggtccagctccattttatccaccaacaacgccactttccagaatacgggaacctaccggtgcacagagccaggcgacccgttggggggtagtgctgccatccatctgtatgtcaaggatcctgctcgaccttggaatgtgctcgcacaggaagtagtggtgttcgaagaccaggatgcgctgctcccctgtttactgaccgaccctgtacttgaagcgggtgtgtctctcgtgagggttagggggagacccctgatgagacatactaactattccttttcaccctggcatggattcaccatccaccgcgcaaagttcatccagtcccaagattaccagtgtagcgcactgatggggggtagaaaagtgatgtcgatctccattcggctgaaagttcaaaaggtgatccccggacctcccgcactgacactcgtgcccgcagagctggtgcgcattcgcggagaggcagctcagattgtttgcagcgcatccagcgtggatgtgaacttcgatgtgttcttgcagcacaacaacacaaaactggccatcccacagcagagcgattttcacaataaccggtaccagaaggtactgacacttaatctggatcaggtagacttccagcatgcaggcaactattcatgcgtggcctctaatgtgcagggtaaacactcaactagcatgttttttagggtggtagagtcagcatacctgaacctcagctcggagcagaatttgatacaggaggtgacggtaggtgaagggctcaacctgaaagtaatggtggaggcctaccctggactgcagggttttaactggacatatttgggaccttttagcgatcatcagcccgagcccaagcttgcaaacgccaccactaaggacacataccgacacacttttaccttgagtcttccacggcttaagccatctgaagcgggaagatattcctttctggccaggaaccctggtggctggcgggctctcacttttgaactgaccctcaggtacccacccgaagtcagtgtgatctggaccttcattaatggctccggtaccctgctgtgcgcggcttctggatacccgcagccaaacgttacgtggctgcaatgttcagggcataccgatcgctgcgacgaggcccaggtcttgcaagtgtgggatgatccataccctgaagtgttgtctcaggagccttttcacaaagtgaccgtgcagagtcttttgacagtggagaccctggaacataatcaaacatacgaatgcagagcacacaatagcgtggggtcaggaagctgggccttcattccaatatctgccggagcccatacgcatccccctgatgagttcctgtttactccagttgtggtcgcatgtatgagtattatggctcttctgctcctgctgctgttgcttctcctgtataagtataagcagaagccaaagtatcaagttaggtggaagataatcgaaagttacgaaggcaacagctacacctttatcgatcctacccaactcccgtacaacgaaaaatgggagttccctcgcaataatttgcaattcgggaaaaccctgggagccggtgccttcggaaaagtggtggaggctacagccttcggacttggcaaggaagacgctgtgttgaaggtcgccgtaaaaatgctgaaaagcactgcccatgctgacgagaaggaggccctgatgagcgaattgaagattatgtctcacctcgggcagcacgagaatatcgtgaacttgttaggggcttgcacccatggagggacagttgcctctcccgctagggtgtggacgccaatgtggaggtag

SEQ ID NO: 218904 - DNA, 921 bp, synthetic construct
  misc_feature 1..921: note = Description of Artificial Sequence: Synthetic coding sequence
  source 1..921: mol_type = other DNA
atgggccctggcgttctgctgctgctccttgtggccaccgcctggcatggccagggaatccctgtgattgaaccaagtgttcccgaactggttgtgaagccaggggcaacagttacgctgcggtgtgtgggaaacggctccgtggaatgggatggtcctccttcccctcattggacgctgtatagcgatggcagttcctcaattttgtctacaaataatgccacattccagaacactgggacttacagatgtactgagcctggcgacccactgggaggcagtgccgctattcacttgtacgtaaaggatcccgctcgtccctggaacgtgcttgcgcaggaggtggtggtctttgaggatcaagacgctctcctgccttgcttacttaccgacccggtacttgaagctggcgtgagtttggtaagagtgcgaggacggcctcttatgaggcacaccaactacagcttctccccgtggcatggctttaccattcaccgcgctaaatttattcagtcccaggactaccagtgctccgcccttatggggggtagaaaagtcatgtcgatctcaatacgtctcaaagtacaaaaggtaatccctggtccgcctgcacttaccctcgtccccgcagagctcgttcgtattcggggagaggccgctcagattgtttgctcagcaagctccgtggacgtcaactttgacgtcttcctgcaacataataacactaaattggccataccacagcaatccgattttcataacaatagataccagaaggtgttgacacttaaccttgaccaggtcgatttccaacatgcgggaaactatagctgtgtggctagtaacgtacagggaaagcactccaccagcatgttctttcgcgtcgtgggaacgccgtccccttccctgtgcccagcctag

SEQ ID NO: 218905 - DNA, 1134 bp, synthetic construct
  misc_feature 1..1134: note = Description of Artificial Sequence: Synthetic coding sequence
  source 1..1134: mol_type = other DNA
atgttacttctggttacttccctgttgttgtgcgaacttccgcatccggctttccttctgatccctgagaaatcagatctgcggacagtggccccagcaagctcgttgaacgttagatttgatagtagaaccatgaacctgtcttgggactgtcaggagaacaccactttttctaaatgtttcctgacggacaagaagaaccgagtcgtcgagccaagattatcaaacaacgagtgtagctgcaccttccgtgagatctgcctgcatgagggcgtcacttttgaggtccatgtgaacacaagtcagagaggtttccagcagaagttgctgtatcccaactcgggtagggaagggaccgcagcacagaactttagctgttttatctataacgccgatctgatgaactgcacctgggctaggggcccaacagcacctagggacgttcagtatttcttgtatatcagaaacagcaagaggcgacgtgagatccggtgcccctactacattcaggactcggggactcacgtgggctgtcacttagataatctgtctggcctgacgagccggaattacttcctggtgaacggaacctccagggagatcgggattcagttttttgatagcctgcttgacactaaaaagatcgaaagattcaatccgccttccaacgtgacagttaggtgcaacactacacattgtctggtgcggtggaaacagccacgaacctaccagaagctcagttacctggacttccagtatcaactggacgttcaccgcaaaaatacgcaacctgggactgaaaatctgttaatcaacgtgagcggagatctcgaaaaccgctacaacttcccttccagcgagcctagggccaagcactccgtgaaaatccgggctgccgacgtccggattctgaactggtcctcgtggtctgaggctatcgagttcgaccatttgggtgggattcaccccaggggcagagaaagactccccagacggggattggacagagagggcaactacctgcgacccaggggatgccgcaacggtatggatatttctgccagcgcaacccggggaaactgctttctagacgatgcagtgaacttgtacatcattttttatgtgtttatctag

SEQ ID NO: 218906 - DNA, 702 bp, synthetic construct
  misc_feature 1..702: note = Description of Artificial Sequence: Synthetic coding sequence
  source 1..702: mol_type = other DNA
atgcttcttctagtgactagtctgcttctctgtgagctgccccaccccgcttttcttttgatccccgagaagagcgaccttaggaccgtggcacctgcttctagtctgaacgttagattcgacagtcggaccatgaatttaagctgggattgccaggagaatactacgttctctaagtgctttttgaccgacaaaaaaaatagagtagtagagccacgactgtcaaacaacgaatgcagttgtacattccgggaaatttgcctacatgagggcgttacttttgaggtacatgtgaatacaagtcaaaggggtttccagcaaaagttgctgtatccaaattctggtagggaggggaccgcagcacagaattttagctgttttatctacaacgcggatttgatgaactgcacctgggccagagggccaactgctcctcgggatgttcagtattttctgtatatccggaactccaagaggcgaagggaaataagatgcccttattacattcaggattctggcacgcatgtcggttgtcatcttgacaacttatccggcctgacctcccgcaactattttctcgtgaatggaacctctcgcgaaatcggcattcagttcttcgacagcctcctagatacgaaaaaaatcgggtctctcggatactccggttgttccagacagttccacaggtctaagactaactag

SEQ ID NO: 218907 - DNA, 1002 bp, synthetic construct
  misc_feature 1..1002: note = Description of Artificial Sequence: Synthetic coding sequence
  source 1..1002: mol_type = other DNA
atgctcctgctcgtgacttcactcctgctctgcgaactcccacatccggcattccttttgatccccgagaaatctgatctcaggacggtggctccagcctccagccttaacgttcggttcgactcccggacaatgaatctatcttgggactgtcaggaaaacacaaccttctccaagtgctttctaaccgacaagaagaatagagttgtggaaccaagactgtcaaataacgagtgtagttgcacctttcgcgagatctgtctgcatgaaggcgtgaccttcgaggtacatgtaaatacctcccagaggggtttccagcagaaattgctctacccgaactccggaagagagggaacagctgcgcaaaacttttcctgttttatttataacgcggatctgatgaattgtacatgggctagagggcctacagctccaagggacgttcagtactttttgtatatcaggaattcaaagcgacgcagggaaattcgctgtccctattacatccaagattccggtacccacgtggggtgccacctggataatctgtccggattgacctctcggaactactttctggtgaacggaacatccagggagatcggaattcagttcttcgattcactgcttgacacaaagaagatcgagcgcttcaatcctccttccaatgtcacagttagatgcaatacaacgcattgtctggtacggtggaagcagcctagaacttatcaaaaactgtcataccttgactttcaataccaactggacgtgcaccggaaaaatacacaacccggaactgaaaacctgctcattaacgtgagcggggatttagaaaacagatataattttccttctagcgagcctcgcgctaagcactcagtgaagatccgcgcagcggacgtgagaatcctcaactggtcatcctggagcgaagccattgagttcggaagtcttggctatagtggctgttctagacagtttcaccgcagcaagaccaactag

SEQ ID NO: 218908 - DNA, 1002 bp, synthetic construct
  misc_feature 1..1002: note = Description of Artificial Sequence: Synthetic coding sequence
  source 1..1002: mol_type = other DNA
atgctcctccttgtgacgagcctcctgttgtgtgaactcccccaccctgcttttctcctcatcccggaaaagagcgaccttaggactgtcgccccagccagctctcttaacgtgcgattcgactctcgcactatgaacctcagctgggattgtcaggagaataccacctttagtaaatgttttttgacagacaaaaaaaaccgcgtcgtcgagcctagactgtcaaacaatgaatgttcatgtactttccgggagatctgtctgcacgagggcgtgaccttcgaggtccatgtcaacacatcccagcgcggattccagcagaaattgttgtaccctaatagcggcagagaaggtacagccgcacagaacttctcttgctttatatataacgctgatttaatgaattgtacctgggctagaggccctacagcccctcgcgacgtacagtattttctttatattagaaacagcaaaagacgcagggagatacgctgtccttattatattcaggattccgggacccacgtaggctgtcatctcgacaatctttccggactcacctccaggaactattttttggttaacggcacctcacgagagattggaattcagttttttgattcacttctggatacaaagaagatcgaacgattcaatcccccaagcaacgtgaccgtccgctgcaatactacccactgcttggtcagatggaagcaacctcgtacgtaccagaagctgtcatacctcgactttcagtaccagctggatgtgcatcgaaaaaacactcagcccggaacagagaatttgttgatcaacgtgtctggcgatctcgaaaatcgttacaatttcccatcttctgagccacgcgcaaaacactcagtcaagattcgggctgccgacgtcagaattttgaactggagcagttggagtgaagccattgaatttggttcactcggatattcagggtgtagccggcaattccacagatctaaaactaactag

SEQ ID NO: 218909 - DNA, 861 bp, synthetic construct
  misc_feature 1..861: note = Description of Artificial Sequence: Synthetic coding sequence
  source 1..861: mol_type = other DNA
atgctgcttctggtgacatctctgctactatgcgaattgccccatcctgcattcctgcttattcctgaaaaatctgacctccgaaccgtggcccctgccagcagcctgaatgtgagattcgattccagaactatgaacctctcctgggactgtcaggagaatacgacgttctccaaatgtttcctgacagataagaagaaccgcgtagttgagcccagactgagtaacaacgagtgctcgtgtacattccgcgagatctgtcttcatgagggggtgaccttcgaggtccatgttaacacaagccagaggggattccaacagaaactactttatcccaacagcggacgagagggaacggccgctcagaacttttcttgcttcatatacaacgcggacctaatgaactgcacgtgggctagagggcctacagctccccgagacgtgcagtatttcctgtatataaggaattccaaacggcgtcgtgaaattagatgcccctactacatccaggactccggaacacacgtggggtgccatttggacaacctgtctggtctgacaagcagaaattactttctggtgaatgggacctcgagagagatcgggattcagtttttcgactccctgctggacactaagaaaattgaacggttcaaccccccttctaacgtcactgtgcgctgtaacacgacccattgcctggtgaggtggaaacagccgaggacctatcagaagcttagctatctggattttcaataccagctcgatgtccatcgaaagaacacccaaccaggcacagaaaacctgctggtggtcctgacaactggcaccagtgcattgtgcactttcatgtgttcgtag

SEQ ID NO: 218910 - DNA, 1233 bp, synthetic construct
  misc_feature 1..1233: note = Description of Artificial Sequence: Synthetic coding sequence
  source 1..1233: mol_type = other DNA
atgctcctgttggtcacatcgctgctcctctgcgaactccctcacccagcattcctcctcatcccagagaagagcgaccttaggaccgttgcacccgcttctagtctcaatgtgagatttgattctcggaccatgaacctctcttgggactgccaagagaacacaacattctcgaaatgctttctgacagacaagaaaaaccgggttgtggagccacgtctaagtaacaatgaatgctcttgtacatttcgagagatatgcctgcacgagggagtgacattcgaggttcacgtcaacacaagccagagagggttccaacagaaactgctgtaccctaatagtggaagagaggggacagctgctcagaacttctcctgcttcatctataatgccgacctcatgaactgtacctgggcacgcggtcctactgccccacgggatgttcaatactttctttacatacggaactcaaagagaagaagggaaattcggtgcccgtattatattcaggacagcggaacccatgtgggctgtcatcttgacaatcttagcgggcttacttctcgtaattacttcctggtgaacgggacctctcgtgaaatcggcatccagttttttgattcgctgctcgacactaaaaagattgagaggttcaatccccctagcaacgtgaccgtcagatgtaacactactcactgtctcgtccgctggaaacaacccaggacctaccagaagctcagctatctcgatttccaatatcagctagacgtgcacaggaagaatacccagccaggcaccgagaatctgctgataaatgtttctggcgatctcgagaacagatataatttcccatcttccgagcccagagcaaagcacagcgtaaaaatacgcgctgcagacgtacggatcctgaattggagctcatggtccgaagcaatcgaatttggtagcgatgacggaaacctgggatctgtgtatatctacgttcttctgatcgttggaacccttgtctgcgggatcgtgctgggcttcctgtttaagaggtttttgagaatccagcgactgtttcctcctgtgccacagatcaaggataagctcaacgataatcatgaggtggaggacgagatgggcccacagcgacaccacagatgcggttggaacctgtaccctacccctggtccttcccctggcagtggatctagtcctcggctgggcagtgagtcaagtctctag

SEQ ID NO: 218911 - DNA, 1203 bp, synthetic construct
  misc_feature 1..1203: note = Description of Artificial Sequence: Synthetic coding sequence
  source 1..1203: mol_type = other DNA
atgttactactggtaacatccctgttgctctgcgagctaccacaccctgctttccttcttattcctgaaaagtccgatctccggactgtggccccagcgagttctcttaacgtgaggttcgatagccgcacaatgaatctttcttgggactgtcaggaaaatacaacattttccaaatgctttctgacagataagaaaaatagggtcgtggaacccaggctttctaataatgaatgcagctgcaccttcagagaaatatgcctgcatgaaggagtgaccttcgaagtccatgtgaatacttctcagcggggatttcagcagaagctgctgtaccctaattcagggagagaaggaactgccgctcaaaacttctcatgtttcatatataacgcggacctcatgaactgtacatgggctcggggacccaccgccccaagggatgttcagtactttctgtacatccgaaatagtaagcggagacgggagattaggtgtccctattacatacaggactcgggtacccatgttgggtgccatctcgataacctaagtgggctgacctcacgcaactacttcctagtgaacgggactagtagagaaatcgggatccagttcttcgactcacttcttgacacaaagaagatcgagagattcaacccgccaagcaacgtcaccgtacgttgtaacacgacccactgtttggtaagatggaaacagccaagaacataccagaagctgtcttatctggactttcagtatcagctagatgtgcacaggaagaacacacaaccagggaccgagaacctgcttataaatgtcagcggggacctcgaaaataggtacaatttcccaagctccgagccccgagccaagcatagcgtcaagatccgtgcggctgacgtgaggatattgaattggagtagctggagtgaagccatagaatttggatccgatgacggaaaccttggatccgtgtacatatacgtcctcctcattgtgggcacattagtgtgcggcattgtgttgggcttcttgttcaagcggttcctgcggattcaacggctcttccccccagttccacagatcaaggacaaactgaatgacaaccacgaggtcgaggacgagatcatatgggaggaattcactcctgaagagggtaaaggataccgggaagaggtcctaacagtaaaagagataacctag

SEQ ID NO: 218912 - DNA, 1203 bp, synthetic construct
  misc_feature 1..1203: note = Description of Artificial Sequence: Synthetic coding sequence
  source 1..1203: mol_type = other DNA
atgctgttgctggtgacgtcgctgctgctttgcgaacttcctcaccccgctttccttttgatccccgaaaaatccgacctgcgaaccgtggctccagcaagttcactaaatgtaaggtttgacagcagaacaatgaacttatcatgggactgtcaagaaaatacaacattctctaaatgttttctaacggacaaaaagaatcgtgttgtagaacccaggctgtccaataacgagtgttcctgtacctttcgggagatttgtctgcacgaaggcgttactttcgaagtgcatgtgaatacgtcgcagcgtggatttcagcagaaactcctctatcctaacagcggtagggagggaacagcagctcagaatttttcctgtttcatctacaatgccgacctaatgaactgtacgtgggctagaggcccaacagccccacgagacgtccagtacttcctctacatccgtaactcaaagaggcgccgagagattcgctgtccttactatattcaggactcggggacccacgttggatgtcatctggacaatctaagtggtcttaccagccggaactatttcttggtaaatgggacgtcaagagagatcgggatccaattctttgattcccttttggacactaagaaaatcgaaagatttaaccctccttccaacgtgacggtgagatgtaataccacacactgccttgttaggtggaaacaacctcggacataccagaaactttcttacctggacttccaatatcagctcgacgtgcatcgaaagaatacacagcccggaacggagaacctgcttatcaatgtgtcgggcgatcttgagaatcggtacaactttcccagctccgaacctcgagccaagcactccgtcaaaattagggcagcggacgttagaattctgaactggtcaagttggagcgaggccattgaattcggttccgacgacgggaatctgggctctgtgtatatctacgtgctgcttattgttggcactcttgtctgcgggattgtcttaggctttttatttaagcggttccttaggatacagagactgttcccaccagtaccacagatcaaggataagttgaatgataaccatgaggtggaagatgaaatcatttgggaggaattcactccggaggaagggaagggttacagggaagaagtgttgaccgttaaggaaataacctag

SEQ ID NO: 218913 - DNA, 717 bp, synthetic construct
  misc_feature 1..717: note = Description of Artificial Sequence: Synthetic coding sequence
  source 1..717: mol_type = other DNA
atgctactattggtcacatccctccttctctgcgaactgcctcacccggctttcctattaatccccgaaaaaagcgacttgagaaccgtcgccccagccagcagcttaaatgtaaggtttgatagcaggaccatgaacttgtcgtgggactgccaggagaacacaaccttttctaaatgtttcttaactgacaaaaaaaatcgggtggttgagcctcgcctcagcaacaacgagtgtagctgcacttttcgggaaatttgtcttcacgagggtgtaactttcgaggttcacgtgaatacatcccagcgaggctttcagcagaaactcctctaccccaattccggtagagagggaaccgctgcccagaacttctcatgcttcatctacaatgcagatctgatgaactgcacctgggcccgtgggcctacggcaccccgtgatgtgcagtacttcctgtatatcaggaatagcaagcggagacgggagattagatgcccctactacatacaggattctgggacacacgtcggatgccacctcgataatctatccggcttaacctcgaggaattattttctcgtgaatggcaccagcagagagattggaatacagtttttcgattccctgttggacaccaaaaagatcgagcgcttcaatccaccatctaatgtgaccgtcaggtgcaacactacccactgtctcgtccgctggaaatag

SEQ ID NO: 218914 - DNA, 1305 bp, synthetic construct
  misc_feature 1..1305: note = Description of Artificial Sequence: Synthetic coding sequence
  source 1..1305: mol_type = other DNA
atgctgctgttggtcacctccctgttgctatgtgaattacctcacccagctttcctcttgatcccagaaaagagcgacctgcgtactgtcgcacccgcaagctctctgaatgtccgattcgattccagaactatgaacctatcctgggattgtcaagagaatacaacttttagtaagtgcttcctcacagacaagaaaaacagagtcgttgaacccagattgtctaataatgagtgcagttgcactttccgagaaatctgcttacatgagggcgttacctttgaagtgcacgttaatacgtcacagcgcggatttcaacagaaactgctgtaccctaacagtggcagggaaggcactgccgctcaaaacttttcatgtttcatctacaatgccgatctcatgaactgtacctgggccagaggtcccacagctccgagagacgttcaatactttctgtacattaggaatagtaaacgtaggcgtgaaatccgctgcccctactacatccaggacagtgggacacacgttggatgccacctcgacaacctgagcgggttgacctctcgcaactactttttggttaacggaacgtcgagagaaattggcatccagttttttgattcactgttagacactaaaaaaatcgaacgatttaatccgccttctaacgtcaccgtgaggtgcaacaccacccactgtctagtgcgatggaaacaacccagaacatatcagaaactctcttatctggacttccaataccagctcgatgtgcatcggaagaacacacaacctggtaccgaaaatcttctgattaacgtaagtggcgacctggagaatcgatataactttcctagctccgagccccgagcgaaacattcagtgaaaattagagccgcagacgtcagaatcctgaactggagctcgtggagcgaagccatcgagtttggcagtcactctgtgacccaggccggtgtccagtggcacaacctcggttctctgcagcctccatctccgaggttgaaacgcttttcttgtttgagactgcccggaagcgacgatgggaatctcggctcagtctacatctatgtgttgctcatcgtggggactctcgtttgcggtattgtgctcggctttcttttcaagcggtttctgcgtatacaacggctgtttcctcccgtgccgcagatcaaggacaaattaaatgacaaccacgaggtggaggatgaaattatttgggaagagtttacaccagaagaaggaaagggatatagggaggaagtcctgactgtgaaagagattacatag

SEQ ID NO: 218915 - DNA, 567 bp, synthetic construct
  misc_feature 1..567: note = Description of Artificial Sequence: Synthetic coding sequence
  source 1..567: mol_type = other DNA
atgctacttctggtcactagcctgttgttgtgtgagcttccacaccccgcttttctgctgatccctgagaaaagcgatctgcgtacagtggcacctgcaagctccctgaatgtgcgcttcgactctcgcaccatgaacctctcctgggattgtcaggagaatacgacatttagcaagtgctttctgactgataagaagaatcgggtcgtggagccgagactctcgaataacgagtgcagttgcacctttagagaaatttgtcttcacgaaggggtgacattcgaggtccacgttaacacctcccagcggggattccagcaaaagcttctgtaccccaattccggtagagaaggcactgccgctcaaaacttcagctgctttatttacaacgcggacctgatgaattgtacttgggccaggggacccactgctccgcgagacgttcagtacttcctctatattagaaatagtaagagacgtcgagagatccgatgcccctactatatccaagacagcggaacgcacgtggggtgccatttggataatttgagcggcctgacctcctag

SEQ ID NO: 218916 - DNA, 1203 bp, synthetic construct
  misc_feature 1..1203: note = Description of Artificial Sequence: Synthetic coding sequence
  source 1..1203: mol_type = other DNA
atgcttttgctggttacgagtctgctgctatgcgaactgcctcatcccgctttccttctgatccccgagaagagcgaccttagaaccgtcgccccagcctccagtctgaacgtgcggtttgatagtcgcactatgaacctgagctgggattgccaggaaaatacaacgttttccaaatgttttctcacagataagaagaaccgggtggtggagcctcggttgagtaacaatgaatgttcttgcacattccgagaaatctgtctccacgagggtgtaactttcgaagtgcacgttaacacctcccagagaggatttcagcagaagctactgtatcctaactctggtagagaaggtacagcagcccagaactttagctgtttcatttataacgccgaccttatgaactgtacttgggcgagggggccaactgcacccagggatgtccaatacttcttgtacatcaggaactctaagcgacggagagaaattcgttgcccctattatatccaggactcaggtactcacgttgggtgtcacctcgacaatctatccggcctcaccagcagaaattatttcttggtgaatggaacctccagagaaatcggtatacagttttttgattctctgctggacaccaagaaaatcgaacggtttaatcctccatccaacgtcactgtcaggtgtaacacgacacactgcttagtgcgatggaagcaaccgaggacctaccagaaattgtcctacctcgatttccagtatcaattagacgttcacaggaaaaatacacagccaggcactgagaacttgttgatcaacgtgagcggtgacctggaaaaccggtacaattttccatcatccgagcccagggctaaacactccgtcaagattagagcagccgacgtgagaatattgaactggtcttcatggtcagaggctatcgaatttggatctgatgatggcaatctgggcagcgtgtatatatacgtgttgctgatcgttgggacgttagtttgtgggatcgtattgggcttcctcttcaagcgttttctgcggattcagagattgtttccgcctgtgcctcagatcaaagataagctgaatgataaccatgaggtggaggatgaaattatctgggaagagtttacccccgaagaagggaaagggtaccgcgaggaggtcttgactgtgaaagaaattacatag

SEQ ID NO: 218917 - DNA, 804 bp, synthetic construct
  misc_feature 1..804: note = Description of Artificial Sequence: Synthetic coding sequence
  source 1..804: mol_type = other DNA
atgaattgtacctgggcacggggtccgacagccccacgggatgtgcagtattttctttacatcagaaacagcaaacgacgaagggagattaggtgtccctactacatccaggactcaggcacacatgtcggttgtcatttggacaatctgagtgggctcacatccagaaactactttctggttaatggcacctcacgtgagatcggaatccagtttttcgatagtctgctagatacaaagaagatcgaaaggttcaaccccccttcaaatgtgaccgtccggtgtaataccacgcactgtctcgtgaggtggaagcagccccgtacttaccaaaaactgtcatatctggactttcagtaccagctggatgtgcatcggaaaaatactcagccaggtaccgagaatctcctgatcaacgtctcaggtgacctcgagaatcgatacaatttcccgagctccgagccaagggcaaaacactccgtaaagatacgggcagccgatgtacgtatactgaattggtccagctggtcagaagcgatcgaattcggatctgatgacggcaatcttggctccgtgtatatctatgtacttctgattgtaggcactctggtctgcggcattgtgctcggcttcttattcaaaagatttctgagaatccagcggctgttcccacctgttcctcagattaaagataaactgaatgataaccacgaggtggaggacgaaatcatctgggaggagttcacccccgaagagggcaagggatatcgcgaagaggtgttgactgtgaaggaaataacttag

SEQ ID NO: 218918 - DNA, 2712 bp, synthetic construct
  misc_feature 1..2712: note = Description of Artificial Sequence: Synthetic coding sequence
  source 1..2712: mol_type = other DNA
atggtgctggcacaggggctgctaagtatggccttgctggccctttgttgggaacgtagcttagcaggtgccgaggagactatccctcttcaaacactgcgctgctacaatgattatacctcccacataacctgcagatgggctgatacacaggatgcgcaaaggctggtgaatgttacgttaatccggcgagtgaatgaggacctgcttgagcctgtgtcatgcgacctgtcggacgacatgccctggtcggcgtgtccccaccccaggtgcgttccacggcgatgtgttatcccctgccagagctttgtcgtcactgatgtggactattttagcttccagcctgatcggccactcggcacgcgcctgactgtgacgctgacgcagcatgtccaaccacccgaacctcgcgatcttcagattagcaccgatcaggaccattttcttttgacttggagcgtcgcacttggaagtcctcagtcgcattggttaagccccggagatctagaattcgaagtggtatacaagcgcctccaggattcgtgggaggatgctgccatcttgttatcgaacactagtcaggccactctcggcccagagcatctgatgccaagctcgacatacgtggcaagagtgcgtactaggctggcccctggttcgaggctttctggacgtccctccaagtggtcgcccgaggtttgctgggattcacagcccggtgatgaggcccagcctcaaaatctggaatgtttctttgacggcgctgccgtcctgagctgctcttgggaggtacgaaaggaggtggcatccagcgtgtctttcggtcttttttacaagccttcaccggatgcagggtccgctgtgctccttcgggaggaggagtgtagccctgttcttagggagggacttggatccctgcatacacggcaccattgccaaatccctgtgcccgacccggctacgcatgggcagtacattgtgtccgtgcaaccacgtcgggctgagaagcatattaagagcagcgtcaacattcagatggcaccacccagtctcaacgtcactaaggatggggattcctattccctcagatgggagaccatgaagatgagatacgagcacattgaccatacattcgaaattcagtataggaaggatacagctacttggaaggactccaaaacagagaccctgcaaaatgcccacagtatggctctgccagccctagagccatccacgcggtactgggccagagtgagagtccggacctcaaggacgggatataacggcatctggtcagaatggagcgaggctcgctcgtgggacaccgagtccgttctgccaatgtgggtgctcgccctgatcgtgatctttttgacaatcgctgtgctgctcgctctaagattctgtggaatctatggctatcgtctgcgcaggaagtgggaggagaaaatacccaacccatcaaaatcccaccttttccagaacggtagcgcagagctctggcctcctgggtcaatgtcggcgttcaccagtggctcaccaccacatcagggcccatgggggtcacgttttccagagctggaaggagtgtttccagtcggtttcggggatagtgaagttagccctctaacaatagaggatccaaagcatgtgtgtgacccaccgtctgggcctgatacaacaccagctgcaagtgacctccctaccgaacaacccccaagtcctcaaccaggcccacccgctgcttcccatacccctgaaaaacaggcctctagttttgacttcaacggaccttacttagggcctccccattcaagatccctgcccgacattttgggtcagccagaaccacctcaggaggggggaagtcagaagtcacctccacctggtagcctggagtatttgtgcttacccgctggaggacaggtacagctggttccactcgcccaggctatgggtccgggacaggctgtggaggtagagaggcggccttcacagggagccgctggatctccaagtctcgaaagtgggggagggccagcccctcccgctctgggacccagagttggaggccaggatcagaaggattcacccgtcgccatacctatgtccagcggggatacggaagacccaggtgtggccagtggttatgtgtcaagcgctgatttggtatttactcccaattctggcgcatcctccgtgtccctggttcctagtttgggccttcctagcgaccaaacacctagcctgtgccccggattggcgtccggccctcccggagccccagggcctgtgaagtctggctttgaaggctacgtggagctccctccaattgaggggaggagcccaaggagtccaagaaataaccccgtgccgccagaagccaagtcgccggtcttgaatcctggcgagcgacccgctgacgtgtcccctaccagccctcagcctgaaggcctcctcgtacttcagcaggtgggcgattactgttttctccccggacttggaccaggacccctgtcactgagatctaaaccatcctcccctgggcctggtcctgagattaaaaacttggaccaggcattccaggttaaaaaacccccaggccaagccgtgccacaggtgcctgtcattcagttattcaaggccctcaagcagcaagactacctatcactgcctccctgggaagtcaataagcctggcgaggtctgctag

SEQ ID NO: 218919 - DNA, 2694 bp, synthetic construct
  misc_feature 1..2694: note = Description of Artificial Sequence: Synthetic coding sequence
  source 1..2694: mol_type = other DNA
atggtgctggcccaggggctgttaagcatggctttgctcgcactctgttgggagagatcattggcgggagcagaagagaccatccctctgcagacgctgcgttgctataatgattacaccagccatatcacatgtagatgggccgacacccaggacgctcagagactggtgaatgtgacattgatacggagggtaaatgaggatcttctcgaaccggtgtcatgtgacctgtccgatgacatgccctggtctgcgtgccctcatcctcggtgtgttccacgcagatgtgttatcccttgccagtcctttgttgtaacagacgtggattacttttctttccagcccgatcgtcctcttggcactaggctgactgtcaccctgactcagcatgtgcagcctcctgaacctagagatctccaaataagtaccgatcaggaccattttcttttgacttggtccgtcgctctgggatccccacaatcacactggctctctcctggtgatcttgagttcgaggtggtgtataagaggctgcaggatagctgggaagatgcagccatccttttgagcaacacatcccaggcgacactggggcctgaacaccttatgcctagctctacttacgttgcccgagtgcgtacccgccttgcacccggttccagattatcgggcagacccagtaaatggtcgccagaggtatgttgggacagccaaccaggtgatgaagctcagccgcaaaatctggagtgtttttttgatggagcagccgtattgtcatgctcttgggaggtccgtaaggaggtcgcatccagcgtgtcttttggcctgttctacaagccatctcctgatgccggtgaggaagaatgctcgccggtgctacgcgagggattagggtcactccacaccagacaccactgccagatccctgtgccagatcctgctacccacgggcaatacattgtgagcgttcagccacgacgagccgagaagcacatcaagtcttccgtcaacatccaaatggcgccaccttcattgaacgttacgaaggatggggacagctatagcctgaggtgggaaactatgaagatgcggtacgaacatattgaccatacattcgaaatccaatatcgaaaggacaccgctacttggaaagattctaagactgaaaccctgcagaatgcacactcaatggccctacccgcactcgagccttccacccgctattgggctagggtacgagtgcgcaccagtaggaccggttataatggaatctggagcgaatggagcgaggccaggtcctgggacaccgagtctgttttgcctatgtgggtcttagcactcatagtgattttcctcaccatagcagtcctgctcgcgttgaggttttgtggaatttatggatatcgcctgaggcgcaaatgggaggagaaaatccctaacccttctaagtctcacctgttccagaatggcagcgccgagctctggcctccaggctccatgtcggcatttacatcaggttctcctcctcatcaaggcccttggggcagcagattccctgaactggagggtgtgttcccagtaggattcggagactccgaggtgtctcccctgactatcgaagacccaaaacatgtgtgtgatcctccttctggcccagatactacacccgcagcgtctgatctacctaccgaacaacctcccagcccacaacccggacctcccgctgccagccatacacctgagaaacaggcatcctctttcgacttcaatgggccttacctgggaccccctcactctcgatcgttgcccgacattctggggcagcccgagcctcctcaggaaggcggatcccagaagtctccgcctcccggatccttagagtacctctgcttgcctgctgggggtcaagtgcagctggtgccactggcgcaggccatgggaccaggtcaggcggtcgaggtggagaggcgtccttcccagggcgctgcaggctcaccctctctggaaagtggcggtggccctgcaccacccgctctgggaccacgagttggcggacaggaccagaaggactccccagttgcaattccaatgtctagtggtgataccgaagacccaggagtcgcgagcggttatgtctcatccgcagacttggtatttaccccgaactccggggcttcttcggtgagtcttgtgccctccctggggctaccctctgatcagacccctagcctttgcccagggctggcaagcgggcctccaggtgctcctggacccgttaaaagcggcttcgagggatacgtagaactccctccaatcgagggacggtctccgcgttctccacgcaataacccagtccccccagaggcaaaatctcccgtattgaacccgggtgaaaggccagcggacgtgtccccgacctcccctcagcctgaggggctgcttgtgcttcagcaggtgggggactactgcttcctgcccggacttggacctgggccattgtctttaaggtcaaaaccatccagtcccggtccagggccagagatcaaaaatctagaccaggccttccaggtgaaaaagcctccagggcaggcagtcccccaggtcccggtgattcagctcttcaaagctctcaagcaacaggactacttaagtctgcctccctgggaagtcaacaaaccaggcgaggtctgctag

SEQ ID NO: 218920 - DNA, 690 bp, synthetic construct
  misc_feature 1..690: note = Description of Artificial Sequence: Synthetic coding sequence
  source 1..690: mol_type = other DNA
atgccttggtctgcctgtccacaccccaggtgtgttccacgcagatgcgtcattccttgccagagttttgtcgttaccgacgtcgattactttagcttccagcctgaccgccctttagggactaggttgacagtgactctgacccagcacgtccaacctcctgagccccgagacttgcagatcagtaccgaccaggatcactttctgctgacttggagtgtcgcactgggctctcctcaaagccactggctcagccccggagatctggagttcgaagtggtatacaaacgcctccaggactcatgggaggacgcagccattctgctcagcaatacttctcaggctaccctggggcctgagcacctgatgccatcgagcacttatgtcgctcgagtgcgcacccgccttgcaccgggttcacgtctctccggcaggccgagcaagtggagtcctgaggtctgctgggattctcagccgggtgatgaggctcaaccccagaacctcgagtgcttttttgacggtgctgccgtgctcagttgtagttgggaggtgcggaaggaggtggccagttccgtgtcatttgggttattttataaaccatccccggacgccggagaagaggaatgctcacctgtgctacgtgagggacttggctctctgcataccagacatcattgccagattccatag

SEQ ID NO: 218921 - DNA, 2535 bp, synthetic construct
  misc_feature 1..2535: note = Description of Artificial Sequence: Synthetic coding sequence
  source 1..2535: mol_type = other DNA
atgggaaaacttagaccatggcgggatctcttggagccagtcagctgtgacctgagcgatgacatgccttggagcgcctgtcctcacccacggtgtgtgccaaggaggtgcgtcatcccttgtcagtccttcgtggtgactgacgttgattattttagcttccagccagaccgaccactgggaacccggttaactgtgaccctgactcaacatgttcagccacccgaacctagagacctacagatttcgactgaccaggatcacttcctgctgacatggtccgtcgccctgggaagcccacagagccattggttgagccccggtgacctggaattcgaagtagtttataaacgcttgcaggactcctgggaggacgctgccatcctgctgtcaaacacgtcacaagctacattgggcccagagcatctaatgccttcttccacgtatgttgccagggttagaacacgcctggccccagggagcagactgtctggcaggccgagtaaatggtcccccgaggtgtgctgggactcccagcctggcgatgaggcccaacctcaaaacctggaatgttttttcgacggcgctgcggtcttgtcatgcagttgggaagtgagaaaggaggttgcctctagcgtgagcttcggacttttttataagccgtcacccgatgcaggatctgctgtgcttctgagagaagaggaatgtagcccagtgctgcgcgaaggtctaggtagccttcataccagacatcactgtcagatccctgtcccagaccctgccacacacggtcagtatatcgtgtcagtccagccgagacgcgcagaaaagcacattaaatccagcgtgaacatccagatggcccctccatccctgaacgtgaccaaagatggggattcctacagcctacggtgggagaccatgaaaatgaggtacgaacacatcgatcacaccttcgaaatacaatatcggaaggacaccgcgacctggaaggacagcaagacggagaccctccagaacgctcactccatggcactgccggcattggagcccagtaccaggtactgggctcgggtacgtgtgcgcacgtcccgcactggatacaacgggatatggagtgaatggtctgaggcacgcagctgggataccgagtctgtgctcccaatgtgggtgttggcgctgattgtgatctttttgactatcgctgtccttctcgcattgagattctgcggaatctacggatacaggctgcggcgaaaatgggaagaaaaaattccaaatccgtctaaatcccacctttttcagaacggctccgcggagctgtggccaccgggatccatgagtgcttttaccagtggcagcccgcctcatcagggcccttggggatccagattcccagagctcgagggcgtgtttcccgtgggattcggcgatagtgaagtttccccccttacaatcgaggatccaaagcacgtgtgcgaccctcccagcgggcctgacacaactcccgctgctagcgacctgccgaccgaacaaccaccttccccacaacctggccctccagcagcctctcatacacctgagaagcaggcctcatcattcgatttcaacggaccgtacctgggtccaccgcattccagatcattacccgatatactggggcagccagagcctccccaggagggtggaagccaaaagagtcctcctcctggctcactcgaatacttgtgcctgcctgctggcggtcaggtgcagctagtaccgttagctcaggctatggggccagggcaagctgtagaggttgaaaggaggccatcacaaggcgctgctggtagcccatcactcgaatctggagggggacccgcaccccctgctctaggaccacgggtcgggggacaggatcagaaggactctccagtggccatcccaatgtcttccggcgacacagaggatccaggcgtggctagcggctacgtgtctagtgccgacctcgtcttcaccccaaattcaggcgcatcaagcgtgagtctcgtcccatcactagggctgccctccgaccagactcctagtctgtgccccggtttagcaagcggaccccctggtgcccctggtccagtgaagagtgggtttgagggctacgtggaactgccacccatcgaaggcagaagccctaggagccctagaaacaatccggtgcccccagaggccaagagcccagtgctgaacccaggggagcgcccagcggacgttagtcctacaagcccacagccagagggtcttctcgtgctgcaacaagtaggcgactactgctttctccctggactgggcccaggccctctgagcctccgctccaagccgtctagtccaggacccggtccagaaatcaagaatctagaccaggctttccaggtgaagaagcccccaggacaggcagtgcctcaggttcccgtcatccagcttttcaaagccctgaaacaacaggattacctgtccctgcccccatgggaagtgaataagccaggcgaagtctgttag

SEQ ID NO: 218922 - DNA, 2670 bp, synthetic construct
  misc_feature 1..2670: note = Description of Artificial Sequence: Synthetic coding sequence
  source 1..2670: mol_type = other DNA
atggtactggctcaggggctactgtccatggccttactggccctgtgctgggagaggtcattggcaggagccgaggagacaattcctctgcagactcttcgctgctacaatgattacacctctcacatcacatgtagatgggctgacacccaggatgcacagagactggtgaatgtgaccctcatacgaagagttaatgaggacttgctggaaccagtatcttgtgatctctcagacgacatgccatggagtgcttgcccccatccccgttgtgtgccaagaaggtgtgtcattccctgccaatctttcgtagtgactgatgtcgattattttagcttccaacctgacagaccactgggtacgagactcaccgtgaccctgacccagcatgtccagccccctgagcccagagacctgcaaatttcaacagatcaagaccacttcctgttgacctggagcgtggcccttggttccccacagtcacattggctatccccaggtgatctggagttcgaggtggtgtacaagcggcttcaggattcatgggaagatgcggcaatactgctaagtaatacgagtcaggccacgctcgggcctgagcaccttatgcctagcagcacttacgtggcaagggtccgaactaggctggctcctggttctcgcctctccggcagaccctctaaatggtcgcctgaagtgtgctgggattcacagccaggagatgaagctcagccccagaatttagaatgttttttcgatggggcagcggtcctcagctgttcttgggaagttcgcaaggaggtcgcatcttctgttagttttggtctgttttataaacctagtcccgatgcgggtgaggaggagtgctcacccgtactgcgcgaaggtctgggcagccttcacacacgccaccactgtcagatccccgtccctgaccccgcaacccatggacagtatatcgtcagcgtccagcctagacgggctgaaaaacacatcaagagctctgtgaacatacagatggcacccccttcccttaacgtgacaaaggacggcgattcctatagccttcggtgggagactatgaaaatgcgatatgaacatatcgaccatacatttgaaatccaatatcgcaaggacacagcaacctggaaagactctaagaccgagacgttacagaacgcccattctatggccctgccagcattggagcccagtactcgttactgggccagagtgagagttcgcacttctcgcactggatacaatggcatttggagtgaatggtccgaagctcggtcctgggacaccgaaagcgtgcttccaatgtgggttcttgcactgatcgtgatcttcctcacgatcgccgtgctccttgccctgcgcttctgtggcatctatgggtacaggctccgtcgtaaatgggaagagaagatccccaacccgtctaagtcacacctatttcaaaatggatctgctgagttatggcccccaggatcaatgtcggcgtttacgtcgggcagcccaccgcatcagggtccctggggatctagattccccgagcttgaaggcgtattccctgttggcttcggagacagcgaggtgtctcctctcacaatagaggatcccaagcacgtctgcgatcccccaagcggcccagacactactcctgcagccagcgatctgcccaccgagcagccgccttctccgcagcccggtccacccgcagcctcgcatacacctgagaagcaagcctcctcctttgatttcaatgggccatacctgggccctccacactcccgttccctcccagatatcttaggccagccagagccacctcaggagggcggttctcagaagtcccctcccccaggaagtctggaatacttatgcttacccgctggcggacaggtgcagctggtacctcttgcacaggccatgggcccagggcaagctgttgaagtggagcgcaggccatcacagggggctgcagggtcaccttccctagagtctggagggggacccgctcccccagctctaggccctcgtgtgggcggtcaggaccagaaagatagcccggtggccatccccatgtcctccggcgatactgaggatcccggtgtcgcgagcgggtacgtgtcctcagcagacctggtctttactccaaattctggggcaagttccgtgtcacttgtcccctccctgggcctgcccagtgatcagactccctcactgtgcccaggccttgcttctggacccccaggagctcctgggcctgtcaaaagtggttttgagggctacgtcgaactgccacccatcgagggcaggagccctagatcgccccgaaataaccccgtgcccccagaagccaaaagccctgtgttgaatccaggagaacggccagccgacgttagtcccacctctccccagccagagggcctgttggtgctacagcaggtcggagattactgcttcctccccggactggggccaggtcctctttcgctccggtctaaaccatcatcccctggaccgggacccgaaattaagaacctagatcaggcctttcaggttaagaaaccaccgggacaggccgtccctcaagttcctgtgatacagctgtttaaagctttagtggttagtgtaatgtcagtcggaccacctgtgccctag

SEQ ID NO: 218923 - DNA, 2352 bp, synthetic construct
  misc_feature 1..2352: note = Description of Artificial Sequence: Synthetic coding sequence
  source 1..2352: mol_type = other DNA
atggctcgactggggaactgttcccttacctgggctgcattaataatactcctcctccccggtagtcttgaggaatgcgggcacatcagcgtatccgcacctatcgtgcacctgggagatccgattacagctagctgcatcatcaagcaaaattgtagccatctggacccagagccacaaatcctttggaggctgggcgctgagctccagcctggcggaaggcagcaaagactaagtgatggaacacaggagtctatcatcacccttccccacctgaatcatactcaggcctttctgtcctgctgtctgaattgggggaacagtctacagatccttgatcaggtggagctcagagccggatatccacccgcaattccccacaatctgtcctgcctcatgaacctcacaacatcctcccttatttgccagtgggaacccggacccgaaacccatcttccaacaagcttcacattgaaatcgtttaaaagtagggggaactgccaaacccagggggactctattctggactgcgtgccaaaggatggtcagtcacactgttgcattccaagaaaacacctcctcctataccagaacatggggatctgggtccaagccgaaaacgccctcggaaccagcatgtcaccccaactctgcctggatcccatggatgttgttaaactggagccccctatgctccgcaccatggatccttctccagaagcggcacctccacaggctgggtgtcttcagctttgttgggaaccatggcagcctggcttgcatattaaccaaaaatgcgaactgagacataagccgcaaaggggagaggcgagctgggcgcttgtcgggccattgcctttggaggctctgcagtacgaattgtgcggtctcttgccagctaccgcttacactctacagataaggtgcatccgctggccactaccgggtcattggtccgattggtctccatccctggaattgcgtacaacggaacgggcaccaacagttcgtcttgatacttggtggcgccaacggcagcttgatcctcgaactgttcagcttttctggaagcctgtcccattggaagaggactcaggaagaattcagggctacgtagtatcttggaggccctctgggcaggccggagcaattttgcccctttgcaatactacagaactgtcatgcacctttcatttgccatccgaggcccaggaggtggcacttgtggcttataattcggccggaaccagtaggccaacacccgttgtgttctctgagagccgcggtcctgctttaaccagactacacgctatggcgagggatccacactcactgtgggtggggtgggaaccaccaaatccatggccacaagggtatgttatcgagtgggggctaggtccaccttccgcaagcaattcaaacaagacttggcggatggaacagaatgggagggctacaggtttcttgctgaaagagaacattagaccattccagctgtacgagatcattgttacccccctgtatcaggacacaatggggcctagtcagcacgtctacgcgtattctcaggaaatggccccttcccacgctcctgagttacatctcaagcatataggtaagacgtgggcccaactggaatgggtcccagaaccacccgaactcgggaagagccccctgacacactatacgatcttctggaccaatgcccagaatcaaagcttttcagccattctgaacgccagctcccgtgggttcgtcctacacgggctggagccagctagtctatatcacattcacctgatggccgcaagtcaggccggagccactaactctactgtgttgaccctaatgacattgacaccagagggcagcgagctgcacatcatcctcggacttttcggtctgctgttactcttaacatgcctgtgtggaactgcatggctgtgctgttccccaaatcgtaagaatccattgtggcccagcgtcccagacccggctcactcaagcctgggcagctgggtcccaacaattatggaggaggatgcctttcagctcccaggtctcggaacccctcccatcacaaagctgaccgtgctcgaggaggatgaaaaaaagcccgtcccctgggaatctcacaacagctcagaaacgtgcggtctacctactttagtgcagacatacgttctgcagggagaccctcgcgctgtgagtacccagcctcagtctcaatctggcaccagcgatcaggcaggccctccacggagatctgcctatttcaaagaccagatcatgctgcaccccgctccacccaacggcctgctatgcctttttcctatcacctctgtcctgtag

SEQ ID NO: 218924 - DNA, 2310 bp, synthetic construct
  misc_feature 1..2310: note = Description of Artificial Sequence: Synthetic coding sequence
  source 1..2310: mol_type = other DNA
atggcacggttgggcaactgttccctaacttgggctgcactgatcatactcctgttgccaggcagtttggaagagtgtggtcatatctctgtgagtgcacccattgtccacttgggcgatcccataacagccagttgtattattaaacagaactgcagccacctcgatccggagcctcagattttgtggaggttgggagctgaactgcaacctggtgggagacagcagagactgtctgatggtactcaagagagcatcatcactcttccccacctgaaccatactcaggccttcttgagttgctgtctcaactggggaaatagtcttcagatcctggatcaggtcgagcttcgcgcaggatatccaccagctataccacacaacctgagctgtctaatgaatctgactaccagttctctgatatgtcagtgggaacccggaccggaaacccacctaccaacaagtttcacactgaaaagctttaaatctcggggtaattgtcagacacagggtgactcaatactagactgcgtcccaaaagatgggcagtcccactgttgcatccccagaaaacacctgctgctctatcagaacatgggtatttgggtgcaggctgagaatgcattaggaacaagcatgtctccgcagctgtgcctcgacccaatggatgtggtaaagctggagcctcccatgttgcggactatggatccttctcccgaggccgcacccccacaggctggctgtttgcagttgtgctgggaaccttggcagccaggcctgcatatcaatcagaaatgcgagttaaggcacaagcctcaacgaggggaggctagttgggctttggtcgggcctctgccgctagaagccctgcaatacgagctgtgcggcctgttgcccgcaaccgcttataccctgcagattcgatgcattaggtggccactgccgggacactggtcagattggtctccatcactggaactccgcactactgaaagagctcctaccgtcagactggacacctggtggcgacagcggcagttagatcctagaacagttcaattattttggaaacccgtcccactggaagaggactccggcaggatccagggctacgttgttagttggagaccttcaggacaggccggtgcaatcctcccgctgtgtaatacaactgagctgtcatgtaccttccacctgccctccgaggcccaggaagtcgccctagttgcctacaactccgctggtaccagcagacccactcccgtagtgttttctgaatcgaggggtcctgccttgacacggttgcacgcaatggccagggaccctcattccctgtgggtcggatgggagccacccaacccatggccccaggggtatgtgatcgagtgggggctcggacctccttctgcatccaactctaataagacctggcgtatggagcagaatgggagagctacaggcttcctgcttaaggaaaacataagaccattccagctgtatgaaataatagtgacgcccttataccaggatactatgggtccaagccagcatgtgtacgcctactcccaggaaatggcaccttcgcatgcaccggagctgcacctaaagcacatcggaaagacatgggcccagttggagtgggtcccggagcctcctgagctggggaagtccccactgacccactatacaattttttggaccaacgcccagaatcagagctttagcgccatcctgaatgcctcttcacggggattcgtactccatgggctagagcctgcctcactgtaccatatccatctgatggctgcatcacaggctggcgcaactaactcgaccgtgctgactctcatgactctgaccccagccggacgaatccccagcggccaagttagtcagacacagctgacagctgcctgggcaccaggatgcccacagtcttggaggcgcatgccatccagctgtccagcacttgcaaggcacccctccccttcttcacaatgctggcgcaggatgaaacggtccagatgtcccggaagtccaattactgcacaaaggcccgtcgcttcaccactatggagtcgaccaatgtgttccaggggcacacaggagcagtttccaccttctccaaatccgtcccttgccccagcaatcagaagcttcatgggctcatgttgggcagcgcctcaggcacagggccaagggactatttcagcagtgactccactcagcccaagctggagggctagtccacctgccccttctcctatgcgtacctcgggttctcggccagcaccgtggggaccatggtag

SEQ ID NO: 218925 - DNA, 2511 bp, synthetic construct
  misc_feature 1..2511: note = Description of Artificial Sequence: Synthetic coding sequence
  source 1..2511: mol_type = other DNA
atggcccgtcttgggaactgcagcctgacttgggccgctctcataatactgttattgcccggttcactggaggagtgcgggcacatttctgtatctgccccaatcgtgcacttaggggatccaatcacagcctcatgcatcatcaagcagaactgtagtcacttagacccagagccacagattctgtggagactaggtgcggagctgcaacctggcggtcgtcagcagcgactgtctgatgggacacaggaaagcattattacacttccccacttgaatcacactcaagccttcctcagctgctgcctgaattggggcaactccctgcagatcttggatcaggtggagctgcgggcaggctatcctcccgctatcccccataatctatcttgcctcatgaacctcacgacttcttctttaatctgtcagtgggaacccggacccgagacccatctgcccacgtccttcacactgaagtcgtttaagtcccgaggcaattgtcagacgcagggcgatagcatactggattgtgttccaaaagacggacaatctcattgctgcatcccacggaaacacctgttgctctaccagaacatgggcatatgggtccaggccgaaaacgcacttggaacatctatgagtccacagctttgtcttgaccccatggatgtggtgaagttggagcctcctatgctgaggacaatggaccccagtcctgaagctgccccaccgcaggccggttgtctgcagctttgttgggaaccctggcagcccggactgcatataaaccagaaatgcgagctgaggcacaagccccaacggggagaggcctcatgggccctggtggggcctttgcctttggaggccttacagtatgaactttgcgggctccttcctgcgactgcatatacactgcagatccgctgcatacgttggccgctacccggtcattggagcgactggagcccctcactcgaactgcgcacaacagagagggccccaactgtacgactcgatacgtggtggcggcagagacaactcgaccctagaaccgtgcagctattttggaaacctgtcccactggaggaggactcaggtaggatccaaggatacgtcgtaagctggagaccttccggacaagcaggagctatactgcccctgtgtaatacaaccgagctgtcctgtactttccacctgcctagcgaggcacaggaagtggccctggtggcttacaacagcgccggaacatctcggcctacacctgtggtcttcagcgagagtaggggccctgcactcactcggctgcacgccatggccagggacccacactcactgtgggtcgggtgggagccccctaacccttggcctcaggggtatgtaattgagtggggtctgggaccgccatccgcttcaaactctaataaaacctggcgtatggagcagaatggcagggcaactggattccttcttaaagagaatattcgccctttccagttatacgagatcattgtaaccccactgtaccaggacacaatgggcccttcacagcacgtctacgcatacagccaggagatggccccttcacacgcccctgagttgcacctcaagcatattgggaaaacttgggcccagctggaatgggtgcctgagcctccagagctgggcaaatctcccttgacgcattacaccattttttggaccaatgcccagaatcaatccttcagcgctattctgaatgcatccagccgcggtttcgtcttgcatggcctggaacccgcatccttgtaccacatacatctcatggccgcaagtcaggcaggcgcaacaaactctaccgtgctcacactgatgacattgacccccgagggatcggaactccatatcattcttggcctctttggtctcctgctgttgcttacctgcctctgtgggactgcctggctgtgctgctcccctaaccggaagaacccgctgtggccgtctgtccctgaccctgcccacagctcattggggtcctgggtgcctaccataatggaagaggacgccttccaactccctgggctgggtacgccacctatcaccaagctgacagtactagaagaggatgagaaaaagcccgttccttgggagagccacaattccagtgaaacatgcggactgcctaccctggtgcaaacttacgtcttacaaggagacccgagggccgtcagtactcagccccagagccagagcggcacctcagatcaggttctttatggacagctgctgggctctccgacctctcctggcccaggccactacctaaggtgcgattctacccagccattacttgcaggcctgaccccttctccaaagagctatgagaatctgtggttccaggcctccccccttggaacactggttacccccgcacccagccaggaggacgactgcgtgttcggacctcttctgaatttcccattgctccaagggatccgggtgcacggaatggaggccttgggcagcttctag

SEQ ID NO: 218926 - DNA, 2592 bp, synthetic construct
  misc_feature 1..2592: note = Description of Artificial Sequence: Synthetic coding sequence
  source 1..2592: mol_type = other DNA
atggctcgcctgggcaactgttccctgacttgggcagccctgatcatcctcctgctgccgggtagcctcgaagagtgtggtcacataagcgtaagcgccccaatcgttcacctgggcgacccgattacagccagctgtattatcaagcaaaattgtagccacctcgatccagaaccccagatcttgtggagattaggagcagagttgcagcctgggggacgacaacaaagactcagcgatgggactcaggaatcaattattactcttccgcaccttaaccacacacaggccttcctgtcctgttgtctcaactggggtaactcactacaaatcctggaccaagtcgagcttagggctggatatcctcccgcaattcctcacaatctgtcctgtcttatgaacctcactacaagttcgctgatctgtcagtgggaacctggaccagaaacacatctgccaacatctttcacactgaaatcctttaagagcaggggcaactgccagacacagggcgactcaattctggattgcgtgcctaaagacggccagtcgcactgttgcatccccagaaagcatttattgttgtaccagaacatgggaatttgggttcaggctgagaacgcattaggaacatcaatgtcacctcagctgtgcctcgatccaatggatgttgtcaagcttgaaccaccaatgcttcgtaccatggatccatctcccgaggctgcccctccccaagccggatgtctccagctgtgctgggagccttggcaacctggacttcatattaaccagaaatgcgagctccgccataaaccccagcgcggtgaggcctcctgggcactggtggggcctctgcctctagaagccctgcagtacgagctgtgcggcctattgcccgctacagcatacacactgcagatccgatgcattaggtggccacttcccggacactggtcggactggtccccaagtcttgagctgaggaccacggagagggcacctaccgtaaggctggatacgtggtggcgtcagcggcaattggaccctcgcaccgtgcagcttttctggaaacctgtgcctctggaggaggacagtgggaggatccaggggtacgtagtatcatggcgtccatctggacaggcaggtgcaatcctgcccctgtgtaacaccaccgagttgtcatgcacttttcatctgccttcagaggcccaggaggtcgccctcgttgcatataacagtgcaggaaccagcagacctacacctgtggtattctcagaatctcgtggcccagcccttacccggctgcatgccatggcacgagacccccatagcctctgggtaggctgggagccacctaatccttggcctcagggctacgtaattgaatggggcctgggccctccctccgcgtctaactcaaataagacctggagaatggagcagaatggcagagccacaggatttctgctcaaggagaatatcagaccatttcagttgtacgaaatcatagtgaccccactgtaccaggacacaatgggcccatcccagcacgtgtacgcctactctcaggagatggccccatcacatgccccagagctacatctaaaacacatcgggaaaacgtgggcccagcttgaatgggtgccggagccaccagagctcggaaagtctcctttaacacattacacaatcttctggacaaatgcccagaatcagtcatttagcgccatcctgaacgcaagcagtcgcggattcgtgttgcatggtctggagccggctagcttgtatcatatccacctgatggcggcttctcaggcgggagcaaccaactcaaccgtcctcacattaatgacactgacccctgagggctccgaactgcacataatccttggactgtttggccttctgctgctgctgacgtgcctgtgtggtacagcatggctgtgctgtagcccaaaccgcaaaaacccactctggccatccgtgcctgacccagcgcatagctctcttggatcttgggtgcccacgattatggaggagctaccgggtccacggcagggccagtggctcggccagacctccgaaatgagtcgagccctaacaccccatccctgtgttcaggatgccttccaattaccaggcctcggtacccccccaattaccaaactaaccgtgttggaggaagatgaaaaaaaacctgtcccctgggagtcccacaacagctctgagacctgtggcctgcccacactggttcagacctacgtactccagggggatccacgcgcagtctccactcagcctcagtctcagtctgggacttccgaccaggtattgtatgggcagctgttaggcagtccaacctcaccagggccaggccactacctgcggtgcgattccacgcagcccctcctagctggacttacacctagcccaaagagctacgagaatttgtggtttcaggcctccccactaggcactcttgtgacacctgctcccagccaggaggacgactgtgtatttggacccctgctgaacttccccctcttgcaggggatcagagtgcacgggatggaagctctgggcagcttttag

SEQ ID NO: 218927 - DNA, 2352 bp, synthetic construct
  misc_feature 1..2352: note = Description of Artificial Sequence: Synthetic coding sequence
  source 1..2352: mol_type = other DNA
atggccaggcttggcaactgtagtcttacctgggctgctctgatcatcctgctcctgccagggtcacttgaggagtgtggacatatttccgtgtcagcgcctatcgtccacctgggagatcctatcactgcatcgtgtattatcaaacagaactgctcccacctcgaccccgagccacagatcttgtggcggttaggagctgagcttcagcctgggggtagacaacagcggcttagcgatggaacccaggaatctatcatcactttgcctcatctaaaccacacgcaggctttcctatcctgctgcttgaactgggggaatagtctgcaaatccttgaccaagtcgagctgcgtgcaggatatcccccagcgatcccccacaatttaagctgtctaatgaatttgaccacctccagcctcatctgccagtgggagcccggacccgaaacccatctgccaacatccttcacgcttaagtctttcaagtctcggggtaactgccagacgcagggcgattcaattctcgactgcgtgcctaaggacggtcagtcccattgttgtatccctcggaaacacctcctgctctaccaaaatatgggtatttgggtgcaggctgagaacgctctcggaacctcaatgtcgccacaactgtgtctggatcctatggatgtggtgaagctcgaaccacccatgctccggactatggacccttcacccgaggccgcacccccacaggccggttgtttgcaactgtgctgggagccatggcaaccgggtctccacatcaaccagaaatgtgagctgaggcataagcctcaaagaggcgaggctagttgggcactggtagggccactgcccctggaagccctgcagtatgagctgtgtgggctcctgccagccacagcctacacacttcagattagatgcatccgctggcccctgcccggacattggagcgattggagcccatccttagagcttaggactactgaaagggctcccaccgtgcggctggacacttggtggaggcagagacagctagaccccagaacagtccagctgttttggaaaccggtgccactagaagaagattcaggaaggatacaagggtatgtcgtgagttggagaccttcgggtcaagcaggggctattctaccactttgcaatacaacagaactgtcttgtacctttcacctgcccagtgaggcccaagaggtggcccttgttgcctataacagcgcaggtacatcaagacctaccccagttgtcttttccgaatctcggggacccgctctgacacggctgcatgctatggctcgggacccccatagcttgtgggtcggctgggaacccccaaacccatggccccagggctatgtaattgagtggggacttggaccgccttctgcctccaattcaaataagacttggaggatggagcaaaacggccgtgccaccggctttctcctgaaagagaacatccggcctttccaactctacgagataattgtgaccccactctatcaagacacgatggggccatcccagcatgtgtatgcctactcccaggaaatggccccaagtcacgcacctgagctgcacttaaagcacattgggaaaacctgggcacagctcgaatgggtgcctgaacccccagagttaggcaaatcgcctctcactcattacactatcttctggactaatgcccagaaccagtccttctcagcaatcctgaatgcatcatcccgaggtttcgttctgcacggcctcgaacccgcttctctgtatcacatccatctgatggcagcctcacaggccggtgcaacaaattctacggtactgacgttaatgacacttaccccagagggctccgagttacacattatcctgggcctgtttgggttgctgcttctcctgacttgcctgtgtggaacggcctggctgtgttgttctcctaatcgtaagaatcctctatggccttccgtgccagacccagcccactcatctttggggtcatgggttccgacgatcatggaggaggatgcgttccaactgcccggactaggtacaccaccgatcacgaaactgactgtcctcgaggaagacgagaagaagcctgtgccctgggaatcacataactctagcgagacatgtggactcccaactctggttcaaacttatgttctgcagggggatccgagagctgtgtccacccaaccacagagccagagcggaacctctgatcaagccggtccacctcggaggtcagcctattttaaagaccagatcatgcttcatcccgctccacctaacggactgctttgtttgttccccataacatctgtcctctag

SEQ ID NO: 218928 - DNA, 2511 bp, synthetic construct
  misc_feature 1..2511: note = Description of Artificial Sequence: Synthetic coding sequence
  source 1..2511: mol_type = other DNA
atggccaggttaggtaattgtagcctaacatgggccgcactcatcatactgcttctgcctggttctctggaggagtgcgggcacatctcagtgagtgccccaatcgtccatctcggggatcccatcaccgcttcttgcatcatcaagcaaaactgcagccatctcgacccagaaccccagattctgtggagactgggtgctgagttacaaccgggtggcaggcaacaaaggctaagcgacggtacacaggagtccattatcacccttcctcatctgaatcacacccaggcttttctgagctgttgtctgaactgggggaattcattgcaaattttggaccaggtggaactgcgggcaggttacccacccgcaattccccataacctttcctgcctgatgaacttgaccacctccagtctgatttgtcagtgggaacccggtcctgagactcatcttcccacaagttttaccctcaaatcatttaagtccaggggcaattgtcagacacagggggattctatcctggactgcgtgcccaaggatggacagagccattgctgtatccctaggaagcaccttctgctctaccagaacatgggcatatgggttcaggccgaaaatgccctaggaactagtatgagtccccagttgtgtctcgacccaatggacgttgtgaaactcgagccgcctatgctgaggaccatggatccttcaccagaggccgctccccctcaggcaggatgcctgcagctttgttgggaaccgtggcaacctggcctgcatataaaccagaaatgcgagctgagacataaacctcagagaggcgaggcctcatgggctctcgtcgggccactacccttagaagcccttcagtatgaattatgtgggttacttcccgcaactgcttatactctccagattagatgcatcagatggccactgccaggccactggtcagactggtcaccttccctcgagttgcgcactaccgaaagagctcccactgtgcgtttggacacttggtggcgacagaggcagctggaccctcgcactgttcagttattctggaagcctgtacccctcgaggaagattccggtaggatacagggctatgtggtttcatggcgcccaagtgggcaggctggtgctatattgcccctctgcaacactaccgaactgtcatgcacctttcacttacctagcgaagctcaggaagtggctctcgtcgcctacaattctgcaggcacctcccgtcccacaccggtcgtcttttcggagagccggggtccagcactcactaggctgcatgccatggccagagatcctcacagtctgtgggtaggttgggagccgcctaacccttggcctcaagggtatgtcattgagtggggactcggtccaccaagcgcctccaattctaataagacgtggcgcatggagcagaatgggagggccacaggatttctcttaaaggagaatatccgccctttccaactgtacgaaatcatcgtgacacccctctaccaggacacaatgggcccttcacaacatgtgtacgcgtattcacaggaaatggcaccatcccacgcaccagagttgcacttgaagcacattggcaaaacgtgggcccagctagaatgggttccagaacccccagagcttggaaaatcccccttgacccactacactattttctggacaaatgctcagaaccagtcctttagcgccattttaaacgcatcttcacgaggctttgtactccacggactggagccagcatctttataccatattcacctgatggctgcctctcaggccggagcaacaaactctacagtgctgacattaatgacactgactcccgaagggagtgagcttcacataattctcggcctgttcggactgctgctgctgctaacttgtctatgcggcacagcctggttgtgctgcagtccaaacaggaaaaaccccctgtggccctcagttcccgaccccgcacacagcagtctgggcagctgggtccccacaatcatggaagaagacgcctttcagctccccggactcggaacccccccaatcactaagctgaccgtgctggaggaagacgagaagaagccagtgccatgggaaagtcataattctagcgaaacttgcggattacctaccttggtgcagacatatgtgctgcaaggagacccaagggccgtctctacacaaccgcagtcacagtcgggtacgtcagatcaggtgctgtacggtcagctgcttggcagcccaacatccccaggccctgggcattacctgagatgcgactcgactcagcccctcctggctgggctgacaccaagtcccaaatcctacgagaatctgtggttccaggcaagtcccctgggtacactcgtgaccccagccccatcacaggaggatgattgtgtatttggacctctgcttaacttccccctcttacaggggatccgcgtacacggcatggaggctctgggttcattttag

SEQ ID NO: 218929 - DNA, 2511 bp, synthetic construct
  misc_feature 1..2511: note = Description of Artificial Sequence: Synthetic coding sequence
  source 1..2511: mol_type = other DNA
atggcacgacttgggaattgctcccttacatgggcagcactcatcatactgctcctgcccggttctcttgaggaatgcggacatatcagtgtgagcgctccaattgttcacctgggcgatcccattaccgcatcatgcatcataaagcagaattgctcgcatctggaccccgagccccagatcctgtggcgcctaggcgcagagttgcagccgggtgggaggcagcagcggctgtctgacgggacacaggagtcgatcatcacactgccccatctgaaccatacacaagcctttctgagctgttgtctcaattggggcaattcactccagatcctagaccaggttgaactaagagccggatatcctcccgctattccccacaatctgagttgcttgatgaatctaacaacaagttcactcatatgccaatgggaaccagggccagagacccatttacctaccagctttactctcaagagtttcaaatcaagggggaactgccagacgcagggcgattcaatcctcgactgcgtcccgaaggacggtcagtcccattgttgtattcctcgcaagcacctcctgctctaccaaaacatgggcatatgggtgcaggcagaaaacgcactcggtaccagcatgtccccacaactgtgcctcgaccctatggacgttgtgaagctggagccccctatgctgaggactatggacccctccccagaggccgcaccccctcaggccggatgtctacagttgtgttgggagccttggcagccaggccttcacatcaaccaaaagtgcgaattgagacacaagccgcagcggggtgaggcatcatgggccctggttgggccattgcctctggaggcgctccagtacgaactgtgtggcctattacctgccacagcatacactctacagatacggtgtataaggtggcctctgcccggacattggtctgactggtcaccctcgctggagcttcgcacaactgaacgggctcctaccgttcgcctcgacacatggtggcggcagagacagctggatcccaggactgttcagttgttttggaaacccgtgcccttggaagaggacagcgggaggatacaggggtacgtggtttcatggagaccaagtggtcaagctggggcaatattgccgctgtgcaatacaacagaacttagttgcacgttccatttgccctctgaggcgcaggaagtggccctagtggcttataacagtgcaggaactagcaggccgacccctgtagtttttagtgagagtcgcggtccagccctaacccgcttgcatgctatggcaagggatcctcactccttatgggtaggatgggagccaccgaatccttggccccaggggtatgtaattgagtgggggctgggccctccatccgcttctaacagcaataaaacatggcggatggaacagaacgggagagccactggatttctgctgaaagagaacattagaccttttcagctttacgagatcatcgttaccccactgtaccaagacaccatgggcccaagccagcatgtttatgcttatagccaagaaatggccccttctcatgcacctgagcttcacctgaaacacattgggaagacttgggcccaactcgaatgggtccccgagccccctgagttgggtaaatcccctctgactcactatacaattttttggacaaacgctcagaaccagagctttagtgctattcttaacgcatcctcacgcggtttcgttctgcatgggcttgaaccagcaagtctatatcacatccacctgatggcagcctctcaggctggagccaccaattcaactgttctgacacttatgacattaacccctgaaggcagcgagctgcacattatccttggtctctttggccttctcttgctgctgacatgcctgtgcggcacagcatggctgtgttgtagcccgaatcgcaagaatccgctgtggcctagcgtgcccgacccagcacactcttctctgggctcctgggtgccgaccattatggaggaggacgctttccagctgccgggtctggggacgccccctatcacgaaactgacagtgcttgaagaagatgagaagaagcccgtaccatgggagagtcataatagctccgagacctgcgggctgcccaccttggtgcagacgtacgtgctccagggcgatccgagagccgtttctacacagccacagtcccagagcggtacttcagaccaggtcctgtacgggcagttgctggggagccctacctcccccggaccaggacattatttgcggtgtgactccactcagccactcctcgcgggattgactccctcccctaagtcatatgaaaacctgtggttccaagcgagtccgcttggaaccctcgttactcctgctcccagccaggaggacgattgtgtgtttgggccactcctgaacttcccccttctgcaaggaattagagtgcacggaatggaagcccttggctcattttag

SEQ ID NO: 218930 - DNA, 2592 bp, synthetic construct
  misc_feature 1..2592: note = Description of Artificial Sequence: Synthetic coding sequence
  source 1..2592: mol_type = other DNA
atggcccgtctcggtaactgctccctgacatgggccgcattaattattttattgttgcccggttctctcgaggagtgtgggcatatttcagtgtcagcaccaatagtgcaccttggcgaccccatcactgccagctgcattattaagcaaaattgcagccacctggaccccgaaccccagatactgtggcggctgggagctgaactgcagccgggtggacgccagcagagactctcggacggaactcaggaatccattattaccctcccgcacttgaatcacactcaggctttcctgagttgctgtttgaactggggaaacagtctgcagattttagaccaggtggagttgcgggctggttacccgcctgctattccacacaatctctcatgcctgatgaatcttaccactagtagcttgatctgtcaatgggaacccggacccgagacccatctgccaactagctttaccctcaagagttttaagtctcgcggaaattgccagacacagggcgatagcatactggattgcgtccccaaggacgggcaatcgcactgctgcatacctcggaaacacttactgttgtaccagaacatgggaatttgggtccaagctgaaaatgccttgggcacatctatgtccccccagttatgcctcgatcccatggacgtggtcaaacttgagcctcccatgctgagaacgatggaccctagccccgaggctgccccaccacaggccggatgtcttcagttatgttgggagccttggcagcctgggctgcatatcaatcagaaatgcgagctgaggcataaaccccagcgtggcgaagccagctgggccctggtgggtccactgccacttgaagccctccagtatgaactgtgtggcctgctgccagctacggcctatactctacagatcagatgcattaggtggcctctaccaggtcactggagtgattggtctccgtctctagaactgcggaccaccgaacgcgcacctaccgttcgactggatacttggtggcggcagcgccagctcgatccacgtacagtgcagctgttctggaaaccggtgcccctggaggaagactcaggcaggatccaaggctacgtcgtgtcttggagaccctccggacaggctggggcaattctgccattatgcaataccacggagctgtcctgtacttttcatctgccctccgaagcccaggaagttgccctggttgcctacaattccgccggaactagccgccctacccccgttgtgttctctgagtccagaggccctgccctaacacgactgcacgcgatggctcgcgacccacacagcttgtgggtggggtgggagccacctaatccgtggccccagggttacgtaatcgaatgggggctgggcccaccatctgcaagtaactctaacaagacctggcgaatggaacagaacggccgagctactggattcttgctgaaggaaaacattagaccctttcagctttacgaaattatcgtgacccctctctatcaggatactatgggacccagccagcatgtgtacgcgtatagccaggagatggctccaagccatgctcccgaactgcatttgaagcacatcggaaaaacctgggctcagcttgaatgggtccccgagccgccagaactgggcaagtctccgttaacccattatacaatcttctggacgaatgcccagaaccagtccttttccgctatcctgaatgcatcaagccggggatttgtgcttcatgggctggaaccggcttcactctaccatatccacctcatggcagcttcccaagccggtgcgactaactctaccgtgctgacactcatgactctgacacctgagggatcagagctgcacataatactgggcctgttcgggctgttgctgctgttgacctgcttgtgcggtacggcctggctgtgttgttcaccaaatcggaagaatcccctctggccaagtgttcctgaccctgcccattcatcgttagggtcatgggtgcccacaatcatggaggagctccccggaccaagacagggtcagtggcttggtcagactagtgaaatgtctcgagccttaacccctcatccctgtgttcaggacgccttccagctgcccggactaggcaccccacctattaccaagctcacagtgctcgaagaagatgagaagaaaccagtcccctgggaatcgcataatagctctgaaacctgtgggttgccgactctggtccagacttacgtgctgcagggagacccacgcgctgtgagtactcaacctcagtcacaatcagggacatcggaccaggtgctatacggccagttactggggagcccaactagccccggtccaggccactacctgcgctgtgacagcacccagccactgctcgctggtttgaccccaagcccgaagtcttacgagaacctctggttccaggcctcccccctgggcaccttagtgaccccagccccaagccaggaagatgactgcgtgttcggacccctgctgaacttccctctcttacaaggtattagagtgcacggaatggaggcactcgggtctttctag

SEQ ID NO: 218931 - DNA, 1167 bp, synthetic construct
  misc_feature 1..1167: note = Description of Artificial Sequence: Synthetic coding sequence
  source 1..1167: mol_type = other DNA
taaacgtcaagaccaacccccgtggtcttcagcgagagtcgcggtccagccttaactcgcctgcacgcaatggcaagggacccccatagcctttgggtcgggtgggagccaccaaatccatggccccaaggctatgtcatcgaatggggtctcggcccaccatctgcctctaattcaaataaaacgtggaggatggagcagaacggtcgcgctactgggtttttactaaaggcaccatcgcacgccccagagctccacctgaaacacataggcaagacctgggcccaactcgagtgggtgcccgagccacctgagcttggcaaaagcccactgactcactacacaattttttggacaaacgcgcaaaatcagtctttttctgctattctgaacgccagctcgcggggttttgtgctacacggacttgagccagctagcctctaccacattcatcttatggccgcttcccaggcaggtgcgacaaactctactgtcctgaccctaatgaccctgactcccgagggtagtgagttgcacatcatcctgggactgtttggcctgcttcttcttctaacatgtctgtgtgggacagcgtggttatgctgttcccccaaccgaaagaatccactctggcccagcgtgccagaccctgctcattccagtctaggaagctgggtccccactatcatggaggaggatgctttccagctgccgggtctgggaacgcccccaattaccaaacttaccgtgcttgaggaagacgagaagaaacccgttccttgggaatcacacaattccagcgagacatgtggcctcccgactctggtccagacttatgtacttcaaggagaccctcgggctgtgtctactcagccacagtcccagtccggcacctcagatcaggtcttatacggccagttactcggcagccccacttctcccggacccggacactacttgcgctgcgattccactcagcccctattggccggacttacccccagcccaaaaagctacgaaaacctgtggtttcaggccagcccactggggacactggtgacccctgccccttctcaggaggatgactgcgtttttgggccactgttgaatttccccttgttgcaggggatcagagtgcatggaatggaagccctgggttctttttag

SEQ ID NO: 218932 - DNA, 66 bp, synthetic construct
  misc_feature 1..66: note = Description of Artificial Sequence: Synthetic coding sequence
  source 1..66: mol_type = other DNA
atggcgagactaggtaattgtagcctcacctgggctgctcttatcattcttttgctccctggatag

SEQ ID NO: 218933 - DNA, 675 bp, synthetic construct
  misc_feature 1..675: note = Description of Artificial Sequence: Synthetic coding sequence
  source 1..675: mol_type = other DNA
atgagcgccgtgggtgcagcaacaccttatctgcatcaccctggcgattcacattccggcagagtatcttttttaggcgcacagctgcctcccgaagttgccgctatggccaggctcttgggcgacctggacagatcaacctttcggaaacttcttaaattcgttgtctcgagcctccagggagaggattgtcgcgaggccgtgcagcgtctgggggtgtccgcaaacctcccggaagagcagttgggggcactcctggccggaatgcacacattgctgcaacaggctcttaggctgccccctacctctctgaagcctgatacattccgtgaccagttacaggaactctgcatacctcaggatcttgtcggtgacttagctagcgtggtgttcggaagccagcgccctctccttgactccgtggcgcagcagcagggcgcatggttgccacacgtagccgattttcgctggagagttgatgttgccatctccaccagcgccctggctaggagcctgcagccgtccgtgctgatgcagcttaaactgtctgacggatccgcctacagattcgaggttcctactgccaaatttcaagagctgcgctacagcgttgcgctcgtcctcaaggagatggctgatctggagaagagatgtgagaggcgcttacaggactag

SEQ ID NO: 218934 - DNA, 675 bp, synthetic construct
  misc_feature 1..675: note = Description of Artificial Sequence: Synthetic coding sequence
  source 1..675: mol_type = other DNA
atgagcgctgtaggagccgctactccctacctccaccacccaggcgatagtcatagcgggagggtctcatttttgggggcacagttgccgcctgaagtggcggcaatggctcgcttgctcggcgatctggatcgatctacattcagaaagctcctgaaatttgtagttagcagccttcaaggggaggactgcagggaagctgtgcagcgtcttggcgtgtccgccaatcttcctgaggagcaactaggcgctctgctggcagggatgcatactcttctacagcaggccctccgattgccacccacctcccttaagcctgatacattcagagatcaattacaagagttgtgtattccacaagatttggtcggcgacctcgctagcgtcgtcttcggttcacagagaccattgttggactcagtcgcccagcagcaaggggcttggctgcctcacgtcgccgacttccgctggcgcgtggacgtggctatatccacatcggcacttgctaggagcctgcagcctagcgttctgatgcagttgaaactgtcagacggatctgcttaccgatttgaagtaccgaccgccaagttccaggaactccggtacagcgtggctctggtcctaaaggaaatggccgacttagaaaaaagatgcgagaggagactgcaggattag

SEQ ID NO: 218935 - DNA, 675 bp, synthetic construct
  misc_feature 1..675: note = Description of Artificial Sequence: Synthetic coding sequence
  source 1..675: mol_type = other DNA
atgagcgcagtgggcgcagccaccccttacctccaccatcccggtgattctcattccggcagagtcagtttcctgggagcccagctccccccagaggtggctgcaatggccagattgctgggcgacctggacaggagcactttcagaaagttgcttaagtttgtggtgagttccctccagggtgaagattgcagggaagcagttcagcgactcggcgtctctgccaacctgcctgaagagcaacttggggcactgctggcaggcatgcacacgctcctgcagcaggccctccggttgccaccaacctcccttaaaccggatacatttagagatcagttacaggagctatgcatcccccaggatcttgttggggacctggcctctgttgtgttcggcagtcaacgccctctgctcgactccgtcgcccagcagcagggggcatggctgccccatgtggccgattttcggtggcgagtggacgtcgcaatcagcactagcgctctggcccgtagcctgcagccttctgtcctgatgcagctcaagctgagcgacgggtcagcataccggttcgaagttccaaccgccaagttccaagaacttcggtattctgtcgcgctggtcttaaaagagatggcagatctcgagaaaaggtgcgagcggagactacaggactag

SEQ ID NO: 218936 - DNA, 297 bp, synthetic construct
  misc_feature 1..297: note = Description of Artificial Sequence: Synthetic coding sequence
  source 1..297: mol_type = other DNA
atggaagcttcgtccgaaccgccactcgacgctaaatcggacgtgactaatcagctagtggatttccagtggaaacttggcatggctgtatcatccgatacgtgccggtcgttgaaatacccctacgttgctgtgatgcttaaggtggctgaccattctgggcaggtaaagacgaagtgttttgagatgaccataccacaattccagccgcagctcctcgccacaagcagtctgctatctgcctccaatttctataggcagttcaaagagatcgccgctgtgatcgagaccgtttag

SEQ ID NO: 218937 - DNA, 258 bp, synthetic construct
  misc_feature 1..258: note = Description of Artificial Sequence: Synthetic coding sequence
  source 1..258: mol_type = other DNA
atggaggcttcaagcgaaccacccctcgatgctaagagcgatgtcacgaaccagttggtagactttcagtggaagctaggcatggccgtgagctccgacacatgtcggtccctcaagtacccatacgttgctgtgatgttgaaggtagctgaccattccggccaggtgaaaacaaaatgttttgagatgaccatcccccagtttcagaacttttaccggcagttcaaggaaatcgcagcagtcatcgagaccgtctag

SEQ ID NO: 218938 - DNA, 258 bp, synthetic construct
  misc_feature 1..258: note = Description of Artificial Sequence: Synthetic coding sequence
  source 1..258: mol_type = other DNA
atggaagcatctagcgaacctccgctggacgctaagagtgatgtaacgaatcagctggtcgatttccagtggaaactaggaatggctgttagtagcgacacatgcagaagcctcaaatacccctatgtggctgtgatgctgaaagtggccgaccatagcggccaggtgaagaccaagtgttttgagatgactattccacagttccagaacttctatagacagtttaaagagatcgccgcagttatcgagactgtgtag

SEQ ID NO: 218939 - DNA, 7469 bp, synthetic construct
  misc_feature 1..7469: note = Description of Artificial Sequence: Synthetic coding sequence
  source 1..7469: mol_type = other DNA
atgggagcatcttctccacggtcccccgagcctgtgggacctcccgctccaggtctacctttctgctgcggaggctccctcctagcagttgtagtgttgctcgcgttgcccgtagcctggggccagtgtaacgcacctgaatggttaccattcgcaaggcccaccaaccttacggacgaattcgaatttccaatcggaacgtatctgaattacgagtgtagaccgggatatagtggacgacctttcagcatcatatgtctaaaaaattcggtttggaccggggcaaaggacagatgtagacgtaagagctgcaggaatccgccagacccagtcaacggaatggtgcacgtgattaaagggattcagttcgggagccagattaaatatagctgtacaaaagggtatcgcttgatcggctcaagtagcgccacatgcatcatttctggcgataccgttatctgggataacgagacgcccatttgcgatcgaatcccctgtggcctcccacctacgatcacgaatggggattttatctccacaaatcgggaaaatttccattacggctctgttgtcacctataggtgtaatcctgggtctgggggaaggaaggttttcgaacttgttggggaaccatcaatatattgtactagcaacgatgaccaggtggggatatggtccggacccgcaccgcagtgcattatccctaataagtgcaccccacccaatgtggaaaatgggatccttgtcagcgataacagatcccttttcagtttgaatgaggtggtggagtttcgctgtcagcccggtttcgtgatgaagggaccaaggcgcgtgaagtgtcaggctctcaacaagtgggagcccgagctgccgtcatgctctcgggtgtgccagcctccgcctgacgttttgcacgccgaacgcacccagcgggataaggataactttagcccaggccaggaagtcttttacagctgcgaacctgggtacgacctccggggtgctgccagtatgcgctgtacgccacagggcgattggagccccgctgcccctacctgtgaggtgaagtcatgcgacgacttcatgggccagctcctgaatggccgtgtcttgtttccagtcaacctgcagctcggggcaaaggttgatttcgtgtgtgatgagggctttcagctgaagggcagttccgcctcctactgtgtgctggcaggtatggaaagcctgtggaacagctcagttccggtatgtgaacaaatcttctgtccatccccccctgtgatacccaatggtaggcacaccggaaagcccctggaggtgttccccttcggcaagaccgttaactatacctgcgacccccaccccgatagggggacatcattcgacctcataggcgagtctacaatacggtgtacgtcagatccccagggaaacggcgtatggtcttcaccggcaccaaggtgcgggatcctgggtcactgtcaagcaccagatcacttcctcttcgcaaaactgaagacacagacaaatgctagtgacttccccatcggaacatccctgaagtatgagtgtaggccagaatactacggacgcccttttagcataacatgcctcgacaatcttgtgtggagttccccgaaggatgtgtgtaaaagaaaatcatgcaagacaccaccagatcccgtgaatggcatggtacatgtgattacagacatacaagtgggttcaagaattaattacagttgcacaacaggacaccggctgatcggtcattcctcagctgaatgcatcttgtctgggaacgcagctcattggagtactaagcccccaatctgtcagcgaattccctgcggtttaccccctaccatagctaatggggactttatctcgactaatcgcgagaactttcattatggctcggtggtcacttatcggtgcaaccccggaagcggcggacgcaaggtgtttgagctggtgggggagccttcaatctactgtacctcaaatgatgatcaagtcgggatatggagcgggcctgcaccacagtgtatcatcccaaacaaatgcactccaccaaatgtggagaacggaatcctcgtctctgacaacagaagcctgtttagcctcaatgaagtggtggaattccggtgccagccagggttcgtaatgaaaggaccacggagggtgaagtgccaagccctcaataagtgggaacccgaacttccttcgtgctcacgagtgtgccagcccccacctgatgttcttcacgcagagaggacacaaagggacaaggacaacttctctccaggtcaggaagtattctactcttgtgagcccggatatgacctgaggggggcagccagcatgaggtgtacccctcagggcgactggagtccggcagcaccaacatgtgaagtgaagtcctgcgacgacttcatgggccagttactcaacgggagagtgctatttcccgttaatcttcagttaggggcaaaggtcgactttgtgtgcgacgaaggttttcagctgaaaggatctagcgcttcttattgtgtgctcgctggaatggagagtctgtggaattcttctgtgcccgtatgtgagcaaatattctgcccttccccccctgtcatacccaatggcagacacacaggcaagccactggaagtattcccatttggcaaaactgtaaactatacgtgtgatcctcaccccgataggggaactagcttcgacctcattggcgaatcaaccatccgttgcacctccgatccccagggaaatggagtgtggtccagtccagcgccaagatgcggtatcctcggccactgccaggcaccagaccactttttgttcgcaaaattgaagacacagactaatgcgagtgacttcccaatcggcaccagtctcaagtacgaatgccgccctgagtactatggccgacccttcagtatcacttgcctagataaccttgtgtggtcttcaccgaaagacgtgtgcaagcggaaatcgtgcaagacccctcccgatcctgtgaacgggatggtccacgttatcactgatattcaagtgggtagtaggataaactacagctgcacaacgggacacaggttaatcggacactcaagcgccgagtgcatcctgtctggcaatgccgcacactggtccaccaaaccaccgatttgtcagcgcatcccgtgcggtctccctccaactattgccaacggggactttatctccactaaccgcgagaacttccactacggtagtgttgtgacttatcgttgcaaccctggtagtggaggcaggaaagtgttcgagctggttggcgagccaagtatttactgcaccagcaacgacgatcaggtgggtatctggagcggaccagcgcctcagtgcattattccaaacaagtgtacacctccaaatgttgagaatggaatccttgtgtccgacaatcgaagcctcttttctttaaatgaagtggtcgaattcagatgccaacccggttttgtcatgaaggggccacggagagtgaaatgtcaggccctgaacaaatgggagcctgaactcccctcatgtagcagggtgtgtcagcccccaccggatgttctccatgcagagcgcacccagcgcgataaggataattttagccccggacaagaagtgttttatagctgcgagcctggctatgatcttaggggtgcggcatctatgcggtgcactcctcaaggtgattggtcgccagctgcaccaacctgtgaggtgaagtcctgcgatgacttcatgggtcagcttctgaacggccgagtactgttccctgtcaacctacagttaggggcaaaggttgacttcgtgtgtgatgagggcttccagttgaaaggatccagtgccagctattgcgtgctggcaggtatggagagcttatggaactctagtgttcctgtgtgcgagcagatcttctgcccaagtccccctgttatccctaacgggcgtcacacaggtaagcccctggaagttttcccatttggcaaagctgttaattatacctgtgatcctcatccagaccgcggtacgagctttgaccttattggggagtccaccattcgctgcacctcagatcctcagggcaatggcgtgtggtccagcccagctcccaggtgtggcatcctcggtcactgtcaagcgccagatcattttttattcgccaagttaaaaacccagacaaacgcgagcgactttcccatcggtaccagtcttaaatatgagtgtcggccagaatattatggtcgcccattctcgataacatgtctggataatctcgtttggtcgagccccaaggacgtatgtaaacgaaaatcctgtaaaacacccccagatccggtgaacgggatggtccacgtgatcaccgatatccaggtcgggagtagaattaactactcttgcaccaccggccacaggctcatcggacactcatcagccgaatgtatcttgtctgggaacacagcccattggtccacgaagccccctatctgtcagagaattccatgcggcctacctcctactattgcaaacggcgactttatctccaccaaccgggagaatttccattatgggagcgtggttacatatcgttgtaacttggggtcacgcggacgtaaggtcttcgaactggtcggagaaccatcgatctactgcacatctaatgatgaccaagtgggcatatggagcggacctgccccacagtgtattatccctaacaagtgcaccccccctaatgtcgaaaatggcatactcgtttccgataatagatcactgttctcattaaacgaagttgtggaatttagatgtcagcccggttttgtgatgaagggtccacgccgtgtgaagtgtcaagcactcaataaatgggaacctgagctgcccagctgttcccgcgtgtgccagccccctccggaaattctgcatggcgaacatactcccagccaccaggataatttctcgcccggacaggaggtattttacagctgtgagcctggatatgacctgcgcggagctgctagcctgcattgcactcctcagggcgactggagtcccgaggcccctcggtgcgctgtcaaatcatgtgatgatttccttggccagctaccccatggaagggtattgtttccactgaacctacagttaggcgcaaaagtaagttttgtgtgtgatgaggggttccggctgaaagggtcttctgtgtcgcattgtgtgctggttggaatgcgaagtctatggaacaattcagtccctgtctgcgagcatatcttctgcccaaatcccccagctattcttaacgggcgtcacactggaactccatccggcgacatcccatacggcaaagagatctcttatacctgtgatccacatccagatcgcggtatgacattcaatttgataggcgagtcaactataaggtgcacctcggacccccacggcaacggggtgtggtcgtcgccggctcccagatgcgaactgtccgtgagggcaggccattgtaaaacaccagagcagtttccattcgcaagtcctacaatccctatcaacgacttcgagtttccggtcgggacttccctgaactatgagtgtagaccaggctactttggtaaaatgttctcaattagctgccttgaaaatctggtgtggagtagcgtggaggacaattgccgacgcaagagctgcggacctccgcctgagcctttcaatggcatggtccatattaatacggacacccagttcggatccacggttaactattcctgcaacgagggttttaggctcatcgggtccccctcgacaacctgtctggtatcgggcaacaatgttacatgggataagaaggccccaatctgtgagataatttcgtgcgagcccccacctaccattagtaacggagatttctactctaataatcgtacatccttccataacggaacggtggtaacttaccagtgccacaccggcccagacggagagcagctgttcgagctggttggtgagcgcagcatctactgtacctctaaggatgatcaggtaggcgtgtggagctcgccccctcccaggtgcatcagcacaaacaagtgcaccgcccctgaggtggagaatgccatccgcgtgcctggtaaccgatcttttttcacattgacagaaataattcgtttccgctgtcaacccggtttcgtgatggttgggagccatactgtgcagtgtcagacgaacggtcgctgggggccaaagctgccgcattgctccagggtatgccagcctcctccagagatcctgcatggcgagcacactttaagccatcaggacaacttcagcccgggacaggaagtcttctattcctgtgaacccagttacgaccttcgcggagccgcttcacttcattgcactccccagggtgactggagccctgaggcccctcgatgcaccgtgaagtcttgcgacgattttctaggacaactgccccatggcagagtgttgctccccctcaatttgcagttgggggcaaaggtttcattcgtatgtgacgaggggttccgactcaagggaagaagcgcatcacactgcgtgctggccggtatgaaggccttgtggaattcaagtgtgccagtttgcgagcagatcttctgccccaaccctcccgctatcctcaatggcaggcacaccggtactccgttcggcgatataccctacggcaaagaaataagctatgcatgcgatactcatcccgacaggggtatgaccttcaacctgattggtgagtcgtcgattcgctgtacttccgacccccagggcaatggagtatggtcctccccggctcccagatgtgagctgagcgtgcccgctgcctgccctcaccctccaaaaattcaaaacggacactacattggaggccacgtttcactgtacctcccagggatgaccatatcttacatatgcgaccccggatacctgctggtgggcaaaggattcattttttgcacagaccagggaatctggtctcagctagaccactactgtaaggaggttaattgttcttttcccctgttcatgaacggaatctcaaaggaactggagatgaaaaaggtgtaccactatggagattatgtcacattgaagtgtgaggatggctacaccctggagggctccccttggagtcagtgccaggctgatgacagatgggatccaccactggcgaagtgtaccagccgcacccacgacgctctcattgtaggaaccctgtccgggaccatcttttttattctgctgatcatatttctgtcatggatcatcctcaagcacagaaaaggcaataatgcccacgaaaatcctaaagaggtagctatacatctacattcccagggaggttcaagtgtgcaccccaggactctccagacaaacgaggaaaacagtcgagttctcccata

SEQ ID NO: 218940 - DNA, 6119 bp, synthetic construct
  misc_feature 1..6119: note = Description of Artificial Sequence: Synthetic coding sequence
  source 1..6119: mol_type = other DNA
atgggagcctcgtcccccagaagtcctgagcccgtgggcccacccgcacctggactcccattttgctgcgggggttctctgcttgctgtggtggtgttactggcactgcccgtggcctggggccagtgtaatgctccagaatggctaccttttgccaggcctaccaacctcacagatgagttcgagttccctataggaacttacctgaactacgaatgccgtcccggatattcaggacgccctttcagtataatttgtctaaagaactcagtatggaccggggctaaggatcggtgtcgcagaaagtcctgcaggaatccccctgatccggtgaatggcatggtgcatgtcattaaggggatccaattcggctctcaaatcaaatatagctgtacgaagggctaccgccttatcggtagctcatccgcgacttgtattatttccggggacacggtcatctgggacaatgaaaccccaatatgcgatagaattccctgtggccttccgcctacgatcgctaacggagactttatatcaactaatcgcgagaatttccactacgggtctgtcgtcacataccggtgtaatccaggatctggcggacgcaaggtcttcgagctcgtgggtgagccctccatatactgcacatctaatgatgaccaggttggcatctggagcggtcccgcaccgcagtgcattattcccaacaaatgcacacccccaaacgtggagaatggtatacttgtgtccgataaccgtagcctgttttccctgaacgaagttgtagagttccgctgtcagcccggtttcgtgatgaagggtcctcgacgggtcaagtgccaggccctgaataagtgggaacctgaactcccctcctgcagtagagtctgccagccccctcccgacgtattgcatgctgagagaacccaacgcgataaggacaacttttctcccggacaagaggtgttttactcgtgtgagcctgggtacgacctccgcggagctgcatcgatgcgatgcaccccccagggggactggtctcccgcagctcccacttgtgaagtgaagagctgtgacgatttcatggggcagctgttaaatggaagggtgctgtttcctgtaaacctgcaactgggagctaaagtagatttcgtgtgcgacgaggggtttcagctcaagggcagcagcgcttcttactgtgttctggcagggatggaaagtttatggaactcaagtgtgccagtctgtgagcaaatcttctgcccgagtccccctgtgatccctaacggaagacacaccggcaagccactggaggtttttccttttgggaagacagtaaattacacatgcgacccacacccagatcgtgggacttcttttgaccttatcggggaatctactatcaggtgtacaagcgacccacagggtaatggcgtatggagtagccccgctcctcggtgtgggattctggggcactgccaggcgcctgatcacttcctgttcgccaagcttaagacacagactaacgccagtgactttccaatcggaacctcactaaagtatgagtgcaggccggagtactacggcagaccatttagcatcacatgtttagacaatctcgtgtggtcatccccaaaagatgtttgtaagaggaagagttgcaagacacccccagaccccgtgaatggaatggtgcacgtgatcaccgatatacaggtgggaagcagaataaattactcttgtacaaccgggcacaggctcattgggcacagctctgcagagtgcatcctaagcggaaacgcagcacactggagtaccaagcctcccatttgtcagcgaataccctgtggacttccacccaccattgccaatggcgatttcatttcaacaaaccgggaaaatttccactacggctccgtggtgacctatcgctgcaacccaggatcagggggaagaaaagtgttcgaactggtcggtgaaccctctatttattgcacctctaatgacgaccaggtgggaatttggtccggccctgccccacagtgtattattcccaataaatgtacaccgccaaatgtggagaacggaattctagtgtctgataacaggagtctgttctccctgaacgaagtcgtggagtttcggtgccagcctggcttcgtgatgaaaggccctcggagggtgaagtgccaagcactaaacaaatgggagcccgagctaccctcatgctctcgcgtctgccagccaccccctgatgttcttcatgctgaaagaacccagcgtgacaaggataacttctcacccggacaggaagtattctattcttgcgagcctggctatgatctacgcggtgccgcttcaatgcgctgtaccccgcagggagattggtcccctgccgcaccaacgtgtgaggtgaagtcctgcgatgattttatgggccaactgctcaacggacgcgtactgttcccggtaaacctgcaactgggggctaaagtcgactttgtttgcgatgaagggtttcagttgaagggctcgagtgcctcttattgtgtcctggctggaatggaaagtttatggaacagtagcgttccggtctgcgagcagatcttctgtccatctccacctgttataccaaatggtcgacacaccggcaaaccattggaggtgttcccatttggaaaagccgtgaactatacctgtgacccccacccagatcgcggaacctcgtttgatctcatcggggaaagtaccatccgctgtacttcagatccacagggtaacggggtgtggtcttcccctgcacccaggtgcgggattctagggcactgccaggccccagatcacttcctgtttgccaagttgaagacgcaaactaacgcatctgacttccctatcggaacatcccttaaatatgagtgtcggccagagtactacgggagacccttttctataacctgcctcgataatctcgtctggagcagcccaaaagacgtgtgtaagaggaagagctgcaagacacccccagatcctgttaatggcatggtccacgtgatcactgatatacaggttggtagcagaattaactactcttgtacaaccggacacagactcattggccattctagtgcagagtgcatcctgtcaggcaacacagcccattggagcactaagcctcccatttgtcagagaatcccatgtggattgcccccaactattgcaaacggagactttatttccacgaatcgcgagaacttccactacggctctgtcgttacgtatcgctgcaatcttgggagccgcggtcggaaggtcttcgaactggtgggcgagccttcaatctattgcacctcaaacgacgatcaggtaggaatctggtcgggtcctgctcctcagtgcattattccaaataagtgtactcccccaaatgtcgagaacggtattctcgtatccgataacagatcattgttcagtctgaacgaagtggttgagtttaggtgccaacccggtttcgtgatgaaggggccacggagggtaaaatgccaggccctgaacaagtgggagcccgagctaccttcatgctcccgcgtatgtcagcctcctcctgagatcctgcacggcgaacacacaccgtctcatcaggacaacttttctcctggacaggaggtcttctatagttgtgagcccggatacgacctgcgaggggcagcgagcttgcattgtaccccacagggtgattggtctcctgaggctcctcgatgtgctgtgaaatcatgcgatgactttctgggccagctcccacatgggagggtgctgttcccactcaacctacagctgggcgcaaaggtcagcttcgtctgtgacgaagggtttcgccttaagggcagttccgtttcgcattgcgttctggtcggcatgcgctcattgtggaacaactcagtaccagtatgcgaacacattttttgcccgaacccacccgcaatcctgaatggccgtcatacgggcactccctctggggacattccatatggaaaagagatctcctacacctgtgatccccacccggacagaggaatgacatttaatcttatcggggaatccactatcaggtgcacgagcgatccccatgggaacggtgtgtggtcctctcctgccccaagatgcgaactgtcggtaagggccggacactgtaaaacacctgagcagttcccttttgcctcccccacgataccaattaacgatttcgaattccccgtgggaaccagcctgaactatgagtgtcggcctgggtacttcggcaagatgttctcaatttcatgtctggagaacctggtgtggagctctgtcgaggacaactgtcggaggaaatcttgcggcccacctcctgagccattcaacggcatggtgcacatcaacaccgatacccaatttggatccaccgtcaattactcatgcaacgagggattccggctgatagggagccctagcacaacatgtctggttagcggcaataatgtgacgtgggataagaaggcacccatttgcgaaataattagttgtgagcctcccccaaccatctccaatggtgatttttactccaacaataggaccagcttccataatggcaccgtggtgacttatcagtgccacacaggccctgatggggagcaacttttcgagctggtgggagagagatcaatctattgtacaagtaaggatgatcaggttggggtatggtcgtctccaccaccaaggtgtataagtaccaacaagtgcacagcaccagaagtggaaaacgccataagggtgcccggtaaccgtagtttctttacacttaccgagatcataaggtttcgatgccagccagggtttgttatggtcggtagccacactgttcaatgccagactaatggccgttggggcccaaagcttcctcactgctcacgcgtctgccagccgcctccggagatcctccacggcgagcacaccttgagccatcaggacaactttagccccggtcaggaggtcttttactcttgcgaaccgtcttacgacctgcgcggagcagcaagcctccactgcacccctcagggcgattggtcacccgaggcgcctagatgcacggtgaagagctgtgatgactttctcggccagctgccacacggccgagtactgcttcctctgaacctgcagctaggagctaaggtgagcttcgtgtgcgatgagggctttaggttaaaaggacgcagcgcttcccattgcgttttggccggtatgaaggccctgtggaactcatccgtcccagtgtgcgagcagatcttttgtcctaatcctcctgctatacttaatgggcgacataccggaacaccctttggagacattccctacggaaaggagatcagctacgcgtgcgacacccatcctgatagaggcatgacattcaatctgattggcgaatcctcaattaggtgtactagcgatccccagggaaatggtgtgtggagcagtccggcaccacggtgtgaattgagcgtcccagctgcctgcccacacccaccaaaaatccagaatggacattatatcggcggtcatgtaagtctttacctgcccggtatgactatctcttatatatgcgatcctggatatctgctggtgggcaaaggattcatcttttgcaccgatcagggaatttggagtcagctcgaccactactgtaaggaggtcaactgcagctttcctctattcatgaacggcatcagtaaggaactggagatgaagaaagtttatcattacggcgactatgtcacactgaagtgcgaagatggatacacattagaagggagcccatggtctcagtgccaggcagacgatcgctgggaccctccgctggctaagtgcacctctcggacccacgatgcactgattgttggaactctgagcggcacaatcttctttatcctcctgatcatattcctctcctggattattctgaagcataggaagggcaacaacgcgcatgagaatcctaaggaggtggcgatccatttgcactctcagggtggatcttctgtgcatcctaggaccctgcagaccaacgaagaaaacagcagagtcctgcctta

SEQ ID NO: 218941 - DNA, 6119 bp, synthetic construct
  misc_feature 1..6119: note = Description of Artificial Sequence: Synthetic coding sequence
  source 1..6119: mol_type = other DNA
atgggggcatcatcacctcgctcccctgagcctgttggtccccctgccccaggtttacccttttgttgcggcggttctctgctcgcagtggtggttcttctcgccttgcctgtggcatggggccagtgtaatgccccagagtggttaccttttgctcgcccaacaaatctaaccgacgagtttgagtttcccatcgggacatacttaaattacgaatgtagaccagggtatagtggaaggcccttctccatcatctgtttgaaaaatagcgtctggacaggagcaaaggataggtgtcggaggaaatcctgtagaaaccccccagatcccgtgaacggaatggtgcacgtgatcaaagggatccagttcgggtcacagatcaaatatagctgcacgaagggatacaggctcattgggtcttcttccgctacatgcatcatcagcggagatactgttatctgggacaacgaaactccgatttgcgatcgaatcccatgcggtctgcctcctacgattacaaatggggacttcatcagcactaatcgagaaaatttccactacggttcagtcgtgacctaccgctgtaaccccggaagtggcggacgcaaggtgttcgaactcgttggagagccctctatctactgcacttcaaacgacgaccaggtgggaatttggagcggacccgcaccccagtgcattattcctaacaagtgtacaccacccaacgtagagaatggcatactggtttctgataacagatcactcttttcgctcaatgaggtcgttgaattcaggtgtcagcctggcttcgtaatgaaaggaccacgcagagtgaaatgccaagctttgaacaaatgggagcctgaactgccttcttgctcacgggtgtgccaaccgccacctgacgtcctgcacgctgagcgcacgcagcgcgacaaagataatttcagccctggacaggaggttttctattcctgtgagcccggttatgatttgcgtggcgctgcctcgatgaggtgcacaccacagggcgactggagtcccgcagcgcctacttgcgaggtcaagtcgtgtgatgacttcatggggcagctgctcaacggtagagtgttatttcccgttaatctgcagttgggagcaaaagttgactttgtctgcgacgagggcttccagttgaagggttcctccgcatcgtactgtgtcctggccggaatggagtcactctggaattccagtgttcctgtttgtgagcagatcttctgtccttctccgccagtaatcccaaatggcagacacacagggaagccactggaagtttttcctttcggcaagactgtcaactacacatgtgatcctcatccagaccgtggtacatcttttgatctcatcggtgagagcacgatacgctgtacatccgacccccaggggaatggcgtctggtccagcccagctcccagatgtggcattttggggcactgtcaagccccagatcatttcttgttcgccaaattgaaaacgcagacaaatgcctctgacttcccaatcgggaccagcttgaaatatgagtgcagaccagagtactatgggaggcccttttccatcacctgcttagacaacctggtatggagctctccaaaagatgtgtgcaaacggaagtcttgcaagaccccaccggatccagtgaatggaatggtgcacgtcatcacggacatccaagtgggcagtcgcattaactattcctgtacaacggggcacaggttgataggccacagctctgcagaatgtattctgtctggcaatgcggcacattggtcaaccaaaccgccaatatgccagagaatcccttgcggcctccccccaactatcgctaacggcgactttatttcgactaacagggaaaactttcattacggctctgtggtcacataccgctgcaacccaggtagtggtggtcgtaaggtgttcgaacttgtcggggagccctctatctattgcacgagcaacgatgaccaggtcggaatttggtcagggcctgccccacaatgcatcatcccaaataagtgcactcctcccaacgtagagaacggcatcctggtcagcgacaatcgcagcctgttttccctgaacgaggtcgtggaattccggtgccagccaggctttgtgatgaagggacctcgcagggtcaaatgtcaagcattaaacaagtgggaaccggagcttccgtcctgcagccgtgtgtgtcagcccccaccggacgtgctgcatgctgaaaggactcagagagacaaagataatttttcccctgggcaggaggtgttctattcatgtgaacccggttacgacctgaggggcgctgccagcatgaggtgtacacctcagggagactggtctcctgccgcacccacgtgtgaggtgaaatcctgcgatgacttcatggggcagttgcttaacggtcgcgtactgtttcccgtgaacctgcaattgggagcaaaagtggatttcgtttgtgatgaagggtttcaacttaagggcagctccgccagctactgtgtgctggctgggatggaatctttatggaattctagtgtgccagtttgcgaacaaattttttgcccgagccctcctgtgatcccgaatggacgtcatactgggaaacccctcgaggtttttcctttcgggaagacagtgaactacacatgcgacccacaccccgatcgcggaactagttttgacctgatcggagaatcaactattcgatgtacttccgaccctcagggaaatggcgtgtggtccagcccagccccaaggtgtgggatccttggccattgtcaagcgcctgaccacttcttgttcgccaagctaaagacccagaccaacgcttctgattttcctatcggtacttccctcaaatacgaatgccgtccagaatactatgggagaccattttccatcacatgtctggataatctagtctggtcctctcccaaggatgtgtgcaaaaggaaatcttgcaaaacccccccagaccctgtgaatggcatggtgcatgtaatcaccgacatacaggtggggtcacgcatcaattacagctgtaccacgggacaccggctaatcgggcattctagcgccgaatgtattctgagcggaaacaccgcccactggtccactaagccgcctatttgccaacgaataccctgcgggctgccaccgactatcgctaatggtgacttcatctccacaaatcgtgagaacttccactacgggtccgtcgtgacctacaggtgtaacctgggctcccgcggacgaaaagtttttgaactggtaggagaaccatccatctactgcaccagtaatgatgaccaggtcggaatttggtcggggcctgcacctcaatgcatcattcctaacaaatgcacacccccaaacgtggagaatggaattctcgtgtctgataatagaagcttgttctcactgaatgaggtcgtggagttcaggtgtcagcctgggttcgtgatgaagggtccccgtagggtgaagtgtcaagcactgaataaatgggaacctgagttgccctcatgctcacgcgtctgtcaacctccccctgagattctacacggagagcatactcccagccatcaggacaacttttccccgggacaggaggtgttctattcctgcgagcccggatatgacttacgtggggctgcctccctgcactgtactccccagggggactggtctcctgaggcaccccgttgcgcagtcaagtcttgtgacgattttttaggccagctgccgcacggtagagttctgtttccgttaaatctgcagcttggggcaaaggtgtccttcgtttgcgatgaaggcttcagattaaagggcagcagtgtgtcccactgtgtcctcgtgggcatgcgctcactctggaacaactctgtgcctgtttgcgaacacatattttgcccgaaccctccagctattctcaatggacgacacacagggaccccttcgggggacattccctatggcaaggagatctcctacacctgcgatccgcatcccgataggggtatgaccttcaatttaattggcgagagtactatcaggtgcacatccgatccacacggcaacggagtgtggtcatcccccgcacccaggtgtgagttgagtgtgagggccggtcattgtaagacccctgagcagttcccattcgcttcgcctacgatacccatcaacgattttgagttccctgtggggaccagtctcaattatgaatgcaggccaggatatttcggcaaaatgttttcgatctcctgcctggagaacctagtatggtcttctgtggaagataactgtaggagaaaatcttgtgggcctcctcccgagccttttaatggcatggtccatatcaacaccgatacacaattcggctccactgtgaactacagctgtaatgaggggtttaggctgattggctccccaagcacgacctgcctcgtgagcggaaataacgttacctgggacaaaaaagcccctatctgcgaaattatttcttgtgaaccgcctcctacaatctccaacggcgatttctactctaataaccgtaccagcttccacaatggaaccgtggtgacctaccagtgtcacactggaccagacggagagcagctgtttgagctggtgggagagaggtcaatctactgtacgtcgaaagacgaccaggttggggtgtggtcaagtccccctcccagatgcatctctaccaacaagtgtacagctcccgaggtcgaaaacgccatccgagtgccaggtaaccgcagtttttttactctgacagagataattaggttcaggtgtcagccaggtttcgtgatggtcggttcgcacaccgtccagtgtcagaccaacggtagatggggccctaagctgccccattgcagccgtgtgtgccagcccccaccagaaatactgcatggggagcatactctgagccatcaggacaacttttcgcctggccaggaagtgttttactcatgcgaaccttcctacgacctaaggggcgctgcatctttacactgcactcctcagggcgactggtcccctgaagcaccacggtgtactgtcaagtcgtgtgatgattttctgggccaattgccccacggcagggtgttattgccattaaacctccagctgggggcaaaagtgtcctttgtgtgtgacgaggggttccgcttgaagggtcgctcggcctcgcactgcgtcctcgccggaatgaaggcattgtggaacagtagcgttccagtctgcgagcaaattttttgccctaacccccctgctattctaaacggacggcacacaggaacccctttcggagacattccctatgggaaagagatcagttatgcttgcgacactcaccctgatagaggaatgacctttaatctgattggcgagagctctatacggtgtaccagcgatccacaaggcaatggagtgtggtcttccccagccccaagatgtgagctgagtgtgcccgctgcttgtcctcaccctccaaaaatacagaacggccactacatcggtgggcacgtgtctctttacctccctggaatgactatttcctacatatgtgacccgggatatcttctcgtgggcaaagggttcatcttctgcacagaccaggggatttggtcacagctggaccactactgcaaggaggtgaattgctcatttccgctcttcatgaacggcatatcaaaggagctggagatgaaaaaagtatatcactacggggactacgtgacactgaagtgcgaggacggttacaccctggaaggtagcccatggagtcagtgtcaagccgacgatagatgggatccacccttggccaaatgtacctctcgcacgcacgatgcattaatcgtggggacactgtccggcaccatcttcttcatcttgctgatcattttcctttcctggattattctcaaacacaggaagggcaacaatgcccatgagaatccaaaggaggttgccattcacttacacagccaaggaggctcatcggtccacccgagaaccctgcagacaaatgaggaaaactcccgtgtgctgcccta

SEQ ID NO: 218942 - DNA, 6119 bp, synthetic construct
  misc_feature 1..6119: note = Description of Artificial Sequence: Synthetic coding sequence
  source 1..6119: mol_type = other DNA
atgggcgcttcatctcctcggtcacctgaaccagttggtcctcccgctccgggtcttcctttctgctgcggcggttctctgctggccgtcgtggttttgctggccctccccgtggcttggggtcagtgtaatgctcccgagtggctgccatttgcgcgacctacaaacctcaccgacgaattcgaatttcctatcggcacatacttaaattatgaatgtaggccaggttattccggcagacctttctctataatatgccttaagaatagcgtctggactggcgctaaagaccgctgtcgtaggaagtcgtgtagaaacccacccgaccctgtcaacggtatggtgcatgtgatcaaaggtatccagttcgggagtcagataaagtacagttgtacaaaaggctatcggctgatcggcagctccagcgccacctgtataatctcgggggacaccgttatttgggacaacgagaccccaatttgcgatcggataccttgcgggctcccgcctacaatcacaaatggggacttcatttcaacaaaccgcgagaatttccattacggtagtgtcgttacatatcgctgtaaccccggttccggcggacgaaaggtgttcgaattggtcggcgaaccctcaatatactgcacttccaacgatgaccaggtggggatctggagtgggccagccccacaatgcattatacctaacaagtgcacaccgcctaacgtcgagaatgggatcctggtgtcagacaaccggtcacttttcagcttgaacgaagtcgtggagtttcggtgccagccaggcttcgtcatgaaaggcccacggagagtgaaatgccaggccctgaataaatgggaacccgagttgccaagctgctccagggtatgccagccgcctccggatgttctgcacgcagaacgaacccagcgggataaagacaattttagtccgggacaggaagtgttttatagctgtgagccagggtatgacctcagaggcgctgccagtatgagatgtacaccccagggcgattggtccccggcagcgcctacgtgtgaagtaaagagctgtgacgactttatgggacaactgctgaatggaagggttttattcccagtgaatttgcagttaggagcaaaagtggactttgtctgtgatgaagggtttcagctcaagggctccagtgcgagctactgtgtactggctggcatggagtcgctgtggaacagtagtgttccagtgtgtgaacagatcttctgtccatctccacctgttattccaaacggaagacacacaggaaaacccctggaggtgtttccgttcggaaagacggttaattatacctgcgacccgcaccccgacaggggcacatcttttgatctgatcggtgagagcacgataaggtgtacaagcgatcctcaaggcaatggggtgtggtcgtctccagcacctcggtgtggaatattgggccactgccaggctcccgatcattttctgttcgctaaactgaaaacccagaccaacgcctccgatttccccatcggtacatcactcaagtatgagtgccgcccagaatattacggaaggcccttttcaataacctgtctggacaatctcgtgtggagcagcccgaaagacgtctgtaagcggaagtcctgcaaaactcccccagacccagtgaatggtatggtgcatgtgatcaccgacatccaagtgggatcccgcataaattattcttgcacgacagggcatagactgattggccatagctccgcagagtgcattctctccggcaacgcagcacactggagcaccaaacctccaatttgtcaaaggatcccgtgcggtctgccgccaactatagctaatggagactttatctccaccaatcgtgaaaatttccattatggcagcgttgttacttaccgatgcaatcccggtagtggaggcagaaaagtattcgagctggttggagaaccgtccatctactgcactagcaacgatgatcaagtgggcatttggtctggaccggcaccacaatgtataattccaaataaatgtacccccccaaacgtcgagaatggtattctggtgtccgataatagaagcctgtttagtctgaacgaggtggttgagttccggtgccagccgggatttgtcatgaagggcccaagaagagtgaagtgtcaagccttaaacaagtgggagccagaactgccttcctgtagccgagtgtgtcagccaccaccagatgtgctgcacgccgaacgtacccagcgagacaaggataacttctcaccaggccaagaggttttctattcatgcgaacccggatacgacctcaggggtgctgcctctatgaggtgcaccccccaaggagactggtcccctgctgcccctacctgcgaagtcaaatcatgtgatgacttcatggggcagttactgaacggtcgggtgctattccctgttaacctccaattgggcgctaaggtggattttgtctgcgatgaaggatttcagctgaagggcagcagtgccagctattgcgttctggccggaatggagagcctgtggaacagcagcgtcccggtctgtgagcagatcttttgtccatcaccacccgtgattccaaacggacggcatactggaaaacccctggaagttttcccttttggaaaagcagtgaattacacatgtgatcctcaccctgacaggggcacctcttttgatctgattggggagtcaacaattaggtgtacctccgaccctcagggaaacggagtgtggtccagccctgcacccagatgcggcatcctaggccactgtcaggcacctgatcacttcctctttgctaagttaaagacccagacaaacgcaagtgatttccctatcggcacatcattgaagtacgagtgccgacctgagtattacggccgtcccttcagtataacatgcctcgataatcttgtgtggagctcccctaaggacgtctgtaaaaggaagagctgtaagacgcctcccgatccggttaatgggatggttcacgtgattacggacatccaggtgggcagcagaataaattatagctgcacaaccgggcaccgactgattggccactcctcagcagaatgcatactgtccggtaatacagcccactggtcaacaaaacctccgatctgtcagagaatcccatgcgggttgcctcctaccattgccaacggtgatttcatctcaaccaatagggagaatttccattacggcagcgtggtgacgtaccgatgtaatctcggatcacggggacggaaggtatttgaactggtgggggaacctagtatctactgcacctcaaatgatgatcaggttgggatctggtctggacctgcccctcaatgcataattccaaacaagtgtacaccccctaatgtcgagaacgggattttggtctcagataacagaagcctgttcagtctaaacgaggttgttgagttccgttgccagcccggattcgtgatgaaaggacccagaagggttaagtgtcaggccttgaacaagtgggaaccggagctgcccagctgcagtcgagtctgccagcccccaccggaaatccttcatggtgagcacactccaagtcaccaggacaatttttctcctggtcaagaagtgttttactcttgcgagcccggttacgatttgaggggtgctgcatccctccactgtaccccccagggagattggtctcctgaagctcccagatgcgccgttaagtcatgtgacgactttttgggacagcttcctcacgggagagtgctcttccctctgaatctccagcttggggctaaagtgtctttcgtttgcgacgagggctttcggcttaaggggtcgagcgtcagtcactgtgtgttagtggggatgcgctctctttggaataacagcgtgcccgtgtgtgaacacatattctgtcccaatcccccagctattctcaatggacggcatactgggacccccagcggcgacataccatatggtaaggagatatcttacacatgcgatccccaccctgaccgaggcatgactttcaacctgataggggaaagcaccattcgttgcacaagtgatcctcacggcaacggagtgtggagctcccctgctccacgttgcgagctctctgttagagccggtcactgcaagacgccggaacagtttcccttcgcttccccaaccatcccaatcaatgattttgaattccccgttggcacatctctgaattatgaatgtcgaccaggctacttcgggaagatgtttagcatcagctgcctcgaaaacctggtgtggagcagcgtggaagacaactgcagacgcaagtcgtgcggaccccctccagagcccttcaacggtatggtccacatcaacacagatacgcaatttggatcaaccgtcaactactcctgcaacgagggctttcgtcttataggatctccgagtactacatgccttgtctccgggaacaatgtcacatgggacaaaaaagctccaatatgtgaaatcatatcgtgcgaacccccacccacaatatcaaatggtgacttctacagcaataaccgcaccagctttcataacggcacggtggtgacgtaccagtgccataccggaccagacggagagcaactgttcgaactagttggagagagaagcatttactgcacttcaaaagatgaccaagtgggtgtctggagttcccccccaccccgatgtatttccaccaataagtgtacggccccagaggtggagaatgcgatccgggtgcccggtaatagatccttttttacactgactgagattattcgctttagatgtcagcccggatttgtgatggtcggtagccatactgtgcagtgtcaaactaatggaaggtggggacctaagctgccacattgcagtagggtctgtcagcccccacctgaaatactgcacggggagcacaccctgagtcatcaggataatttctctccgggacaggaagtcttttactcctgcgagccaagctacgacctgagaggcgctgcatctctgcactgcacgccacagggcgactggagtccagaggccccacgatgtactgttaaaagttgtgacgattttctgggccagttgccacacggcagggtgctcctgcccctgaatctgcaactcggcgctaaggtgtccttcgtgtgtgatgagggcttccgtctcaaaggcagatctgcaagtcactgcgtacttgcaggaatgaaagccctgtggaacagtagcgtgcccgtgtgcgagcagattttttgccctaatcccccagccattctgaacggaaggcacaccggaaccccatttggtgatataccttatggcaaagaaattagctatgcctgcgacacacaccctgatcgcggtatgacatttaatttgatcggcgaaagctcaattcgctgcacttccgatccccagggaaatggcgtttggagctctcccgctcccagatgtgagctgtctgtccccgctgcttgcccccatccaccaaaaatacaaaatggccactatataggcggacatgtatccctctatctgcccggaatgacaatcagttacatctgtgatccaggatatttattggtgggaaagggattcatcttctgcacagatcaggggatctggtcccagctggatcactactgcaaagaagttaactgttcgtttcctctctttatgaacggcatttccaaggagctcgaaatgaagaaggtttaccactatggagactacgtaactctaaagtgtgaggacggctatacactggaggggtcaccttggagtcagtgtcaggccgatgaccggtgggaccccccactagcaaagtgtacgtcccgtacacatgatgcactgattgttggaacactttctggcacaattttctttattctgctcattatattcctcagttggatcatcttaaagcatagaaaggggaacaacgctcacgagaatccaaaggaagttgccattcatcttcactctcagggtggttcatcagtacaccctcgcaccctccagaccaatgaagaaaacagccgcgttcttcctta

SEQ ID NO: 218943 - DNA, 6119 bp, synthetic construct
  misc_feature 1..6119: note = Description of Artificial Sequence: Synthetic coding sequence
  source 1..6119: mol_type = other DNA
atgggggcatcctccccaagaagtcctgaacctgttggacctccagctccaggacttccgttctgctgtgggggatccttgctcgccgttgtggtgttgctcgcactcccagtggcctggggtcagtgcaacgctccagaatggctcccattcgctaggccaactaatcttactgatgagttcgagttccctattggcacttacctcaattacgagtgtaggccgggatacagtggaaggccgttcagcatcatctgcctcaagaactccgtgtggactggagcgaaggatcgatgtcggagaaagtcctgtcggaatcccccagaccctgtcaatggtatggtacacgtaattaaggggattcagttcgggtctcagattaagtacagctgcaccaagggctacaggctgatcgggtcctcaagtgctacctgcatcatcagcggcgatactgtgatctgggacaacgagaccccaatttgtgaccgcatcccgtgcgggctgcctccgactatcaccaacggggatttcatctccactaacagagagaactttcactacggttctgttgtcacataccgttgtaaccctggatctggaggcagaaaggtgtttgaattggttggggagccctctatttattgcactagcaacgatgatcaggtgggcatttggtctgggccagctccgcagtgcataattcccaataagtgtacacccccaaacgtggagaatgggatcctggtgagcgataatagaagtctctttagcctcaacgaggtcgttgagttccgctgtcagccaggcttcgtgatgaagggcccaaggcgtgtaaaatgtcaggccttgaacaagtgggagcccgagctgcctagttgctccagagtgtgccagcctcctcctgatgtattgcacgctgaacggacacagcgcgacaaggacaatttcagccctgggcaggaggttttttactcgtgcgaacccggttatgatctaaggggcgcagcatccatgcgttgtaccccacagggtgattggtcacccgctgcacctacctgcgaggttaaaagttgtgacgattttatgggccagttactgaacggcagagtactgttcccagtcaatctgcagctaggtgccaaggtggacttcgtctgtgacgagggatttcaattgaaaggctccagtgcttcctattgtgtgttggccggtatggagagtctctggaactcctcagtgcccgtgtgcgagcagattttttgtccctccccaccagttatacctaatggccgtcatacaggaaagccattggaagtttttccattcgggaaaactgtcaattatacatgtgatccacaccctgacagagggactagtttcgaccttattggtgagtccaccattcgctgtaccagcgatccacagggaaatggagtgtggtctagccccgcaccacggtgtgggattctggggcattgtcaggctccggaccattttttatttgccaaattaaagacacagactaacgccagcgactttccaatcgggacaagcctgaaatacgagtgcaggcccgagtattacggcagacccttttctatcacctgtctggataacctggtgtggtcctctcccaaagatgtgtgtaaaagaaagtcatgcaagacaccccctgaccctgtcaacggaatggtccacgtcatcaccgacatccaggtggggtcccggattaattattcttgcaccacaggacaccggctgatcggacacagttccgcagaatgtattctatccggcaatgcagcgcactggtctactaaaccacccatctgccagaggatcccgtgtggattgcccccaactatcgctaacggcgacttcatctccactaacagggaaaatttccactacggatctgttgtcacatatcgctgcaatcctggatccgggggaaggaaagtattcgaactggtgggagaaccatccatctattgcacttctaacgacgaccaggtggggatttggtctggtcctgctcctcaatgtatcatacctaacaaatgtactccgcctaatgtcgagaacggcattctcgtaagtgataacagatctctgttctcactcaatgaggttgtcgagtttcgctgtcagccaggcttcgttatgaaagggccacgtcgcgtgaaatgtcaggcactaaataagtgggaacccgagttgccctcctgttccagagtgtgccagcctccacccgatgtgttgcacgccgaaagaacacagagagacaaagacaatttcagcccgggacaggaggtcttttatagttgcgagcccggatatgacctcaggggtgccgcttcaatgcgttgcaccccacagggcgattggtctcctgcggcacctacttgcgaggtaaagagttgtgacgactttatggggcagctgttgaatggacgcgtgctcttccctgtgaatcttcagctgggtgcaaaagtagatttcgtgtgcgatgaaggctttcagctgaagggctccagcgcgtcttactgcgtattagccggtatggagtctttatggaattcctctgtgcccgtttgcgagcagatattttgccccagcccacccgtcattcctaacggaagacatacgggaaagcccctggaggtcttcccttttggcaaggccgtcaattacacttgtgacccgcatccagaccggggtacaagtttcgaccttatcggcgaatctacaattcggtgcacgtcagacccccagggcaatggagtttggtcttcccctgccccaagatgtgggatacttgggcactgccaagcccctgatcatttcctgttcgcgaagctgaaaacacagaccaacgcaagtgatttccccatcgggaccagccttaaatacgagtgtcggccagaatactacggtcgcccattcagtatcacttgtctggataacctggtgtggtcatctccgaaagatgtgtgtaaacgcaagtcatgcaagacaccccctgaccctgtaaacggaatggtccacgttataacagacatacaggtcggctctcgaattaattattcatgcaccacagggcaccggctgatcggtcacagttccgcggaatgcattttgagtgggaacactgctcactggtctacgaaaccacccatctgccaaagaatcccctgtggactgcctcccaccatagccaacggcgactttatttcaaccaatcgagaaaacttccattatggctcagtcgtaacttaccggtgcaatcttggaagccggggtcggaaggtgtttgagctagtcggcgagccatccatttactgtaccagtaacgacgatcaagtgggaatctggtccggacccgctccccagtgtattatcccaaataagtgcacgcccccaaacgtcgagaacggcatccttgtgagcgataataggtccttgttttctctgaatgaggtggtagagtttcgctgccagccgggttttgtcatgaagggacctcgccgagtgaagtgccaagctttgaataagtgggaaccagagctgccaagctgctcacgtgtatgtcagccacccccagagattcttcacggggagcacaccccctcccaccaagataactttagcccgggtcaagaagtcttttattcatgtgaacctgggtacgatctgagaggcgctgccagcttacactgcacaccgcagggggactggtcacccgaagcgcctcggtgtgccgtgaagtcttgcgatgattttctgggacagctaccacacgggagggttctgttccccctgaacctgcaactgggggcaaaggtgagttttgtgtgcgacgagggtttccgactgaagggcagcagcgtctcccattgcgtcctggtggggatgcgctctctgtggaataattccgttcccgtttgcgagcacatcttctgtccaaacccgccagccattctgaatggccgtcatactgggacaccatctggcgatatcccttacggtaaagagatcagttacacctgtgaccctcaccccgataggggcatgacttttaatctaattggggagagcaccatcaggtgcacttcagacccgcatggtaatggcgtttggtcttctcctgcgccacgttgtgagctatccgtgcgggctggccactgcaagaccccagagcaatttcccttcgctagtcccaccatccctataaatgattttgagtttccagtcggcacatcactgaactacgagtgccgtcctggctattttggcaagatgttctccatcagctgcctggagaaccttgtgtggtcctcagtggaggacaattgccgccgaaagtcttgcggccctccacccgaacctttcaatgggatggtgcatatcaacaccgatacgcagttcggctctaccgtcaactatagctgcaacgaaggcttcagactaatcggatcacccagcacaacctgtctcgtttctggcaataacgtcacctgggacaaaaaagcacctatctgcgaaatcatatcttgtgagcccccacctaccatttccaacggggacttctattccaataaccgtacctcattccacaatggcacagtcgtaacttatcagtgccacacgggccctgatggcgaacagcttttcgaacttgtgggcgagaggtctatctattgtacctccaaggacgaccaggtgggtgtgtggagctctcctccacctcgatgtatctcaaccaacaagtgtactgccccagaagtcgagaacgctattcgagttccagggaatcgcagctttttcaccctgaccgagatcatcagatttcgctgtcagccaggattcgtgatggtcgggtcgcacaccgtgcagtgtcaaacaaatggtcgttgggggcctaaactgccccattgctctcgcgtatgccagccacccccagagattctacacggcgaacacacattgtctcaccaggacaacttttcccctggccaggaggtcttttatagctgcgagccgtcttatgacctcagaggcgcagcatctctgcactgtactccgcagggggactggagccccgaggctcccagatgcacggtcaaaagctgtgatgacttcctgggacagctgccccacggccgtgtgctcctgcctcttaacctgcagctgggagctaaggtttccttcgtatgtgatgagggctttaggttaaagggtcggtccgctagccactgcgtgctcgcaggcatgaaggcactctggaactctagcgtgccagtgtgtgaacagatcttctgtcccaatccccctgctattcttaacggcagacatacaggaacgccatttggggatatcccctatgggaaggagataagctatgcctgtgacactcacccagacaggggaatgaccttcaaccttatcggggaatcgagcattcgctgtaccagtgatccccagggaaatggagtttggtcatcgcctgccccacgctgcgaactcagcgtcccggcagcctgcccacatccacccaagattcaaaacggacactacatcggaggccacgtgtccctgtacctgcccggaatgaccattagttacatatgtgacccaggctaccttttggttggcaaaggttttatcttctgcaccgaccagggtatttggtctcaactggaccactactgcaaagaggtaaactgcagcttcccattgtttatgaacggtatcagcaaggagctggaaatgaagaaggtgtaccattatggcgattacgtgacactaaaatgcgaagatggctataccttggaaggctctccatggagtcaatgtcaggctgacgacaggtgggaccctcccctggctaaatgcaccagtaggacgcatgatgcactaatagtgggcaccctttcagggactatctttttcattttacttattatctttctcagctggatcattctgaagcaccgaaaaggcaataacgctcatgagaatccgaaggaggtggcgatccatctgcactctcaaggcggaagttccgttcaccctcgtacgttgcagacaaacgaagagaacagccgggtgttgccata

SEQ ID NO: 218944 - DNA, 1755 bp, synthetic construct
  misc_feature 1..1755: note = Description of Artificial Sequence: Synthetic coding sequence
  source 1..1755: mol_type = other DNA
gggcactgccaagctcctgatcatttccttttcgccaaactgaagacccagactaatgcctccgacttcccgatcgggacatcgctgaagtatgagtgtcgcccagagtattatggcaggcctttcagtatcacatgtctggataatctggtttggagcagtccaaaggatgtatgtaagagaaagtcgtgcaagactccacctgatcccgtcaacggcatggtacatgtgattaccgatatccaagtgggcagcagaattaactattcctgtaccactgggcatcggttgattgggcacagctctgccgaatgtatcttgtcaggtaacgctgcccactggagtacaaagccaccaatatgccagagaattccctgtggcctgccgcctactattgctaacggggacttcatcagtaccaatagggagaatttccactacggtagcgtggtcacgtacagatgtaatcccggaagcggcggtcgcaaggtgtttgaactcgtcggagaacccagcatctattgtacttcaaatgacgatcaggtgggaatatggtccggcccagcccctcagtgtatcattcctaataaatgtacccctccgaacgtcgaaaatgggattcttgtgtctgacaatcggtcactgttctcccttaacgaggtggtggagttcagatgccaaccaggtttcgtcatgaaaggcccaagaagagttaaatgtcaggctcttaacaagtgggaaccggaactgccatcttgcagtcgggtgtgccagccccctcctgatgtcctgcatgccgaaaggacacagcgtgataaagacaattttagccccggacaggaggtgttctatagctgtgagccaggctacgatctccggggagcagcgtctatgcgttgcactccgcaaggggattggagtcccgcagcacccacgtgtgaggtgaagtcttgcgacgacttcatgggccaactcttgaacggacgggtgctatttcccgttaaccttcaactcggagccaaagtcgattttgtgtgcgatgaaggattccagctgaaggggagcagcgctagctattgcgtgttggccggtatggagagcctctggaacagttcagttcccgtatgcgagcaaatcttctgcccttcacccccagtgatccctaatggtcgccacacaggcaaaccactggaggtattccctttcgggaagacggttaactatacttgtgacccacacccggatagagggacctccttcgacctcatcggcgagagcaccattagatgtactagtgaccctcaaggaaacggtgtctggtcctctcctgcccctcgctgcggcattctgggccactgtcaggctcctgatcacttcctgttcgcaaaattgaagacccagactaacgcctccgacttcccgatcggtacatcccttaagtatgagtgtcggcctgagtactatggccgtccttttagcattacctgtctggataacctcgtttggagctctcctaaagacgtgtgtaagcgcaagtcttgcaaaactccccctgaccccgtgaatggaatggtgcacgtgatcaccgacatccaggtgggatccaggataaattactcctgtactactgggcatcgtctcataggccatagttcagccgaatgtatactttctggcaatgccgctcactggagcacaaagccacccatttgtcagagaagttgtcacctgccttgcgagctctttgggagatag

SEQ ID NO: 218945 - DNA, 1335 bp, synthetic construct
  misc_feature 1..1335: note = Description of Artificial Sequence: Synthetic coding sequence
  source 1..1335: mol_type = other DNA
atggcacccccagtgagattggagaggccatttcccagtcggagatttcccggacttttactcgcagctctggtactgttgctttcttcattttccgaccagtgcaatgttccggagtggctgccttttgcaaggcctacaaaccttaccgacgatttcgaatttcccattggcacatacctaaattacgaatgtcgacccggttactcagggaggcctttcagcatcatttgcctgaagaacagcgtgtggacctctgctaaggataaatgtaaacggaagagctgcaggaacccccctgacccagtcaatgggatggcacatgtgattaaggacatccagtttcgtagtcagatcaagtattcatgccccaaggggtaccggctgataggatcatcaagcgctacatgcataatatccggcaatacagtgatctgggataataagacacccgtttgcgatcggatcatatgcgggcttcccccaacaatagccaacggcgactttacaagtatcagccgggaatattttcactacggcagtgttgtcacataccattgcaatttaggctccagaggtaaaaaggtttttgagctagtgggcgaaccctcgatatattgtactagcaaggatgatcaggtgggcatctggagcgggcctgctccacagtgtatcatccctaataagtgtaccccccctaacgtagaaaatggtattctggtgagtgacaatcgttccctcttcagtctcaacgaagtcgtcgagttccgctgccagcctggcttcgggatgaaggggccaagtcatgtgaaatgccaggcactgaataagtgggagcctgaactcccctcgtgctcacgcgtctgccagcctcccccagacgtgctgcacgctgagaggactcagagggacaaggataacttctctcccggtcaggaagtgttctattcatgtgaacccggatacgatctgagaggctcaacttatttacactgcactccacagggtgattggagtccggctgcgccacggtgtgaggttaaatcctgcgacgactttcttgggcagctcccaaatggtcatgtcctttttccgcttaacctacagcttggggcaaaggtcgactttgtgtgcgatgaaggatttcagctgaagggaagctccgcttcgtattgtgtgttagccggaatggaaagcctgtggaactcctctgtccccgtctgcgagcgcaaatcatgcgagaccccacccgtccctgttaatggcatggtgcacgtgatcaccgacattcacgtcggcagccgaattaattattcatgcacaacggggttttag

SEQ ID NO: 218946 - DNA, 1710 bp, synthetic construct
  misc_feature 1..1710: note = Description of Artificial Sequence: Synthetic coding sequence
  source 1..1710: mol_type = other DNA
atggccccaccagtacggctagaaagaccattcccatcgaggcgattccccggtttactcctggcagccctcgttctcctgctgtcctctttcagcgaccagtgtaatgtgcccgaatggttaccctttgcgcgtcctactaatctcaccgacgactttgaatttccgataggaacataccttaattatgagtgtcgcccaggatattcgggccgacctttctcaattatttgccttaagaactcagtttggacatctgctaaggacaagtgcaaaaggaaaagctgtcggaatccgccagatccggttaacgggatggcccacgtaattaaggacatccagttccgtagtcaaatcaagtactcatgccctaagggataccgtctgatcgggtcttcctccgctacatgtattattagcggcaatacagtcatttgggacaataagacacccgtgtgcgatagaataatctgcgggctgccaccgactatcgcaaacggcgatttcactagtataagtcgcgagtattttcattatggatccgtggtgacctatcactgtaatctgggatcgcgagggaagaaagtgttcgaactggtcggagagccttccatctattgcacgtccaaggatgatcaagtagggatttggtctggccctgcccctcaatgtatcattcctaataagtgtacccctccaaatgtggagaacggcatacttgtgtccgacaacaggtccctgtttagtctgaatgaggtagtggagtttaggtgccaaccgggatttggcatgaagggtccctcccatgttaagtgtcaggcactgaacaaatgggagccagagctgccaagttgtagccgcgtatgccagccaccccctgacgtcctgcatgccgagaggacccagagggataaagataactttagccctggacaggaagtcttctattcatgtgagcccggatatgatctgagaggttctacttacctgcactgcacaccacagggagactggtcaccagctgcacccagatgtgaggtcaagagctgtgacgactttctcggacaactgcctaacggacatgtgcttttccctttaaacctgcagctgggggcaaaggtggatttcgtgtgtgatgaaggattccagcttaagggatcatctgcgtcttactgcgtgcttgcaggtatggagtccctatggaactcgagcgtcccagtttgcgagcggaagagttgtgaaaccccacccgttccggtgaacggaatggtacatgttattacggacatccacgttgggagtcggattaactactcctgtacaactggacacaggctgattgggcactcatcagccgagtgcatactgtccggaaatactgctcactggagtatgaagcctcctatatgccagcagattttttgtcccaatcctcctgctatcctgaatggtcgccacaccggtacgcctctgggagatatcccctacgggaaagaggtaagctatacgtgcgatcctcatcccgatcggggaatgacctttaatttgatcggtgagagcaccatccgccgtacaagtgaacctcatggtaacggggtatggtcttctccagctcccagatgcgaacttccagttggggctggctcgcacgatgcccttatcgtggggaagttctatgaagtttttgccgaagagttctgtcacctctag

SEQ ID NO: 218947 - DNA, 3279 bp, synthetic construct
  misc_feature 1..3279: note = Description of Artificial Sequence: Synthetic coding sequence
  source 1..3279: mol_type = other DNA
atgggagccgcaggacttctgggtgttttcctggccctcgttgcgccaggcgtgctgggcataagttgcggcagccccccaccgattctgaacgggcgaatcagctactattcaactcccatcgctgtgggcaccgtcatcaggtacagctgttctggaactttccgccttattggcgaaaagagtttgttgtgtattactaaggacaaggtagatggaacctgggacaaacccgctcccaaatgcgagtactttaataaatattcttcgtgccctgaacccatagtgcctggaggatacaagattagaggtagcacgccctatcgtcacggtgacagtgttacatttgcctgcaaaactaactttagcatgaatgggaacaagtccgtgtggtgccaagctaacaacatgtggggacccactaggcttccaacgtgtgtctcagtcttcccgctcgagtgtccggcactcccaatgattcataatggacatcatacttctgagaacgtcggctccatagcaccgggactgtcagtaacctatagctgcgagtccggctatctactggtcggcgagaagatcattaactgccttagttcaggcaaatggagtgccgtccctcctacatgtgaagaggcacgatgcaagagcctagggcgtttcccaaacggcaaggtgaaggaaccccctattctaagggtgggcgtgacagctaacttcttttgtgacgaagggtaccggctgcaaggcccaccttcctctcggtgtgtcatcgctggacagggcgtagcctggacaaagatgcccgtctgtgaagaaattttttgcccatctcctccgcctatcctgaacgggaggcatattggaaatagcctcgccaacgtgtcttacgggtcaattgttacgtacacttgtgaccccgaccccgaagaaggtgtgaattttatcctgattggcgagtcgaccttgcgatgcacagtggacagccagaaaaccggcacatggtctgggcctgccccacgctgcgagctctcgacgtccgctgtgcagtgccctcatccacaaatcctccgaggccgaatggtttctggccagaaggatcgctatacctataacgacacagtgattttcgcatgtatgttcggattcacactgaaggggtccaagcagattaggtgtaatgctcagggtacatgggaacccagcgcaccagtgtgtgaaaaggagtgtcaggccccaccgaacatccttaacggccaaaaagaggataggcatatggtgaggtttgatcccggaacttcaatcaaatacagttgcaacccagggtacgtgctggtgggggaagaatcaatccagtgtacgtctgaaggagtctggactccacctgttccccagtgtaaggtagccgcttgcgaagctacaggaaggcaactcctgacaaagcctcaacaccagtttgtaaggccggatgttaattccagctgcggtgagggatataagctatcaggaagcgtataccaggagtgtcagggaactattccttggtttatggagatacggctttgcaaggagatcacatgcccaccccctccagtcatctacaacggtgcacataccgggtcttctctggaggacttcccctatgggaccactgttacatatacttgtaatcccggtcctgagaggggagtggagttttcactgattggcgagtccacaatcaggtgcacatccaatgaccaagaacggggaacctggagcgggcctgcacccttatgtaaactttcgctgcttgcagttcagtgctctcacgtacatatagcaaatggttacaagatcagtgggaaagaggcaccctacttctacaatgatacagttactttcaagtgctactcagggtttactctgaaaggctcctctcagatccggtgtaaagccgacaatacttgggatccagagatccccgtgtgcgaaaaagggtgtcagtcaccacctggcctgcaccacggtagacatacaggtggcaatacagtgttcttcgtgagcgggatgaccgtagactacacttgtgacccaggctacctgttggtcggtaacaagtctatccactgcatgccctctggaaactggagccccagcgctcctcggtgtgaggagacatgtcaacatgtccgacagtcacttcaggagcttcctgccggatcacgggtagaactcgtgaacacctcttgccaggatggttatcagctaactgggcacgcctatcagatgtgccaggatgcagaaaatggcatttggttcaagaaaatccctctgtgcaaagtgatccattgtcacccacccccagtaatcgttaacggtaaacatactggtatgatggctgagaacttcctgtacggaaatgaggtgagctacgagtgcgaccagggcttctatctccttggtgagaaaaagttacagtgtagatcggactctaaagggcacgggtcatggtcaggcccaagccctcaatgtcttcggtccccccctgtgacgcggtgtcccaatccagaagtaaagcacggatacaaattaaataagacacactcagcctacagccataatgacatagtctacgttgactgcaatcctggttttataatgaacggatcacgggtcatccgctgccacactgataacacttgggtccccggagtccctacatgcataaagaaggcttttatagggtgtcccccacctccaaagacacccaacggcaatcacacaggtggaaacatcgcgagattttctcccggaatgtctattctgtactcttgcgatcagggatacctgctggtgggcgaagctttgttgctctgcacccacgagggcacgtggagtcagccggcaccccattgtaaggaggtgaactgcagctcaccagcggacatggacggtattcagaagggactggagcccaggaagatgtaccaatacggcgcagttgtcactctcgagtgcgaagacggctatatgttagaaggcagtccacagagtcaatgccagtctgaccaccagtggaatcctccattggcagtgtgccgaagtaggtctttggctccggtgttgtgtggcattgccgctggcctcattcttcttacattcctgatcgtcatcacactgtatgtgatctctaagcaccgcgctaggaactactacactgacacctcgcaaaaagaggctttccacctcgaggctcgggaggtgtacagcgtagatccgtataatcccgcaagttag

SEQ ID NO: 218948 - DNA, 3102 bp, synthetic construct
  misc_feature 1..3102: note = Description of Artificial Sequence: Synthetic coding sequence
  source 1..3102: mol_type = other DNA
atgggcgcagctggcttactgggggtattcctggctctagtggctcccggtgtgcttggcatctcctgcggatcccctcctccaattctgaatgggcgtattagttactatagcaccccgattgcagtcggaacagttatccgctattcatgtagtggtacatttcgcctcatcggggagaagtcattgctgtgtattaccaaggataaggtggacggcacatgggacaagccagccccaaagtgcgagtattttaataagtattcttcgtgccccgagcccattgtgcctggcggatacaagatacggggttccaccccttacaggcacggcgacagtgttacctttgcttgtaagacaaatttttccatgaatggaaataagtcagtgtggtgtcaggctaacaatatgtggggaccaaccaggctccctacttgcgtctcagtgttcccactcgagtgtcctgctctcccgatgatacacaatggacaccatacaagtgagaatgtaggtagcatcgccccaggcctgagcgtgacatatagctgtgagagtggctacctcctggtcggcgagaaaattatcaactgtttgtcaagtggtaaatggtccgccgtaccacccacttgtgaagaggcaagatgcaagtccctgggacggtttccaaatggaaaagtgaaggagccgccaattttgcgggtgggagtgacagcaaactttttctgcgacgagggataccgcctgcagggtcccccaagcagccgctgtgttatcgccggtcagggtgtggcctggaccaaaatgcctgtgtgcgaggaaatcttctgtcctagcccccctcccattcttaacgggaggcacattggcaattcgttggctaatgtttcgtacggatcaattgtcacgtacacgtgcgatcccgatcctgaggagggtgttaatttcattctcatcggtgagagtacactgagatgtacagttgattcacagaagactggaacatggagcggccctgccccacggtgtgagttgagcacaagtgctgtgcagtgcccccacccccagattctccggggacgcatggtgtccggacagaaggaccggtacacatataatgacacagtaatcttcgcctgtatgtttggcttcacattgaagggatcaaagcagatccggtgcaacgcccagggtacctgggaaccctcagctcctgtatgcgagaaagagtgtcaggcccctccaaacatccttaacgggcagaaggaggacagacatatggtgaggttcgatcctggtacttccataaaatacagttgcaatccgggatacgtgctagtaggagaggagagcatccagtgtacctccgagggggtgtggacccctccggtcccccagtgcaaggtcgcagcatgcgaggctacaggaagacagctactgactaaacctcagcaccagttcgtccgccctgacgttaactcctcctgtggtgaaggttataaactgagtggctccgtttaccaggagtgtcagggcacaatcccctggtttatggagattagactttgcaaggaaataacatgtcctcctccccctgtgatatacaacggtgcccacaccggcagcagtctcgaggatttcccgtacggcactactgtcacatatacttgtaaccccggtcctgagcgcggagtggagttttccttgatcggggagtctacaatccgttgtacctccaatgaccaggaaagaggcacatggagtggcccagcgccactgtgtaagctatcattattggccgttcagtgttctcatgtgcatattgccaacggctacaagatctcaggcaaggaggccccttacttttataacgatacggttaccttcaaatgctactctggtttcacactcaaaggatccagccagattagatgtaaagcggataatacttgggaccccgagatcccggtgtgtgagaaagagacctgccagcacgtccggcagtcactacaggaactcccagccggatcccgcgtggagctggtgaacacctcctgtcaggacggctaccagttgactggccatgcttaccagatgtgccaggacgccgagaatggaatatggttcaagaaaattcctctttgtaaagtgatccactgccacccccctccagtcatcgtcaacggcaaacacaccggaatgatggccgaaaattttctctatggcaacgaagtttcatacgagtgcgaccaaggattctatttgctgggcgaaaagaagttgcaatgccgctccgatagtaagggtcatggctcatggtcaggtcccagcccacagtgcctccgtagccctcccgtcaccagatgccccaacccagaggtcaaacacgggtacaagctgaacaagacccattctgcttactcccacaatgacatagtctacgtggactgcaacccgggatttatcatgaatggaagcagggtgatacgatgccacaccgacaatacatgggtcccgggagttccaacatgtatcaagaaggcttttattggctgcccaccgcctccaaagactccaaatggtaatcacaccgggggaaatatcgctaggttctcaccgggaatgtcgatcctgtatagctgtgatcaggggtacctgttggttggcgaggcgttactgctgtgtacccatgaagggacttggtcgcagcctgcgcctcactgcaaggaggttaattgtagctcccctgccgatatggatggtatccagaagggccttgagcccagaaaaatgtatcaatacggagccgtcgtgacccttgaatgcgaagatggttacatgctcgaaggctctccacagagccagtgtcaaagtgatcaccagtggaatcccccacttgcggtctgtcgctctcggagtttggcgccagtgctgtgtgggatcgctgccggactcattctcttgacattcttgattgtgatcacactttatgtgattagcaaacatcgcgctcgaaactattataccgacactagccagaaggaagcatttcaccttgaggccagggaggtgtacagtgtggatccatacaatcccgcatcttag

SEQ ID NO: 218949 - DNA, 2916 bp, synthetic construct
  misc_feature 1..2916: note = Description of Artificial Sequence: Synthetic coding sequence
  source 1..2916: mol_type = other DNA
atgggcgctgctgggctcttgggggtctttttagccctcgtggccccaggtgtgttgggaattagctgcgggtccccgcctccaatactcaacgggaggattagttactactctaccccaatcgccgtgggcactgtgatccggtattcttgcagcgggacattccgactcattggcgaaaaatccctgttgtgtatcacaaaggataaggtggatggaacctgggacaaacctgctccaaagtgcgagtacttcaataagtactctagttgtcccgagccaattgtgcctggcggatacaagatccggggttcaaccccctatcgccatggcgactcggtcacattcgcttgcaagaccaatttctccatgaatggcaacaaatctgtgtggtgccaggccaacaacatgtggggcccaacaagattacctacgtgcgtgagcgttttccccctggagtgccctgccctacctatgatacacaacggccaccatacttccgaaaatgttggctcaatcgctcctgggctgtccgtaacttattcatgtgagagcggttatctgttggttggagagaagattattaattgtttgtcttccggcaaatggtccgctgtgcccccaacctgcgaggaggccaggtgcaaaagtctcggaagattcccgaacggtaaggtgaaggagcctccaatactgcgcgtgggtgtcactgccaacttcttctgtgatgaaggttatcgcctgcaagggccaccctcctctagatgtgtgattgcaggccaaggggtggcatggactaaaatgccagtttgcgaggaaattttttgccctagccctccccctatcctgaacggacgccacattggaaattccctagctaacgtctcatatggcagcatcgtaacctatacctgcgaccctgatcctgaagaaggagtaaattttattttaatcggggaatcaacgctacgctgcaccgtagactctcaaaaaaccggcacctggagcggtcctgctccccgttgtgagcttagtacttcagccgttcagtgcccccacccacaaatcttaaggggaagaatggtgagcggtcagaaagacaggtacacatacaacgataccgttatttttgcatgtatgtttggatttactctgaaagggagtaagcagatccgttgcaatgctcagggcacatgggagccgagtgctcctgtgtgtgaaaaagagtgtcaggctccacctaacattcttaatggccaaaaagaggatcggcacatggtcaggttcgaccctggtacctcaatcaaatactcttgtaaccccggatacgtgttggttggagaagaatcaattcagtgcaccagcgagggggtgtggaccccccctgtcccacagtgtaaagtggcagcttgtgaggctacggggagacagcttcttaccaagccacagcatcagttcgtgcgcccagacgtgaatagctcgtgcggcgaaggctataaactttctgggtcagtttaccaggagtgccaggggaccatcccctggttcatggagataaggctgtgcaaggagataacgtgtccaccaccccctgttatttataacggcgctcatacaggctcctcattggaggatttcccttacggcactactgtcacatatacgtgcaatcctggaccagagagaggagtggaatttagccttattggcgagtctacgattcgatgcaccagtaacgaccaagagcgcggtacttggtcgggacccgctccactgtgtaagctctcgctgctcgcagtacagtgcagtcatgttcacatcgctaatggctataagataagcggtaaggaggcaccctacttctacaacgatactgtcacctttaaatgttacagcggcttcacactcaaaggaagctctcaaattaggtgtaaagcagataacacgtgggacccagagattccagtgtgcgagaaggagacctgccagcatgtacgtcagtccctgcaggagctacctgcgggttcccgagtggaacttgtcaacacctcttgccaagatgggtatcagctaacgggccatgcctatcagatgtgtcaggacgcagaaaacgggatctggttcaaaaagattcccctttgtaaagtcatccattgccatccgcctcccgtcatcgtcaacggtaagcacacagggatgatggccgagaacttcctgtacgggaacgaagtgagctatgagtgcgaccaaggattctacttgcttggggaaaagaaactgcagtgtcgttctgacagtaagggacacggtagctggtccggcccttctccccagtgtcttaggagccccccagtgacccgctgcccgaatcccgaggtgaagcacggctacaaactgaacaaaactcacagtgcatatagtcataacgatattgtctacgttgactgcaatccaggttttatcatgaacgggagccgagtgatccgctgccacacggacaacacgtgggtcccaggggttccgacctgtatcaaaaaagaagtgaattgctctagccccgctgacatggacgggatacagaaaggccttgagcccagaaaaatgtatcagtatggcgcagtggttactcttgagtgcgaagacgggtacatgttggaaggatccccccagagccagtgtcaaagcgatcaccagtggaacccacccttggccgtgtgcagatcgcggagcctggcaccagttctttgcggtattgctgcaggactgatcctgctcacctttctgattgtcattacactctacgtcatctcaaagcaccgtgccaggaactactatactgacaccagtcagaaggaagcgttccacttggaggccagggaagtttactctgtcgacccgtataaccccgcttcttag

SEQ ID NO: 218950 - DNA, 3021 bp, synthetic construct
  misc_feature 1..3021: note = Description of Artificial Sequence: Synthetic coding sequence
  source 1..3021: mol_type = other DNA
atgggagcagccggtttactgggtgtgtttctcgcactggtggccccaggggtcttgggtatctcttgtggctctccgcctcctatcttaaatggtaggatcagctactacagcactccaatcgccgtgggaaccgtaattcgctattcctgcagtggaaccttcagactgatcggcgaaaaatccctgttgtgtatcacgaaagacaaagtggacggcacgtgggataagcctgctccaaagtgcgaatattttaataaatatagcagttgtcctgagcctatcgttcccggtggctataagatacggggttcaaccccgtaccggcacggtgactctgtcaccttcgcatgcaagacaaatttcagcatgaacggcaataagtctgtgtggtgtcaggccaacaatatgtggggcccaacccggttgcctacctgcgttagtgttttcccccttgagtgccccgctctgcccatgattcataatggccaccacacctcagagaacgtcgggtctattgccccaggcctttccgtgacttattcctgcgaatcagggtatttgctagtgggagagaaaatcatcaattgtcttagctctggcaaatggtccgcagttcccccaacctgcgaggaggcacgatgtaagtcactcggtcgatttccgaacgggaaggtgaaggaacctcctatccttagggtcggcgttaccgccaacttcttttgtgacgagggttacaggcttcagggccctccaagtagtagatgcgtgatcgcaggccagggcgttgcatggaccaaaatgcctgtctgtgaagaaattttttgtccaagcccccctcccattctgaacggcaggcacattggcaacagccttgccaacgtctcctacggaagcatcgtgacctacacctgcgatcctgacccagaagagggggtgaacttcatcctgattggagagagtacattaaggtgcactgtggactcacagaaaacaggaacgtggtcaggtccagccccaaggtgtgaattgtcaacatccgccgttcagtgcccgcacccccagattctccgcggtagaatggtctcagggcaaaaagataggtacacctataatgatactgtgatctttgcctgtatgttcggattcacgctcaaggggtccaagcagattcgctgcaacgcacaaggtacctgggaaccctcagctcccgtgtgcgaaaaggaatgccaggcaccaccaaatattctgaatggccagaaggaggataggcatatggtgcgtttcgatccaggaaccagtatcaagtacagctgtaatccaggctacgtgctggtgggcgaagagagtatacagtgcacgagcgagggagtatggacacctccagtccctcagtgcaaggtggccgcttgcgaggctactggacgccagctgctcaccaagccacagcatcagtttgtacgaccagatgttaattcatcgtgtggagaaggaaaccacctgcctacaactccatgttacctccaatggggaacccatagagagttcctgcgcagattcagcatatggaaccacggccatctgcatatgcctgggccagagcggggagtggaattttctctgatcggagaatcaacaatccggtgcacttcaaacgatcaagagaggggtacttggagcggcccagctcccctgtgtaaactttccctgctggcggtgcagtgcagccatgtccacattgctaatgggtacaagatctctggcaaagaggctccatacttctacaatgacacggttacatttaagtgctactcgggtttcaccctgaagggctccagtcagatcagatgcaaggccgacaacacgtgggatcctgaaatcccggtgtgcgagaaggagacttgtcagcacgtgaggcagtcgctgcaggagctcccggctggcagccgtgttgagcttgtcaacacatcgtgccaggacggctaccaactgacaggccacgcctaccaaatgtgccaggacgccgagaatggcatttggttcaaaaaaattcccctttgcaaggtgattcattgccaccccccacccgtaattgtaaatggaaagcacactggaatgatggcggaaaattttctttatgggaatgaggtcagttacgagtgcgaccagggtttttatttactgggagaaaaaaagctacagtgccgttcggattcgaagggtcacggcagctggtccggcccatcaccacagtgcttgagatctccccctgtgacacgatgtccaaatccagaggtgaagcatggctataagctgaataagacccatagtgcttattcgcataacgatatcgtgtatgtcgactgtaaccctgggttcataatgaatgggagtagggtcatccgttgccacactgataatacctgggttccgggagtccccacttgtattaaaaaggcgttcatagggtgccctccacccccaaaaactccgaacgggaaccacaccggcggtaacatagccaggttctcacccggaatgtcgattttatacagctgtgatcaaggatacctgttggtaggcgaggctctccttttgtgcacgcacgagggcacctggtctcagccagctcctcattgtaaagaagtgaattgcagtagccccgcagatatggatggaatccagaaaggcttggaaccccgaaagatgtaccagtatggcgctgtggtaactctggagtgcgaggacggatatatgttagaagggtcaccacagtctcagtgtcagtccgaccaccagtggaatccacccctggctgtgtgtcgctcacgcagcttggcacccgtgctctgtggcatcgcagccggactcatactgctgaccttcctgatcgttattactttatacgtgatttccaaacatagggccaggaactactacaccgacaccagccagaaggaggcctttcatctggaggccagggaggtgtactctgtggacccttacaatccggcatcctag

SEQ ID NO: 218951 - DNA, 2226 bp, synthetic construct
  misc_feature 1..2226: note = Description of Artificial Sequence: Synthetic coding sequence
  source 1..2226: mol_type = other DNA
atggctgccgcagagggaccggtaggagacggtgaactgtggcagacctggttacccaaccatgtggtttttttgcggcttcgcgagggcctgaagaaccagagccccaccgaagcagaaaagcccgcaagtagcagtttaccaagttcccctcccccacagctgctcaccagaaatgtggtatttggactaggcggtgagctgttcctctgggatggagaagactccagctttctagtggtcaggctgagaggcccttcaggcggtggcgaggaaccagctctgtctcaataccagcgcctgctgtgcattaacccacccctatttgaaatataccaggttctcctctcaccaacccagcaccacgtcgccctgatcggcattaaagggctgatggttctggaacttcctaagcgatggggtaaaaacagcgaatttgagggcggtaagtcaacagtgaattgtagcacaaccccagttgcagaacgatttttcacatcatccacatctctcaccctgaaacatgccgcttggtatccctctgaaattctggatccccatgttgtcctgcttacatctgataatgtgatccgcatctacagcctcagagagccgcaaactcctacaaacgtgattatcctgagcgaggctgaggaggagagcctggttctgaataaagggagagcttataccgcatccttgggagaaactgctgttgcttttgactttgggccacttgctgcagtacccaaaacactgttcggtcaaaacggaaaagacgaagtggtggcctatccgctctacatcctctacgagaatggcgaaaccttcctgacatatattagcctgctccattccccaggtaacatagggaagctgctgggccctctgcctatgcacccggcagccgaagataactatgggtacgacgcctgtgcagtgctgtgcctcccatgcgtgcctaatattctggtaatcgccaccgagagcggtatgctgtaccactgtgtggttctagaaggcgaagaagaggacgatcacaccagcgagaagtcgtgggattcgcgcatagacttaatcccatccttgtacgtgtttgaatgcgtggagctggaactcgccctcaagttggccagcggtgaggatgatcctttcgactcagactttagctgtccagtaaagttgcaccgcgaccctaaatgcccttcccgctatcattgtacccatgaggcaggggttcacagcgtaggactgacgtggattcacaagttgcacaagtttctgggctccgatgaagaggacaaagactcactgcaagaactgagcactgaacaaaagtgcttcgtggaacatattctctgcaccaaacccctcccttgccggcagcccgctcccatccggggattttggatagtcccagatattctaggaccaacgatgatctgcatcacctctacctacgagtgtcttatatggcccctattgtccaccgtccaccccgcatcacctcctcttctgtgcacacgcgaagacgtggaagttgcggagtctcccctccgagtcctcgccgagacaccggattcgtttgaaaagcatattcgttccatcctgcaaagaagcgttgctaatcctgcctttctgaaggcatccgagaaggatattgcaccccctcccgaggaatgtttacagcttttgtcacgcgctactcaggtcttcagagagcagtatatccttaagcaggatctggccaaagaagaaatccagcggcgagtgaagcttctctgcgatcagaagaagaaacagctcgaggatttgagctactgtcgggaagagcgcaaatcactcagggaaatggcggaacgcttggctgacaagtacgaggaagccaaggaaaagcaagaagacatcatgaatcgcatgaaaaaactgcttcactcatttcattcggagctcccagtgcttagcgattccgagcgcgacatgaagaaagagctccaactgatcccggatcagctgcgacatttggggaatgcaattaaacaggtgacaatgaaaaaggactaccagcagcagaaaatggaaaaagtgctgagtctgcctaagccgacgatcattttatcggcgtaccagaggaaatgtatccagtctatcttgaaggaggaaggagaacatattcgcgagatggttaagcagatcaatgacattcgcaaccatgtcaatttctag

SEQ ID NO: 218952 - DNA, 762 bp, synthetic construct
  misc_feature 1..762: note = Description of Artificial Sequence: Synthetic coding sequence
  source 1..762: mol_type = other DNA
atgatgatgaagatcccatgggggtccatcccggtgcttatgcttctcctgctcctcggactgatcgatatctcccaggcccagctgtcctgcactggtcctcctgcaatccctggtatacccggaattcccggaactcctggccctgacgggcagcctggtactcccggtatcaagggagagaaaggcctccctgggctggccggtgaccatggcgaattcggcgagaagggcgaccccggtatccccggaaatccagggaaagtcggcccaaaagggcctatgggcccaaagggaggcccaggcgctccgggagctccaggcccaaagggtgaaagtggcgattacaaagcaactcagaagatcgctttctctgcaaccagaaccataaacgtgcccctccggagggatcagacaatcagatttgaccacgtcattacaaatatgaacaacaactatgaacccaggtctggaaagtttacctgtaaagtcccaggcctctactacttcacctaccacgcttcctctcggggaaacctgtgtgtaaatctgatgaggggccgtgaaagggcccagaaggtggtcaccttctgtgattatgcctataacactttccaggtgactacaggcggtatggtgttgaagctcgaacaaggcgagaatgtgttcctgcaggctacggacaagaatagtctgttgggaatggaaggcgcaaactccatattctcgggcttcctgctgtttccggacatggaagcttag

SEQ ID NO: 218953 - DNA, 690 bp, synthetic construct
  misc_feature 1..690: note = Description of Artificial Sequence: Synthetic coding sequence
  source 1..690: mol_type = other DNA
atgaagattccctgggggagcatacccgttctgatgctgttacttctgctcggcctgattgacatttcacaggcgcagctgagctgcactgggccaccagcaatcccaggaatccctgggatccccggaaccccaggacctgacggacagccgggtacccccggtatcaagggggaaaagggactgcccggtctggccggagatcatggtgaattcggcgagaaaggcgacccaggaatacccggtaaccccggaaaggtgggacctaaaggtcccatggggcctaagggcggtccaggggctcctggtgctccgggaccgaagggtgagtctggcgattacaaagccacacagaagatcgcatttagcgcgactcgcaccatcaatgtccccttaaggcgcgatcagacaataagattcgatcacgtaattacgaatatgaacaacaactatgagcctagaagcggaaagtttacttgcaaggtgcctggcttgtactatttcacttatcatgcctccagccgcggtaatctgtgcgtcaatttaatgcgcggtcgggagcgcgcacagaaagttgtgacgttttgcgattacgcgtataacacattccaagtcactactggcggtatggtgctgaagctggaacagggagagaatgtttttttgcaagccaccgacaagaatagctag

SEQ ID NO: 218954 - DNA, 756 bp, synthetic construct
  misc_feature 1..756: note = Description of Artificial Sequence: Synthetic coding sequence
  source 1..756: mol_type = other DNA
atgaagataccttggggttctattcccgtgctaatgctgttactgctcctgggactcattgatatatctcaggctcagctcagttgtacagggccaccagccatccctggaatccccggtatccctgggacaccaggaccggatggccagcccggaactccgggaatcaaaggagaaaagggattaccgggtctcgccggtgaccatggggagtttggcgagaagggagatcccggtatcccaggcaaccctgggaaggtaggaccaaaggggccaatggggccaaagggcggacccggtgccccaggggcaccaggccctaaaggagagtctggcgattataaggctactcagaaaattgctttttcagcaacacgcacaatcaacgttccacttcgccgagaccagactataagattcgaccatgtgataacgaacatgaataacaactatgagccgcgaagcggaaaatttacatgtaaagtgcccggtttatactactttacttaccacgcgtcttctagaggaaatctgtgcgtgaacctcatgagaggtagagagcgggctcagaaggtagtgacattttgcgactacgcgtacaatacttttcaggtcacaacaggtggcatggttcttaagctggagcagggcgaaaatgtgtttctccaggcaactgacaagaattctctgttaggcatggaaggggctaacagtatcttctctggcttcttattatttccagatatggaagcctag

SEQ ID NO: 218955 - DNA, 462 bp, synthetic construct
  misc_feature 1..462: note = Description of Artificial Sequence: Synthetic coding sequence
  source 1..462: mol_type = other DNA
atgaaaattccatgggggagcattcccgtcctgatgcttctgttactgctcggactcatagacatctctcaggcgcaactcagttgcactggaccgcctgccatacccggaattcctggcatccccggaacacctgggcctgacggacagcctggaacacccggtatcaagggggaaaagggtctccctgggctcgccggagatcatggagaatttggagagaagggcgacccaggtatccccggaaatcctgggaaagttggccctaagggccctatgggcccaaaagggggacctggcgcacctggtgctcctggccctaagggcgaatcgggcgactacaaagccacgcaaaaaatagcattttccgccacaagaacaatcaatgtgccactccggagggaccaaaccattagattcgaccacgtaattactaatatgaataataattatgaaccttag

SEQ ID NO: 218956 - DNA, 738 bp, synthetic construct
  misc_feature 1..738: note = Description of Artificial Sequence: Synthetic coding sequence
  source 1..738: mol_type = other DNA
atggatgtaggaccttcctctttgccgcatcttggactgaagctgttactgctgctgctgctgctgccccttcgaggccaagccaacacaggctgctatggcatcccaggaatgcctggacttcctggggcaccagggaaagacggttatgatggccttccgggtcccaagggagaacctggcatcccggcaatccctgggattcgtggccctaaaggccaaaagggggagccagggttgcccggtcatccaggcaagaatggtccgatggggccacccggaatgcccggtgtccctggccctatggggattcctggtgaacccggagaagagggcagatacaaacagaagttccagtcagtgtttactgtcactaggcagacccatcagccaccagcaccaaattctctgattcgtttcaatgcagtcttaactaacccccagggggactacgatacatcaacaggcaagtttacttgtaaggtacccggtctgtattacttcgtgtatcatgcgtcacacacagccaacctgtgcgttttgctctacaggtctggggtgaaggtagtgacgttttgtggacatacttctaagaccaaccaggtgaactcgggtggggtgcttttgcggctgcaggttggagaggaggtgtggctggccgtgaatgactactacgatatggtcggcattcaggggtccgattccgtcttttcaggatttttgttgtttcccgattag

SEQ ID NO: 218957 - DNA, 738 bp, synthetic construct
  misc_feature 1..738: note = Description of Artificial Sequence: Synthetic coding sequence
  source 1..738: mol_type = other DNA
atggatgtgggaccgagtagcttacctcatcttggattaaaacttctgttgctgctgcttctcttgcctctgagaggacaagccaacaccggttgctatgggatcccaggaatgcctggcctgccgggagcaccaggcaaggacgggtatgacgggttgccaggtcccaagggcgaacccggtatccccgctatacctggtatacgcggacctaagggccagaaaggcgaaccaggcctgcctggccatccaggaaagaatgggcctatgggaccgcctgggatgcccggagtgcccggaccgatgggcatcccgggtgaacccggagaagagggcagatataagcagaagtttcagtcggtgttcacagtgacccgccagacgcaccaaccgccagcccctaattccctcatcagattcaacgctgtgctcaccaatccacagggagactacgatacgtccaccgggaagtttacctgcaaagtccccggtctgtactattttgtgtaccacgcttcacatacagccaatctgtgtgtccttctgtacaggtctggtgtgaaggtggtgaccttctgcggccatacttcaaaaacaaatcaggtcaatagcgggggtgtgttgttacgactgcaggtaggcgaggaagtctggctcgccgtgaacgattattacgacatggtcggaatccaggggtctgatagcgtgttctctgggttcctcctgttcccagactag

SEQ ID NO: 218958 - DNA, 738 bp, synthetic construct
  misc_feature 1..738: note = Description of Artificial Sequence: Synthetic coding sequence
  source 1..738: mol_type = other DNA
atggacgtaggcccatcaagcctgccacatctaggcctcaaactgctgcttctgctgctgctccttcctctccgcggtcaggcaaacaccgggtgctatggcatacccggaatgccagggctccctggcgcaccgggtaaggacgggtacgatggcctccctggaccaaagggtgagccaggcatcccagcgattcctggtatccgtggtcccaagggccagaagggcgagcctgggttacctggacatcccggtaagaatggccctatgggtcctcctgggatgcctggcgttccgggacccatggggattcccggagagcctggtgaagagggaaggtacaagcagaaatttcaaagcgtgttcaccgttacccgccaaacgcatcagccccctgcaccgaactcactgattcgattcaacgccgtcctaacgaatccgcagggagattatgatactagcacaggcaagttcacttgcaaggtgccaggattgtattatttcgtgtatcatgcctctcacaccgctaatctctgcgtgctgctgtatagatccggtgtcaaggtggtgactttttgtggtcacacctccaagacaaaccaggttaattccggaggggtgctgctcaggctacaagtcggagaggaggtttggttggctgttaacgattattatgacatggtcggcatccagggctcggattctgtgtttagcggatttctgctcttccccgattag

SEQ ID NO: 218959 - DNA, 777 bp, synthetic construct
  misc_feature 1..777: note = Description of Artificial Sequence: Synthetic coding sequence
  source 1..777: mol_type = other DNA
atgttactggtcctagtggtcctaatacccgtgttggtcagtagcggcggacccgaaggccattatgagatgcttggaacttgccgcatggtctgcgatccgtaccctgcacgaggacccggagctggcgcacggacagatggcggtgatgcgctcagtgagcagtccggggctcctcccccttctaccctggtgcaagggccacagggaaaacctggcagaaccggcaagccaggccctccaggacctcctggggatcctggaccccctggacccgtgggacctcccggagagaaaggagagccgggtaaaccgggtcccccaggcctgccaggggctggtgggtcaggcgctattagcaccgctacgtatacgaccgtccccagggtcgctttttacgcaggcctgaagaatcctcacgagggttacgaagttctgaagtttgacgatgtcgtcactaacctgggtaataactatgatgcagccagtggtaaattcacctgcaatatcccgggaacctacttctttacctatcatgtgctgatgagaggcggtgatgggacatcaatgtgggcggatctgtgcaagaatggtcaggtccgcgcatcagccatcgcccaggatgctgatcaaaactacgattacgcttccaattccgtgatcctgcatcttgatgctggagatgaggtcttcattaagcttgatggagggaaagcccacggcggaaacagcaacaagtacagcacattttcagggttcataatttactccgattag

SEQ ID NO: 218960 - DNA, 864 bp, synthetic construct
  misc_feature 1..864: note = Description of Artificial Sequence: Synthetic coding sequence
  source 1..864: mol_type = other DNA
atggcccttggtctcctcattgctgtcccattactcctacaagcagccccaagaggagcagcgcactatgagatgatggggacttgcagaatgatttgtgatccttacaccgcggctcctgggggagaaccccctggtgccaaggcccagccgccaggcccatcaacagcagcgctcgaggtgatgcaagatctgtcagccaatccacctcctccatttatacagggcccaaagggcgacccgggacggcctggcaaacccggtcctcggggaccgccaggtgagccaggcccacccggaccaagaggtcccccaggggagaagggcgatagcggaaggcccggtcttccagggctgcagctcactgcgggaactgcctccggcgtcggtgttgtcggaggcggtgcaggcgttgggggagatagcgaaggggaagtgacctcggcgctcagcgcgaccttctccgggcctaagattgctttttatgttgggctgaagtctccgcacgaagggtatgaagtgctaaaatttgatgatgttgtcacaaacttggggaaccattacgaccccacaacaggcaaattctcctgccaggtgcgcggaatatacttcttcacttatcacattttaatgcgcggaggcgacggaacttctatgtgggcagacctgtgtaagaatggtcaggttagggcgtcagccatagctcaggatgccgatcagaattacgactatgctagtaactcagtcgtgttgcacctggactctggagatgaggtgtatgtgaagctggatggaggaaaggcgcacggcggaaacaacaacaagtatagcaccttctcaggtttcttactgtaccccgactag

SEQ ID NO: 218961 - DNA, 2007 bp, synthetic construct
  misc_feature 1..2007: note = Description of Artificial Sequence: Synthetic coding sequence
  source 1..2007: mol_type = other DNA
atgagcgtgcggttccgagtgggcagggaagagaatgcccagtggtggctgctgtacctcctggtacccgcactgttctgccgtgcaggaggatccatccccatccctcaaaaactattcggggaagtgacttccccactctttcctaagccttaccccaacaacttcgaaacgacaacagtgatcaccgtacccacgggctaccgggttaagttggtcttccagcaattcgacctggagcctagcgaaggctgcttttatgattacgtgaaaatatccgctgacaaaaagagcttaggccgtttctgtggtcagttgggttctccacttggcaatccacctggaaaaaaggaattcatgagccagggcaacaagatgctattgacctttcacacagattttagcaacgaagagaatggcactattatgttttataagggatttctggcgtattatcaggcagtggaccttgacgaatgcgctagccggtccaagtccggagaagaggatccccagccccaatgtcaacacctgtgccataactacgtgggaggctacttttgttcctgccggcctgggtacgaattgcaagaggaccgccacagttgtcaggctgagtgcagctctgagctgtataccgaagctagcggctatatttctagtctggaatatcctaggagttacccgccagatcttcggtgtaattattctattagggtcgaacggggactgacgcttcatctaaagtttctggaaccattcgatatcgatgatcaccagcaggtgcactgtccctacgatcaactacagatctatgccaacggaaagaatattggagagttctgcggcaagcagcgccctcccgatctggacacctcttccaatgccgtggatttgttgttcttcacagacgagtccggagactccagaggatggaaactgagatacaccaccgagatcatcaaatgtccccaaccgaaaactctggacgaattcactatcatccagaatttgcaaccccagtatcaatttcgagattatttcattgctacctgtaaacagggttatcagctcatcgaaggaatccaggtggtggcgggagttgtggatgtgagcgcgggacgagtgagctggagcacgagcagccagacctgttgcacaagagtttatacctgtaccgcccagggaatttggaagaacgaacagaaaggcgagaagatcccacggtgtcttccagtgtgtggtaagccggtgaatccggtcgagcagcggcagaggatcataggtggacagaaagccaagatgggtaatttcccatggcaggtgtttaccaatatccacgggagaggcggaggggctctgctcggcgaccgttggatcctcaccgctgctcacactctgtatcccaaagaacatgaggctcagagtaatgctagtctagacgtgttcctcggtcatactaatgttgaagagctgatgaagctgggcaatcacccgatcagacgagtttccgtccaccccgactaccggcaggatgagtcatataactttgagggcgacatcgccctactggaactggaaaattcagtgacgcttggaccgaatttgcttcccatatgtctgcctgacaatgataccttctacgatcttggactgatgggctacgtgtccggctttggggtaatggaagagaaaatcgcccatgatctacgtttcgtgcgcttgccagtcgctaacccacaggcctgtgaaaactggctccgcggtaagaatcggatggacgttttctctcaaaacatgttttgcgcgggacatcctagcctaaaacaggacgcctgtcaaggggactccggtggagtctttgctgtgcgtgacccgaatacagaccgatgggtggccaccggaatcgtttcctggggtattggatgttcacggggatacggtttttacaccaaagttctcaattatgtcgactggatcaagaaagagatggaggaggaagattag

SEQ ID NO: 218962 - DNA, 1131 bp, synthetic construct
  misc_feature 1..1131: note = Description of Artificial Sequence: Synthetic coding sequence
  source 1..1131: mol_type = other DNA
atgtggctgctgtatctattggtacccgcactcttctgcagagcgggtggcagcattccaattccccagaaattgtttggtgaggtgaccagccccctcttccccaagccatatccaaacaacttcgagactacgaccgtcatcaccgtccctactgggtatcgggttaagctggtatttcagcaattcgacctcgaaccttctgaaggatgcttttacgattacgttaagatctccgctgacaaaaaaagtttaggcaggttttgcggacagctgggctcacccttgggaaatcctcccggaaagaaggaatttatgtcacagggcaacaagatgctgctgacgttccacacagacttttcaaatgaggagaacggaaccatcatgttctacaaagggtttctggcatactatcaggccgtggatctggacgagtgcgcctcccgatcaaagagcggggaggaggacccccagccacagtgtcagcacctgtgccacaactacgtgggtggttacttctgttcctgtagacctggttatgaacttcaggaggacaggcacagttgtcaggctgagtgtagctcagagctatatactgaggcaagtggatatatttccagtctcgagtatccccgaagctaccccccagacctgcgttgcaactactcgatacgcgtagaaaggggcctgacacttcatctcaagtttctggaacctttcgacatcgatgatcatcagcaggtgcattgcccgtatgaccagctgcaaatctatgcgaacgggaaaaatattggcgagttctgtggcaaacagcggccacccgacctggatacatcttctaatgctgtagatttgcttttttttacagacgagagcggagactctaggggctggaagctgcgatataccaccgagattattaaatgtccacagccaaagacactcgacgagtttactatcattcagaatctccagccacaataccaattccgagactacttcatcgccacatgcaagcaggggtatcaacttatagagggttgtacccccgcacagcacagagcgttcggcagaatgaatcgcagggagcggcgattcctgggggcatgtcagtgcgtggggagtccttag

SEQ ID NO: 218963 - DNA, 1962 bp, synthetic construct
  misc_feature 1..1962: note = Description of Artificial Sequence: Synthetic coding sequence
  source 1..1962: mol_type = other DNA
tggttattgtatctgctcgtgcccgcattattttgtcgcgctggtggttctattccaattccccaaaagctctttggggaggtaacaagccctttattccccaagccatatcccaacaactttgagacaacaactgtaatcacagtgcctacaggctatcgagtcaagctggtctttcagcaattcgacctagaacctagtgagggttgtttctacgattatgtcaagatcagcgctgataagaagtccttgggacgcttctgcggtcagctgggttctccattggggaacccgcctgggaagaaagagttcatgtcccagggaaacaagatgctcctcacattccacaccgacttcagcaatgaagagaacgggacaatcatgttttataaggggtttctggcttactaccaagcagtcgatctggacgagtgtgccagcagatctaaatcaggagaggaggaccctcagccccaatgtcaacacctctgtcataattatgtcggcggttatttctgctcctgcaggcctggttacgagctccaggaagacaggcattcgtgccaggcagaatgtagctccgagctgtataccgaggcctccggatacatctctagcctggagtatcccaggtcttacccgcctgacctgcggtgtaactacagcatcagagtagagcggggacttacattgcacctaaaatttctggagccgtttgatatagacgaccaccagcaagtccactgcccctacgaccaactgcagatttacgcaaatggcaaaaacatcggagagttttgtggaaagcaaagacctccagatttggatacaagcagcaatgcagtcgacctccttttttttaccgatgagtccggcgacagccggggttggaaactcagatacaccacagagataattaaatgccctcagcctaagactctcgacgaattcactatcattcagaatctgcagcctcaatatcagtttagagattattttatcgctacctgcaaacaaggatatcagctcatcgaaggaatccaggttgttgccggagtggtcgacgtttccgcagggagggtatcatggtctacttctagccagacctgctgtacaagagtttacacatgcacagctcagggcatctggaagaatgagcagaagggcgaaaaaatcccccgatgtctgcccgtctgtgggaaacccgttaacccggtggaacagcggcagagaataatcggtggtcagaaagcaaaaatgggtaacttcccctggcaggtatttaccaacatccacgggcgtggaggtggcgcactgctaggtgatagatggattctgacagccgcacacaccctttatccaaaagagcatgaggcgcagtctaacgcaagtctggatgtgtttctcgggcataccaatgttgaggaattgatgaagctcgggaaccatccgatccgcagggtaagtgtgcacccagactatcgccaagacgaaagttacaacttcgagggagatatagcactacttgagctggaaaattctgtgactctggggccaaacttgctccccatttgcctgccagataacgacaccttctatgacctcggtttgatgggatatgtatccggcttcggggtgatggaggagaagatcgctcacgatttaaggttcgtgcgtttgcctgtagcaaatccgcaggcctgcgagaattggctgcgtgggaaaaacagaatggatgtattcagccagaatatgttttgcgcaggacacccatccctaaagcaggatgcttgtcagggggactcaggcggagttttcgcagtccgggatccgaatactgacagatgggtcgcaacagggatcgtctcttggggtatcggttgctctcgcggttatgggttttacaccaaagtgttgaattatgtggattggatcaagaaggaaatggaggaagaagactag

SEQ ID NO: 218964 - DNA, 1464 bp, synthetic construct
  misc_feature 1..1464: note = Description of Artificial Sequence: Synthetic coding sequence
  source 1..1464: mol_type = other DNA
atgccaggcccaagggtttggggaaagtacttatggcgatctccccattctaagggatgtcccggtgccatgtggtggctgttactgtggggagtcctgcaggcctgccctacgagaggaagtgtccttcttgcacaagaactgccacagcagctcacttcgccaggatatcccgaaccctatgggaaaggccaggaatcgtccaccgacatcaaagccccagagggctttgccgtaaggctcgtcttccaggattttgacctggagccaagtcaggattgcgccggagacagcgtcactatctcttttgtggggagtgacccttctcaattctgtgggcaacaggggagccccctggggaggccaccagggcagcgcgaattcgtttcctccggtcggtccctgaggttgacattcagaactcagccatcttccgaaaataagacagcacacttgcataaaggatttttggctttgtaccagaccgtcgctgtgaactactcacagcccatttccgaagccagtaggggaagcgaggcaattaacgctccgggagacaatcctgctaaggtacagaatcactgtcaggagccttactaccaggctgctgcggcaggagcactcacctgtgcaacgcctggcacatggaaggacaggcaggacggtgaagaggtgctgcaatgcatgcctgtgtgcgggagaccagtgacccccattgcccaaaatcagactacccttggatcctccagggcaaaacttggaaactttccctggcaggcattcacctccatccacggccgaggcggtggggctctgttaggagatcggtggatcctgaccgccgctcatacaatataccctaaggacagcgtatctctgcggaagaatcagagcgtcaatgtcttcctcgggcacacagccatcgacgagatgttaaagctcggtaatcatccagtccatcgcgtggtggtacatccagattacagacagaacgaatcgcacaactttagtggagatattgctcttcttgagctccagcattcaataccgctggggccaaacgtcctgcccgtctgtcttcctgataatgaaacactctatagatcaggactgctcggctacgtctctggctttgggatggagatgggatggctcaccaccgagctgaaatatagcaggctgccagttgcaccgcgtgaggcatgtaacgcttggcttcagaagagacaaagaccggaagtgttttccgataatatgttctgcgtaggcgatgaaacgcagcgccattctgtttgccagggagactctggtagcgtatatgtcgtttgggacaaccacgcccatcactgggtggctaccggaattgtaagctggggcattggctgcggcgagggctatgatttttacactaaggtgctgagctacgtggactggataaagggcgtgatgaacgggaaaaactag

SEQ ID NO: 218965 - DNA, 1317 bp, synthetic construct
  misc_feature 1..1317: note = Description of Artificial Sequence: Synthetic coding sequence
  source 1..1317: mol_type = other DNA
atgcccggtcccagggtttggggtaagtacctgtggaggtccccccacagcaaaggttgcccgggagccatgtggtggctcctgctatggggggttctgcaggcctgtcccacaaggggaagtgtactgcttgcccaggaactccctcagcagttgaccagtcccggttacccagaaccctacgggaaggggcaggagagctcaacagacattaaggctcccgaggggttcgcagtccggctggtgttccaggattttgacctggaaccttcccaggactgcgccggtgactccgtgacgatttcgtttgtggggtctgatccctcccagttttgcggacaacagggatccccactgggtaggccaccaggccaacgagaatttgtttcctcaggtcgctccctaaggctgaccttccgcactcaaccctcaagcgagaataaaacggcccacctgcacaagggattcctcgcgctgtatcagaccgtggctgtgaattattcacagcccattagcgaagctagtaggggctctgaagcaattaatgcccctggagacaatccggcaaaggttcaaaatcactgccaggagccatactaccaggcagccgcagcaggggcactgacctgcgccacaccaggaacatggaaagacaggcaggatggagaagaggtacttcagtgtatgccagtgtgcggcaggccagtgacaccaattgcccagaatcagactaccctggggtcctctagggccaagctcggcaacttcccctggcaagcatttacatccattcacgggcgtggcggtggcgctttgctgggagacaggtggattctcacagcagcccacacaatctatccaaaggactcagtgagcctgagaaagaatcagagcgtgaatgtctttctgggacacacggccatcgatgaaatgctgaagttaggaaaccatccggtgcatagggttgtggtgcacccagactatcggcagaacgagagccataacttttcaggcgacatagcactcctggaactgcagcatagcattcccctgggacctaacgtgctgccagtctgcctcccggataacgagaccctgtatagatcaggactactgggctacgtgagtggctttggaatggagatggggtggctgacgaccgaactcaagtacagtcgtctgcctgtggctcccagagaagcgtgcaacgcatggcttcagaagcgccagcgcccagaagttttctctgacaacatgttctgcgtgggggacgaagcgggtgagtcactggagcccggtaggaggcgtttgcagtag

SEQ ID NO: 218966 - DNA, 2067 bp, synthetic construct
  misc_feature 1..2067: note = Description of Artificial Sequence: Synthetic coding sequence
  source 1..2067: mol_type = other DNA
atgtggtgtattgtgcttttttcgctgctcgcatgggtctatgctgagcccaccatgtacggggaaattctctctcctaactatccccaggcataccccagtgaggttgaaaagagttgggatatagaagttcctgagggttacggtattcacttgtacttcactcaccttgatattgagttatctgaaaactgcgcctatgactccgtacagatcatttcgggcgatactgaagagggtagactatgcgggcaacggtcatccaacaaccctcatagtccaatcgttgaggagttccaggtgccatataataagctccaggtgatcttcaagagtgacttcagtaacgaggaaaggttcaccggttttgccgcttattacgtggccactgatattaatgagtgcacagactttgtagacgtgccttgcagtcacttttgtaataactttataggtgggtacttttgtagttgtccacctgaatacttcctgcacgatgacatgaaaaattgcggggttaattgctccggagacgtatttactgcactcatcggcgagattgcctctcccaactatccaaagccttacccggagaactcgcggtgcgaatatcaaatcaggctcgagaagggcttccaagtggttgtcactttgaggagagaagacttcgacgtggaggctgccgattcagccggaaactgccttgactccctcgtgtttgtcgccggagatcggcaattcggaccgtactgcggtcatggatttcctggccctctgaatatcgagacaaaatcgaatgccttggatattatctttcagacagacctgaccgggcaaaaaaaaggctggaaattgcggtatcatggggaccccatgccctgccccaaagaagacacccctaactctgtgtgggagcctgctaaagccaaatacgtgttcagagatgttgtgcagattacctgtttagacggttttgaggtggttgagggcagggtgggagccaccagcttctattctacctgccaatctaatggtaagtggtccaactccaaactgaaatgccagcccgtggactgcgggattcctgagtccattgagaacgggaaggtcgaagacccagagagtaccctgttcggaagtgttataaggtatacctgtgaggagccctactactatatggagaatggcggaggtggggagtatcattgcgctggtaacggctcttgggtcaatgaggtgctgggaccagaactccccaaatgtgtccccgtttgtggagtccctcgcgagccgttcgaggagaaacagcgaattattggcggttcagacgccgatattaagaacttcccttggcaggttttcttcgataacccatgggcagggggtgctttaatcaatgaatattgggtgctgactgctgcacacgtcgtcgaaggaaatcgcgaacctaccatgtatgttgggtccacctccgttcagactagcagacttgccaaatctaagatgctgacccctgagcacgtgtttattcaccccggatggaagttgctcgaagtgcctgagggcagaacaaattttgacaatgatatagcactcgtgcgcctgaaagatcccgttaagatgggtcctacagtgagccctatttgtctccccggtacgtctagtgattacaacctcatggatggagatttagggctgatttctgggtggggaaggaccgaaaagcgagatagggctgtgcgtctaaaggctgctcggctaccggtcgctcctctgaggaagtgtaaggaggtgaaagtggaaaaaccaactgcagatgccgaggcttatgtgtttacgccgaacatgatctgcgcaggaggtgaaaagggcatggattcttgtaaaggagattcgggaggggcatttgcggtccaagaccccaacgacaagacaaaattttatgctgccggtttggtgagttggggccctcagtgcggtacatacggactgtatactagagtgaaaaactacgtggactggatcatgaaaacgatgcaggagaattcgacacctcgagaggactag

SEQ ID NO: 218967 - DNA, 2067 bp, synthetic construct
  misc_feature 1..2067: note = Description of Artificial Sequence: Synthetic coding sequence
  source 1..2067: mol_type = other DNA
atgtggtgcatcgtactgttttccttattggcttgggtgtatgcagaacctacgatgtacggcgaaattctgtcgcctaactatccacaggcctatccctcagaagtggaaaagtcatgggatattgaggtgccagaaggctacggcatccatttgtactttacacatctggacatcgagctgtctgagaattgcgcctatgacagcgtacagataattagcggggatacggaggaaggtcgcttgtgcggacagaggagctccaacaacccccacagtcccattgtggaggagtttcaggtcccctacaacaagcttcaagttatattcaagtcagatttctcaaacgaagagcggttcaccgggttcgctgcatattacgtcgcaactgatataaacgagtgtacagattttgtggacgtcccatgtagccatttctgcaacaactttatcggtggatatttctgtagttgcccccctgagtattttcttcacgacgatatgaagaactgtggagtcaattgttcaggtgacgtgttcacggcattgattggagagatcgcttcccctaactacccaaagccataccccgaaaacagcagatgtgaatatcagatccgattagaaaagggcttccaggtggtagtaacgctccgtcgcgaggacttcgacgtcgaggcagctgactccgcgggaaactgcctggacagtttggtctttgttgcaggagacagacagtttggaccctactgcggacacgggttccctgggcctctgaacatcgaaactaagtcaaacgcactggatatcatctttcaaaccgacctaactggccagaagaaagggtggaagctgagataccacggagaccccatgccttgccccaaagaggataccccaaattctgtttgggagcctgccaaagccaagtatgtttttcgggatgttgtgcagatcacatgcctcgatgggttcgaagtggtggagggtagagtcggagctacctcattctacagcacttgtcagtcaaacggaaagtggtcgaacagcaagttaaaatgccagcctgtggactgtggtattccagaatcaattgaaaatggaaaagtggaggaccccgagtctaccctcttcggatctgtgattaggtacacttgtgaggagccatattactacatggagaacggaggtggaggcgaatatcattgtgccggtaacggaagttgggttaacgaagttctaggccctgaattgcctaaatgtgtgccggtttgtggcgtccctcgagagccatttgaagaaaagcagcgtatcatagggggatctgacgctgacattaagaattttccatggcaagtgttcttcgacaatccttgggctggcggtgcccttattaatgaatactgggttctgacagcagcccacgtcgtggagggcaacagggaacccactatgtacgttggtagcacttctgtgcagactagccgcttggccaagtctaaaatgttaactccggaacacgtgttcatccatccgggatggaagctgctggaagtccctgagggccgaacgaattttgacaatgacatcgctctggtgagactcaaggaccccgtgaagatgggccctacggtgtcccccatctgtctccctggcacctcctctgattataaccttatggatggagacctcgggctaatctccggctggggtaggaccgaaaagagggaccgggcagtccgcttgaaggctgctagactgcctgtcgccccactgcgcaaatgcaaggaggtgaaggtggagaagccaactgccgacgctgaggcatacgtgttcaccccaaacatgatctgtgccggtggggaaaaggggatggactcctgcaaaggcgattcagggggagccttcgccgtgcaagatcccaacgacaaaacaaaattttacgcggcagggttggtgagctggggccctcaatgcggcacctatggtttgtatacccgcgtgaaaaattacgttgattggatcatgaagacgatgcaggaaaacagcactcctagagaagactag

SEQ ID NO: 218968 - DNA, 2049 bp, synthetic construct
  misc_feature 1..2049: note = Description of Artificial Sequence: Synthetic coding sequence
  source 1..2049: mol_type = other DNA
atgtatggcgaaatcctttcccctaactatccccaggcctacccctccgaagtcgagaaatcatgggacatcgaggtccctgaggggtacggaattcacctgtattttacccatctggatatagaactgtccgagaactgcgcatacgattccgtgcagataatttcgggcgataccgaggagggaaggttgtgcggacagagatcatcgaacaacccacactctccaatcgttgaagagtttcaagtgccgtacaataagttgcaggtcatattcaagtctgacttctccaacgaggagcggttcactggttttgccgcttattatgttgcaacagataaagacgagtgctccggccgagcgcagctctggaaccacatgagcgatgtaccatgtagccatttttgtaataatttcattggaggttacttttgctcatgcccgccagaatactttcttcatgatgatatgaaaaattgcggagtgaattgctctggtgatgtctttacggccctcatcggagagatagccagccctaactaccctaaaccctatccagaaaactcacgatgtgagtatcagatccgattggaaaaggggttccaagttcacctgtcgctgctcctcaagcttgaatgtagcggcgcaatcacggcccactgctccctggaccttctgggcagcatagctggtgaccggcagtttggaccctactgtggacatggtttccccggtcctctgaacatcgaaacgaagtctaatgccctggatatcatcttccaaacagatctaacaggacaaaagaagggatggaaattgcggtaccatggagatcccatgccttgccctaaggaggatactcccaattccgtttgggagccagccaaggccaaatatgtgttccgcgatgtggtccaaattacatgtctggatgggtttgaggtcgtggaaggacgagtgggcgcaacttctttttactccacatgccagtctaacggtaagtggtcgaacagtaaactaaagtgtcaacccgtcgactgcgggatccctgagtcaatcgagaacggaaaagttgaggatccagagtctacattattcggcagcgtaatcaggtacacgtgtgaagagccttactattatatggagaacggtggaggtggcgaagagcgggagcgaggagagtatcactgcgcgggtaacggatcttgggtaaacgaagtcctgggccctgaacttcctaaatgcgtacccgtctgtggggtcccaagggagccgtttgaagagaagcagcggattatcgggggaagcgacgccgacatcaaaaatttcccttggcaagtgtttttcgacaatccctgggctgggggagccctcattaatgagtattgggtgctgaccgccgctcatgttgtggagggcaatcgagagccaacaatgtacgttggaagcacctcggtgcagacctcaaggttagctaaatctaagatgctgacccctgaacacgtgtttattcatcctgggtggaaactgctggaggtacccgagggtagaaccaacttcgataatgacattgctctggtgcgcctcaaggacccagtgaagatgggacccaccgtgtcccccatctgtttaccaggtacgtcaagcgactacaaccttatggacggcgacttgggattgatttcaggctggggaaggacggagaagagagacagagccgtaagactcaaggccgcacggctgccagtggctcctctgcggaaatgcaaagaggtgaaagttgagaagccaaccgccgatgccgaggcttatgttttcacacccaacatgatttgtgcaggaggagaaaagggaatggactcctgtaaaggggacagtggaggcgcattcgcagtacaggatcctaacgacaagactaaattctacgcagcgggactagtatcctggggcccacaatgtgggacatacgggttgtatacccgcgtgaagaattatgtagattggatcatgaagactatgcaagagaacagtacaccacgcgaagattag

SEQ ID NO: 218969 - DNA, 507 bp, synthetic construct
  misc_feature 1..507: note = Description of Artificial Sequence: Synthetic coding sequence
  source 1..507: mol_type = other DNA
atgtggtgcattgtgttgttctctctgttggcatgggtatacgccgaaccaacgatgtacggtgagatcctcagtcccaactacccccaggcttacccaagcgaggttgaaaagtcatgggacattgaagtgcccgaagggtatgggatccatctgtatttcactcatttggacattgagctatccgagaactgtgcatatgactccgtgcagattatcagcggggatacagaagagggaagactgtgcggccagcgcagctccaataatccacatagtccaatcgtggaggagtttcaagttccatacaataagctccaagtcatttttaagagcgacttttctaatgaggagcggtttacaggatttgcagcttactacgtggcaacagatatcaatgaatgcaccgacttcgttgatgtgccatgctctcacttctgtaacaacttcatcggaggttatttttgctcatgcccgcctgagtacttccttcacgatgatatgtag

SEQ ID NO: 218970 - DNA, 2067 bp, synthetic construct
  misc_feature 1..2067: note = Description of Artificial Sequence: Synthetic coding sequence
  source 1..2067: mol_type = other DNA
atgtggtgcatcgtgttattcagtctgttggcatgggtgtacgccgagccaacaatgtacggggagatcctctcccccaactatccgcaggcctacccctctgaagtggaaaaatcttgggatatagaggttcctgaaggttacgggatccatctgtactttacccatctggacattgagttgagcgagaactgcgcctacgattcagttcaaattatttccggagatactgaggagggtcggttatgtggccagcgcagctcaaataaccctcatagcccgatagtggaggagttccaagttccttataataagcttcaggtgattttcaagagtgatttctccaacgaggaacgattcaccggtttcgctgcttactatgtggcaaccgatatcaatgaatgtacagattttgtggacgtgccttgctcccacttctgcaacaacttcatagggggttatttttgtagctgcccccctgaatacttcctgcacgatgatatgaagaattgcggcgtgaactgctcaggggatgtgttcaccgcacttataggagaaatcgcatcaccgaactaccccaaaccctacccagagaattcccggtgtgaataccagattcgcttagaaaaaggattccaagttgtggtgacactaaggagagaggatttcgatgttgaggctgctgactcagctggtaattgtcttgattccctcgttttcgtagcgggagacaggcagttcggaccttactgcggacacgggttccccggacccttaaacatagaaaccaaaagcaacgccctcgatataatctttcagaccgatcttaccggacagaaaaagggatggaagctgcgataccacggtgacccaatgccgtgtccaaaggaagatactcccaatagcgtgtgggaacctgccaaggctaaatacgtgtttcgggatgtggtgcagatcacgtgtctggacgggttcgaggtcgtggaaggcagggtgggagcgacctcattttacagcacctgtcagtcaaatggaaagtggtcgaactctaagctgaagtgtcagcccgtggactgtggtatacctgaaagcattgaaaacggcaaggtggaggatccggaatccacgctgttcgggtcggttatcaggtatacctgtgaagagccttattattacatggaaaacggtgggggtggtgaataccactgtgcaggaaacggtagctgggtgaatgaggtgctaggcccagagttgcctaaatgcgtgcccgtgtgtggagttcccagggagccctttgaggaaaagcagcgcattattggcggtagcgacgcggatatcaagaacttcccgtggcaggtgttctttgacaacccctgggccggaggtgcccttattaacgagtactgggtgcttacggcagcccacgtggttgagggcaaccgtgaacctactatgtatgtgggctccacaagtgtccagacaagccgcctggcgaagtctaaaatgctgactcccgagcacgtgtttatccaccccggatggaaattgttggaggtgcctgagggcagaactaactttgataatgacatcgccctggtgcgtttgaaagatccggttaagatggggccaaccgtgagccctatttgcttacccggaacatctagtgactacaaccttatggatggagacctaggcttgatctccggctgggggcgtaccgagaagcgggaccgggcagtccggttgaaagctgcccgtcttcccgtggccccactgcgaaaatgcaaggaggtcaaggtggaaaagccaactgccgatgccgaagcttatgtgttcacgccgaatatgatatgcgcaggcggagaaaaggggatggactcatgcaaaggcgacagcggaggggcattcgccgtgcaggaccccaacgacaagacaaagttctatgcagccggactggttagctggggtccacaatgcgggacatatggcctttatactcgcgtaaagaactacgtcgattggataatgaagaccatgcaagaaaattcaacccccagagaagactag

SEQ ID NO: 218971 - DNA, 312 bp, synthetic construct
  misc_feature 1..312: note = Description of Artificial Sequence: Synthetic coding sequence
  source 1..312: mol_type = other DNA
atgtggtgtatagtcctattctccctgctcgcctgggtgtacgcagaaccaaccatgtacggcgagatcctttctccaaactacccacaggcctacccaagcgaagtcgagaaaagctgggacattgaagtgcctgagggctatggcatccacttatacttcacccacctggacatcgaactctccgagaactgcgcctatgattcagtccaaatcatatctggtgatacagaagagggcaggctgtgcggacaaagatcctccaataatcctcattctcccatcgtggaagaattccaggtgccttattag

SEQ ID NO: 218972 - DNA, 306 bp, synthetic construct
  misc_feature 1..306: note = Description of Artificial Sequence: Synthetic coding sequence
  source 1..306: mol_type = other DNA
atgtggtgtattgtacttttctctctgctggcatgggtttatgccgaaccaaccatgtacggtgaaatcttatcccctaattacccccaggcctatccatctgaagtggagaagagctgggatatcgaagtcccagaagggtacggcatccatctctatttcacccacttagacatcgaattaagtgaaaattgcgcctatgattccgtccaaattatctctggagatactgaagagggacggctgtgcgggcagaggtcttccaacaatccccactctccaatcgtggaagaattccaggtgtag

SEQ ID NO: 218973 - DNA, 2259 bp, synthetic construct
  misc_feature 1..2259: note = Description of Artificial Sequence: Synthetic coding sequence
  source 1..2259: mol_type = other DNA
atgggcccactgatggtgctattttgcctcttattcctgtatcctgggcttgctgacagcgccccatcgtgcccccaaaatgtgaatatatccggcggtaccttcacactgtctcatggttgggctccaggatcactgctgacatattcatgcccgcagggattgtaccccagcccggcaagtcgcctatgcaaatctagtgggcagtggcagacgcccggtgccacgcggtcgctcagtaaggccgtttgtaaacccgtgagatgccctgctcctgtctccttcgaaaatggaatctacactccaaggttgggatcctatcctgtaggcggtaacgtgtccttcgagtgcgaggatggctttatattaagaggcagcccagtgagacagtgtcgcccaaacggaatgtgggacggcgaaaccgcagtctgtgataatggagcgggacattgccccaaccctggaatctcactgggagctgttcgaaccggtttcagatttggtcatggggacaaggtgagatataggtgctcttccaaccttgtgctgacggggtccagcgaaagagagtgccaagggaatggggtatggtctggcacagagccaatctgtcgacagccgtactcctacgacttcccagaagacgtggcacctgctcttggcacttctttctcgcatatgctcggagccacaaaccctacacagaagaccaaggaaagtctgggacgcaaaatacagattcagcgcagcggtcatcttaacctgtatttactgctcgactgttcccagtctgtctcagagaatgactttcttatcttcaaggagtctgccagtcttatggtggaccgaattttctctttcgaaataaatgtatcagtggctattattactttcgcttctgagcccaaagtgctgatgtctgtcctgaacgacaactctagggacatgacagaagtcatctctagcttggagaatgcaaattataaagaccatgagaatggcaccgggacaaacacgtacgcggctctgaactctgtctatctcatgatgaacaatcagatgcggttgctgggtatggagaccatggcttggcaggaaattcgccacgccatcatactgctgaccgatggcaaatcgaacatgggtgggtctccaaaaactgccgtagaccatatcagggagatactgaacataaatcaaaagagaaatgattatttggatatctacgctattggagtcggcaagctggatgtcgactggagggagttgaacgaattgggttcaaagaaagatggggagcgccacgcctttatccttcaggacaccaaggccctccatcaggtgttcgagcacatgctggatgtaagtaaacttactgacaccatctgcggcgttggcaatatgagtgcaaatgcctccgatcaggaacgcacaccctggcatgtcactatcaagcccaaaagccaggagacatgcaggggagcccttatttctgatcaatgggtgctgaccgctgcccactgtttcagggacgggaatgatcactccttgtggcgcgttaacgtgggtgatccaaagtctcagtggggtaaagaatttctgattgagaaggctgtgatctccccaggttttgacgtctttgccaagaagaaccagggtattctggaattttatggagacgatatcgccctgctaaaactggctcagaaagttaagatgtctactcatgccaggccaatctgtctgccttgtacgatggaggctaatctggcccttcgcaggcctcagggctccacctgtcgggaccacgagaacgagctgctcaataagcagtccgtccccgctcactttgtggcactgaacggaagcaaactcaacattaatctcaaaatgggcgttgagtggacatcatgcgccgaggtcgtgtcccaggaaaaaaccatgtttcccaatctgacagacgttagagaagtggttacggaccagtttttgtgctctggcacacaggaggacgagtccccatgtaaaggcgaatccggcggagcagtgttcttggagaggagatttagattttttcaggtaggactagtcagctgggggttgtataacccttgccttggaagcgcagataaaaattccagaaaaagagccccacgctccaaggtccctccccctagagattttcacattaatctctttaggatgcagccctggttaaggcagcatcttggcgatgtgttaaattttttacctttgtag

SEQ ID NO: 218974 - DNA, 1134 bp, synthetic construct
  misc_feature 1..1134: note = Description of Artificial Sequence: Synthetic coding sequence
  source 1..1134: mol_type = other DNA
atgactgaggtcatttcttctctggagaacgccaactataaggatcatgaaaacggtacaggcaccaacacttacgctgctttgaatagcgtgtacctcatgatgaataaccaaatgaggcttttgggaatggaaacgatggcatggcaggagatccgccatgcgatcatccttctgactgatggaaagagtaacatgggaggaagtcctaagaccgccgtggaccacattcgagaaattctgaacatcaaccagaagcgaaatgactatcttgatatatatgctattggtgtgggaaagttggacgtggactggagagaattgaacgaattgggcagcaaaaaggatggtgaaagacacgccttcattctgcaagatactaaagccctccatcaggtattcgagcatatgctggatgtgtccaagctcaccgatacaatttgtggggtggggaatatgagcgctaacgcgagcgaccaggagcgtaccccatggcacgtgacaatcaagccgaagagccaggaaacttgtcgcggtgctttaatctccgatcaatgggtgctgacggctgcccattgcttcagagacggaaatgaccactcgctctggcgggtcaacgtcggcgaccctaaatcacaatgggggaaagaattcctgattgaaaaagcagtcatttctcccggattcgatgtcttcgccaagaagaaccagggtattctggagttctatggtgacgatatcgcgttgttaaaactggctcagaaagtaaagatgtctactcacgctcggcctatttgcttgccttgtacgatggaggcaaatcttgccctgcgaagaccgcagggctctacgtgcagggatcatgagaacgaactgctgaataagcagagcgttcctgcccacttcgtggctctcaatggcagtaagctgaatattaacctgaagatgggggttgagtggaccagttgcgcagaagtcgttagccaagagaagaccatgttccccaatttaacagatgtacgtgaagtagtgaccgaccagttcctctgcagcggaacccaagaggacgagagcccctgcaagggcggtagcggggagcttgggagtttgcagcccctaccgtggctgtgttag

SEQ ID NO: 218975 - DNA, 2259 bp, synthetic construct
  misc_feature 1..2259: note = Description of Artificial Sequence: Synthetic coding sequence
  source 1..2259: mol_type = other DNA
atgggtccactgatggtgcttttctgcttactgtttctctaccccggtttagcggattcagccccttcttgtcctcagaacgttaacatctcagggggaacctttactctcagtcatggatgggccccagggtccctacttacgtattcatgtcctcaaggcctgtacccatccccggcatctcgattatgcaagtcctcaggccagtggcagaccccaggagctacaaggtcccttagtaaggccgtgtgtaagcctgtgcgctgccctgctccagtatcttttgaaaacgggatttatactccacgacttgggagctatccagtgggagggaacgtctcctttgagtgcgaggatgggttcatactgagaggcagccctgtgaggcaatgcaggcccaatggcatgtgggacggtgagacagctgtctgcgacaacggcgctggtcactgtccgaaccccggtatttcattgggtgctgtccgcaccggctttagattcgggcacggagataaggtgcgctacaggtgttcaagtaacctcgtccttacgggctctagtgagcgggaatgtcagggcaatggcgtgtggagtggtacagaaccgatctgtagacagccatactcttacgatttccctgaggatgtcgcgcctgcccttggcacttcctttagtcacatgctgggagccacaaacccgactcagaagacaaaggagtctctcggacggaagatccagattcaacgtagcggacatctgaatctctacctgctgctcgattgttctcagagtgtgtcagaaaatgactttctcatcttcaaagagtctgcgagcttaatggtcgacaggattttcagttttgaaataaacgtgtccgtggccatcatcacctttgcctctgagccaaaggtattaatgagcgtgctgaatgataactctagagatatgaccgaggtcattagctccctggagaacgccaactacaaggaccacgaaaacggaacaggtactaatacctacgccgctctaaacagcgtgtatctgatgatgaataatcagatgagacttttgggtatggaaaccatggcctggcaagaaatccgccatgccattattctcttgactgatgggaagtctaacatgggaggttcacccaaaactgccgtagaccatatacgggaaattctgaacatcaaccagaaaagaaacgactatcttgacatatatgccataggagtggggaagctggatgtcgactggcgcgaattaaatgaattgggaagcaaaaaggacggtgaacgccacgccttcatcctccaagataccaaggctctccaccaggtattcgagcatatgcttgacgtcagtaaactgacagacaccatctgcggtgtcggcaatatgagtgctaacgcctcagaccaggagcgcaccccatggcacgtaacaatcaaacctaagtcgcaggaaacttgcagaggggctctaatctctgaccagtgggtcctaacagctgcacactgcttcagggatggcaacgaccactccctgtggagagtgaacgtgggggacccaaagagtcaatggggcaaggagttcctgattgaaaaggccgtgattagccccggatttgatgttttcgctaagaaaaatcaggggattctagaattttacggcgacgatatcgccctcttgaagcttgcacagaaggtgaagatgagcacccacgccaggcctatctgcctaccttgcaccatggaagcaaatctcgccctacggcgaccacaaggcagcacatgccgggaccatgagaatgagctcttaaacaaacagtcagtaccggctcatttcgtagcgcttaacgggagtaagctgaatattaacctgaagatgggagtagaatggacgtcctgtgctgaggtagtcagtcaggaaaagaccatgtttcccaatcttactgatgtgcgtgaggtggtgacagaccaatttctgtgctccggcacacaggaagacgagagcccatgtaaaggcgagtcaggaggggctgtattcttagagcggagatttaggttcttccaggtaggattagtctcctgggggctgtacaatccttgcttaggcagcgccgataagaactctcggaagagagctcccaggtccaaagtgcctcctcccagggatttccacattaacttattccgtatgcagccttggctgagacagcacctgggggatgtccttaatttccttccactgtag

SEQ ID NO: 218976 - DNA, 1578 bp, synthetic construct
  misc_feature 1..1578: note = Description of Artificial Sequence: Synthetic coding sequence
  source 1..1578: mol_type = other DNA
atggttttattctgccttttgttcctctaccccgcagggcattgtcccaacccaggaatttccctgggagccgtgcgaacagggttccgttttggccacggcgacaaagtgcggtatcgatgtagctcaaatctggtgctgaccgggtcctcagaacgtgagtgtcagggcaacggagtgtggagtggtaccgagccaatttgcagacagccatacagctacgacttccccgaggacgtggccccagcacttggtacttccttctctcacatgttgggcgcaaccaaccctactcagaagactaaagaccacgaaaacggaacgggaaccaacacctacgcagccctcaattccgtgtacctaatgatgaacaatcaaatgagactcctcgggatggagaccatggcctggcaggagatcagacacgcaattattttactcacagacggtaagagcaacatgggtgggagcccaaagaccgccgtcgatcatatcagagaaatactgaatatcaatcagaagcgcaatgactatctggacatctacgcgatcggtgtgggcaagctcgatgttgattggcgcgaactaaatgagcttggctccaaaaaggacggggaaagacacgccttcatactgcaggacacaaaggccctacatcaggtgttcgagcatatgctggatgtatctaagttgacagacaccatttgcggagttgggaacatgagcgctaatgcatccgatcaagaacggaccccttggcacgtgactattaagcctaagagtcaagagacctgtagaggcgctctcatcagtgatcaatgggtgcttacagctgcccactgttttcgcgatggtaatgaccatagtttgtggcgagttaatgtaggtgatccaaaatctcagtggggcaaagaatttctgattgagaaggctgttatcagccccggatttgatgtttttgcaaagaagaaccaggggattctagagttctatggggacgatattgctttgctgaaactggcacagaaagtaaagatgtcgactcatgccagacccatctgtcttccttgcacaatggaagcgaaccttgccctgcgtagaccacagggctctacttgtcgagaccacgagaacgagcttctgaacaaacagagcgtaccggctcacttcgtggctttgaacggtagcaaactcaatatcaatttgaagatgggcgtagaatggaccagttgtgccgaggtagttagtcaagaaaaaactatgtttccaaacttgaccgatgtgcgggaggtcgttaccgaccagtttctttgcagcggcactcaggaggacgagtccccctgcaaaggtgagtccgggggagctgtttttctcgagagaagatttagattcttccaggtgggactggtttcatggggtctgtataacccctgcctgggatcagctgataagaattctaggaagagagcgcctcgatctaaagtgcctccaccgagagacttccacatcaatctgtttcgtatgcagccctggcttagacagcatctgggtgacgtgttgaacttcttgcctctctag

SEQ ID NO: 218977 - DNA, 2259 bp, synthetic construct
  misc_feature 1..2259: note = Description of Artificial Sequence: Synthetic coding sequence
  source 1..2259: mol_type = other DNA
atgggacctttgatggtgctgttttgccttctgtttctgtacccaggtcttgctgacagcgccccttcttgtcctcagaacgtaaatatctctggaggtacctttacactaagccacggatgggctcccggtagccttctgacttactcctgcccacaaggcctgtatccatcacccgcaagccggctgtgcaaaagtagcggccagtggcagacacctggggctacaaggagtttatcaaaagccgtctgcaagcctgtcagatgccccgcacccgtgagcttcgagaatggaatttacactccgagattggggtcttacccagtgggcggtaatgtctccttcgaatgtgaggacggatttattcttagaggatcgcccgtgagacagtgtcgcccaaacggaatgtgggacggtgaaactgccgtgtgtgacaatggagctggccactgtcctaacccagggatttctttgggcgcagtgcgcaccgggtttcggttcggacacggcgacaaggtgcgctaccggtgtagcagcaatcttgtcttgaccggtagttccgaaagagaatgtcaaggtaatggagtctggtctggtacagaacccatttgccgacagccttacagctacgactttccagaggatgtagctcctgcccttggtacttctttctcccacatgttgggagccacaaatccgacgcaaaagaccaaagagtcgcttgggaggaaaattcaaatccagaggtcgggacacctgaacctgtacctccttctggattgctcccagagtgtgtctgagaatgattttctcatatttaaggagtcggcgagcctcatggtcgaccgcatctttagctttgagattaatgtgagcgtcgcaataattacctttgccagcgagcccaaagtgctcatgtcagtattgaacgataatagccgcgacatgactgaggtgattagcagtttagagaacgccaactacaaggaccacgaaaacggtacagggactaacacttacgcagccctaaacagcgtttatctaatgatgaacaatcaaatgcgcctcctgggtatggagactatggcttggcaggagattagacacgctattattctgctgacagacggtaaatcaaacatggggggatctcctaaaacagcagttgaccacattagagaaatcctgaacatcaaccagaagcgaaatgactatctggatatctatgcaattggagtcggaaagcttgatgtggactggcgggaactcaatgagctgggttccaagaaggatggggagcgccatgcttttatcttgcaggacaccaaggccctccatcaggtgttcgaacatatgcttgatgtgtcaaagcttacagacaccatttgcggggtgggcaacatgtctgccaacgccagcgaccaggagcgcaccccttggcacgtgaccattaagccgaagagccaggagacatgccggggagcgttaatctcagaccagtgggtcctcacagctgctcactgctttagggatggaaacgatcactccctttggagagtaaacgtgggtgaccccaaatcacagtggggcaaggaattccttatcgaaaaggctgtgatcagtccgggattcgatgttttcgctaaaaagaaccagggcatcctggagttctacggcgacgatattgctctgctgaaattagcacagaaggtcaaaatgtctacacacgcaaggccaatctgtcttccctgcaccatggaagccaatctggctcttcggcgaccccagggaagtacctgccgggatcacgaaaacgaacttttgaacaagcaatctgtccctgcccactttgtagccttgaatggatcaaagctcaacattaacctgaagatgggggtggagtggacaagctgcgccgaagtggtgagtcaggagaagactatgtttccaaacctgaccgatgtgcgcgaggtggtcacagaccagtttctgtgctccggaacgcaggaggatgagtcaccctgcaaaggtgaatcgggtggagccgtctttcttgaacgacgcttccgcttctttcaagtggggttggtcagctggggcctctataatccctgtctcggcagcgcagacaagaactcccgcaagcgcgctcccaggtcaaaggtgcccccacctcgggacttccatattaacttgttcagaatgcagccatggctaagacagcacctgggtgacgtactgaatttcctccccctgtag

SEQ ID NO: 218978 - DNA, 1578 bp, synthetic construct
  misc_feature 1..1578: note = Description of Artificial Sequence: Synthetic coding sequence
  source 1..1578: mol_type = other DNA
atggtgctgttctgtcttttgtttctgtacccggctggccactgcccgaatccaggaatctcgctgggagcagtccgcacggggttccgatttggtcatggggacaaggttcgttacagatgcagtagtaatttagtgctaacgggaagtagcgagcgagaatgccaggggaacggggtgtggagcggaacagaaccgatttgcaggcaaccttactcgtacgatttcccagaggatgtggccccagcattagggacgtcattcagccacatgctgggggctaccaatcccacccagaagactaaagaccatgaaaacggcaccgggactaatacctatgcagcattaaatagcgtttatttgatgatgaataatcagatgcgcctgttggggatggagacaatggcctggcaggagattaggcacgctatcatcctcttaacagacggaaagtccaacatgggcggtagtccgaaaaccgcagtggatcacattagggagattctaaatatcaatcagaagagaaacgattaccttgatatatatgccattggcgttgggaagctggacgtcgattggagagaactcaacgagttggggtcaaagaaggacggtgagcgccacgcttttatactgcaggacacaaaggcattacaccaggtatttgaacacatgctggatgtctccaagctgaccgacaccatctgtggcgtggggaacatgtctgctaatgcatctgatcaggagaggactccatggcacgtgaccattaaaccaaaatcgcaggagacctgtcgtggtgcgttgattagcgaccaatgggtgctgacagcagcccactgtttcagggatggcaacgaccactctctatggagggtgaatgtaggcgacccaaaaagtcagtgggggaaagaatttttgatagaaaaggctgtgatcagccctggcttcgatgtcttcgccaagaagaaccagggcatccttgagttctacggtgatgatatcgcgctgttgaagttagctcagaaggtgaagatgagcactcacgcaaggccaatctgcctgccttgcacaatggaggcaaatctcgccttgaggcgccctcagggcagcacctgccgggaccatgaaaacgagctactgaacaaacaaagtgtgcctgcccattttgtggctttaaatggctctaaactgaatattaacctcaagatgggcgtcgaatggacttcatgcgcagaggtggtttcccaagagaagacaatgttcccaaatctgaccgacgtgcgcgaggtcgtcactgaccagttcctgtgtagcggaacacaagaggatgagagcccctgcaaaggagaatcaggcggtgcagtgtttctagagcggaggttccgtttttttcaggtcggactggtgagctgggggctgtacaatccttgcttaggctccgccgataagaactcccgaaaaagagcacctaggagcaaagtgccgcctccaagagacttccatatcaatctgtttcgcatgcagccctggctgcgacagcacctaggcgacgttcttaacttcctgcccctttag

SEQ ID NO: 218979 - DNA, 2259 bp, synthetic construct
  misc_feature 1..2259: note = Description of Artificial Sequence: Synthetic coding sequence
  source 1..2259: mol_type = other DNA
atgggaccgctgatggtgcttttttgcctgttatttctctatccaggcctcgctgattcagctcccagttgtccccagaacgttaacatctccggcggaacatttaccctttctcatggctgggcccctggtagcctgttaacatatagctgccctcagggcctttatcccagtcccgctagcagactatgtaagtcctctggacagtggcaaactcccggagccacgaggtcattgtccaaggccgtgtgcaagcctgtaagatgtcccgctccagtttcattcgagaacggcatctataccccgcgtctgggaagctatcccgtgggcggtaacgtgagctttgaatgcgaggacggttttatcctgagaggatccccagtgcgccaatgcagacccaatggcatgtgggacggagaaaccgcagtttgtgacaatggagcaggacactgccctaaccccggaatctcactcggagccgtaaggacagggtttcgctttggtcatggcgataaggtccgataccgatgctcctccaatctggtgctgactggctcgtcagaacgtgagtgccagggcaatggagtatggtccggcactgaaccaatctgtcgccaaccttattcctacgatttccctgaagacgtggctcccgctctgggcaccagctttagtcacatgctgggagcgaccaaccctactcagaaaacaaaagaatctcttggcaggaagattcagatccagcgatcaggacaccttaatctttatttgttacttgactgctcccagtctgtttcagagaacgattttctcattttcaaagagtccgcttctctgatggtcgatagaatttttagctttgaaataaacgtgagtgtggctatcattacgttcgctagcgaaccaaaagtcctgatgtctgtcctcaacgataattcaagagatatgactgaagttattagtagcctggaaaacgctaattataaagaccacgagaacggcaccggtactaacacctacgctgctcttaactcggtgtatctgatgatgaacaaccagatgcgcctgctgggaatggagaccatggcatggcaagaaatcagacacgccattattctcctcacagacggcaagtcaaatatggggggtagtccgaagacagcagtagaccacatacgagaaattcttaatatcaaccagaagcggaacgattatttagatatctatgctatcggcgtagggaagttggatgtcgactggcgcgaacttaacgagctggggtccaaaaaggatggagagagacacgcattcatcctgcaagacacgaaggcgttacatcaggtgtttgagcacatgctcgacgtgtctaagttaacagataccatctgtggggtaggcaatatgagcgccaacgctagcgaccaagagcggactccatggcacgtgaccatcaaacccaaatcgcaagagacctgccgtggggctctgataagcgaccaatgggtgctgaccgccgcacattgtttcagagatggtaacgaccacagtctctggcgggtgaatgtgggcgatcctaaatcacaatggggaaaagaatttctgattgaaaaagctgtgatctcccccggttttgacgtcttcgccaagaaaaaccagggaatactggaattctatggagacgatattgcccttttaaagctggcccagaaagtgaagatgtctacacacgctcgccctatctgtctgccttgcaccatggaggctaatcttgccttacgaaggcctcaggggtcaacctgccgtgaccatgaaaacgagctgttaaacaagcaatccgtgccggctcacttcgtggcactgaacggatcaaagctgaatatcaacctgaaaatgggggtagaatggaccagctgcgctgaagtcgtgtctcaggaaaaaactatgttccccaatctgacggatgtacgagaagtggtcaccgaccaatttttgtgcagcggaacacaagaggacgagtcaccatgtaaaggtgagagtggtggcgcagtgtttctggaacgtcgctttaggttttttcaggtgggactggtgagctggggcttgtacaatccttgcctaggttcagccgacaaaaatagtcggaaacgagcgccacggtctaaggtgccgcctcctcgtgatttccatattaacctcttcagaatgcagccgtggctgcgtcagcacctgggcgacgtcctgaatttcttgccgctctag

SEQ ID NO: 218980 - DNA, 420 bp, synthetic construct
  misc_feature 1..420: note = Description of Artificial Sequence: Synthetic coding sequence
  source 1..420: mol_type = other DNA
atgggtcctttgatggtcctcttctgcctgctattcctctaccccggtcttgcggacagtgccccttcgtgtcctcagaacgtgaatatctcgggcggaacgttcacactgagtcatggatgggccccaggtagtctattaacttattcctgcccccaggggctgtacccaagcccagcttctcgcctgtgtaaatcttctggccagtggcagacccctggagccactcgcagtctgtcaaaggctgtatgcaagcccgtgagatgcccggcaccagtttcctttgagaatggtatatatacacctagactggggagttaccccgtgggaggaaatgtttcctttgagtgtgaggacggcttcatcctgcgcggttcccctgttaggcaatgccggccaaatggtatgtgggatggatag

SEQ ID NO: 218981 - DNA, 510 bp, synthetic construct
  misc_feature 1..510: note = Description of Artificial Sequence: Synthetic coding sequence
  source 1..510: mol_type = other DNA
atgcgggcactttgcataagggagacgtgctccagtgagctgggattctcgcgtaactggtcccgccgaaaagctggccattgcccgaaccccggaatctcgctgggggcagtgcggacggggtttagattcggccatggcgacaaggttagataccgctgttccagcaacctggtgctgacaggatcatccgaacgtgagtgtcagggcaacggggtgtggagcggtactgagcctatttgtcggcagccctacagctatgatttcccagaggatgtagcccctgctcttggcacaagtttcagccatatgcttggtgctacgaaccccactcagaaaacaaaagaccacgagaacggaactggtactaatacttatgcagctctgaactccgtttatctgatgatgaataatcagatgaggcttctggggatggaaaccatggcttggcaggagatcagacatgccattatacttctcacagatgggaaaagtaatatgggaggatag

SEQ ID NO: 218982 - DNA, 420 bp, synthetic construct
  misc_feature 1..420: note = Description of Artificial Sequence: Synthetic coding sequence
  source 1..420: mol_type = other DNA
atggggccacttatggttttgttctgtctgctgttcctttacccgggactggcagattctgcaccaagctgcccacagaatgtcaacatctccggtggcaccttcaccttatctcatggatgggcccctggctctctccttacatactcatgcccccaggggctgtacccttctccggcttctcgtttatgcaagagttccggccaatggcagaccccaggagcgaccagaagcctgagtaaagcggtctgcaaacctgtgagatgcccagcaccagttagttttgaaaacggaatctatacgccgaggctgggctcttacccagtcgggggtaacgtctcttttgaatgtgaagatggatttatcctgcgtggtagcccggtccggcagtgtagacccaatggcatgtgggatggctag

SEQ ID NO: 218983 - DNA, 2259 bp, synthetic construct
  misc_feature 1..2259: note = Description of Artificial Sequence: Synthetic coding sequence
  source 1..2259: mol_type = other DNA
atggggcctttgatggtgctgttttgtctgctgttcttgtatcctggtctggccgactcggcacctagctgccctcaaaatgtgaacatctcaggcggaaccttcacactgtctcacggctgggcacccggttcgctcctcacctactcttgtccccagggcctgtacccaagcccggcatctcgcctgtgcaaaagtagcggccagtggcagactccaggtgctacacgctctctgtctaaggcggtctgtaaaccagttaggtgtccagctcctgtgagtttcgagaatggaatctacacgcctcgcttgggctcctacccagtgggaggcaacgtgtcattcgagtgtgaggacggtttcattcttcggggaagcccggtccgccagtgcagaccgaacggaatgtgggacggggagaccgctgtctgtgacaacggtgcgggtcactgccccaaccctggaatctcactgggagccgtgagaacgggctttcggtttggacacggagataaagtaaggtatagatgtagctccaacctggtacttacaggcagcagtgaaagggagtgtcaggggaatggtgtgtggtctggcaccgagcccatttgcagacaaccctattcctacgattttccggaggacgtcgcaccagccctcggcactagtttctctcatatgctcggggcaaccaatcctacacaaaaaacgaaggagtcactgggccgaaagatccaaattcagagaagcggacacctgaacctgtacctgctacttgactgttctcagtctgtgagcgagaacgacttcctcattttcaaagagtctgcgagtctgatggtagaccgcatcttctcttttgagattaacgtatctgtcgctattattacttttgcatccgagccaaaagttctgatgtcagtattgaacgacaattccagggatatgaccgaagtcataagctcactggagaacgctaattacaaggatcacgagaatgggaccggcacaaacacttacgctgccctcaactccgtttatcttatgatgaacaaccagatgaggcttctgggcatggagaccatggcatggcaggaaattcggcatgcaattattctactgacggatgggaagtccaatatgggcggtagcccgaagactgccgttgaccatattagagaaatcttaaacataaaccaaaagaggaacgattatctggacatctacgctatcggcgttggcaaactcgatgtcgattggagagagctgaatgagctaggttctaagaaagatggcgaacggcatgcattcattctgcaggacacaaaagctctccaccaggtcttcgagcacatgctggacgtgtcgaaactcacagacacaatctgcggcgtcgggaacatgagcgccaacgccagcgaccaggagcgcaccccctggcacgtgacaataaagcccaagtcacaggagacctgccgaggtgcgctgatatcggatcagtgggtgttgacagccgcacactgctttagagacggcaatgatcactctctttggcgcgtaaacgtaggagaccctaagtcccagtggggaaaggagtttctgattgagaaagcagttatctcccccggatttgacgtgttcgccaaaaagaaccaggggatcctggagttttatggcgacgacattgccctgcttaaactcgcccagaaggtcaaaatgtccactcacgcacgacccatctgtctcccttgtactatggaggcaaacctggccctgcggagaccccagggctctacatgccgcgaccacgaaaatgagctcctcaacaagcagagtgtccctgcccacttcgtggccctgaacgggtctaaattaaatattaaccttaaaatgggcgtggagtggactagctgcgctgaggtggtgtctcaggaaaaaacaatgttcccaaatctgaccgatgttagagaggtcgtcacagatcaatttctctgtagcggaacccaggaagacgagagtccctgtaagggtgagagcggaggcgctgtgttcctggagagacgctttcgcttttttcaggtgggcttagtaagctggggcctgtataatccctgcctcgggagtgcagataagaattcgaggaagcgggctccccgatctaaagtgccgcctcccagggactttcatatcaacttgttccgaatgcaaccttggttaagacaacacctgggcgatgtactcaatttcctacccctctag

SEQ ID NO: 218984 - DNA, 378 bp, synthetic construct
  misc_feature 1..378: note = Description of Artificial Sequence: Synthetic coding sequence
  source 1..378: mol_type = other DNA
atgggccctctgatggtgcttttctgtctgctcttcctttatcctggtctggcagacagcgccccttcctgtccccagaacgtcaatatctcaggcggaacatttaccctgtcccacggctgggcacctgggtcattgctgacatactcttgtccccaggggctctacccgtctcctgcatctcgtctctgtaagtcatcaggccagtggcaaaccccaggcgctacgagaagtttgtctaaggccgtgtgcaaacccggacactgcccaaatccgggaattagtctgggagcggtgcgtactggcttccgtttcggtcacggcgataaggttaggtatcgctgctcatctaacttggtgttgaccggtagcagctag

SEQ ID NO: 218985 - DNA, 510 bp, synthetic construct
  misc_feature 1..510: note = Description of Artificial Sequence: Synthetic coding sequence
  source 1..510: mol_type = other DNA
atgagggcactttgcattcgcgaaacttgtagcagcgagctgggcttcagtcggaactggtcacgccgtaaagccggtcattgccccaatccaggcatttcattgggggctgtcaggacgggttttcgatttggccacggagataaagtgagatacagatgtagctctaacctcgttctgactggaagctcagagcgtgagtgtcagggaaacggcgtgtggtctggtacggagcccatttgtcggcaaccctatagttacgactttccagaagacgtggccccagccctgggtactagtttctcacatatgctcggcgctacaaaccctacccagaagaccaaagaccacgagaatggaactggaactaatacatacgcagcactgaacagcgtgtacctgatgatgaataaccaaatgcgacttctgggaatggaaacaatggcttggcaagagatacgccacgctatcatcttgctgactgacggaaaaagtaacatggggggttag

SEQ ID NO: 218986 - DNA, 1062 bp, synthetic construct
  misc_feature 1..1062: note = Description of Artificial Sequence: Synthetic coding sequence
  source 1..1062: mol_type = other DNA
atgggccctctgatggtactcttttgcctactgtttctttatccggctggccactgcccaaatcccggtatttcactgggggcagtccgcaccgggttccggtttgggcacggggataaagtgcgttatcgttgctcctcaaacttggtgcttactggatcaagcgagagagaatgtcaaggaaatggcgtgtggagcggtacagagcctatttgtcgccagccctacagctatgactttcccgaggatgtagcccctgctctgggcacaagctttagtcatatgctgggcgctactaatccaacccagaagacgaaagaaagcctgggtcgaaagattcaaatccaaaggtcaggccatcttaacctgtacctgctcctggactgcagccaatccgtgtcagagaacgatttccttattttcaaagagtcagcctccctgatggtggatcgcattttttcattcgagatcaacgtaagcgtagcgattattacttttgcctcggagccaaaagtcctcatgtcagtccttaacgacaacagccgggacatgactgaggttatatccagcctggaaaacgcaaactataaggaccatgaaaacggaacaggcacaaatacttatgctgcactgaactctgtctacctgatgatgaacaatcaaatgcgactcctgggcatggagacgatggcctggcaggagataaggcatgccatcatcctgttaaccgacgggaaatccaatatgggtggatccccaaaaaccgccgtcgaccatattcgagagatcctcaacatcaatcagaagaggaacgattatctcgacatttatgcaatcggcgttggaaagctggatgtggattggcgggagctgaatgaattaggatctaaaaaagacggcgagagacacgcatttatactccaggatacaaaagccctgcaccaggtctttgagcacatgcttgacgtgagcaagctgaccgatacaatttgcggcgtgggaaacatgagcgccaatgccagtgaccaggagcgcacaccttggcacgtgaccattaagtag

SEQ ID NO: 218987 - DNA, 2259 bp, synthetic construct
  misc_feature 1..2259: note = Description of Artificial Sequence: Synthetic coding sequence
  source 1..2259: mol_type = other DNA
atgggtccactcatggtgctgttttgtttgctctttctctatcctggcctagccgatagtgctccaagctgtcctcaaaacgtgaatatttcagggggaactttcacactgtcacacgggtgggccccagggtccctgctaacctattcttgtccacagggactgtacccttcccctgcaagccgtttgtgtaagtctagcggccagtggcaaacgccgggagccaccaggtccctctccaaggcagtgtgcaaaccagtgcggtgcccagctcctgtgagcttcgaaaacgggatttataccccaagattaggatcgtatcctgtgggtggcaatgtcagtttcgaatgtgaagatggatttatcctgcgaggcagccccgtgagacagtgtagaccaaatggtatgtgggacggtgagacagcagtatgcgataacggagcaggccactgcccaaatcctggcataagtctcggagccgtgaggactggattcaggtttggacacggcgataaggtgcgatacagatgcagctcaaatttggtgttgactggatctagcgaacgggagtgccaagggaatggagtgtggagtggaaccgaaccaatttgcagacagccttacagctatgatttccccgaggacgttgcacccgctttagggacctccttttctcatatgctcggtgcaacaaaccccacccagaaaaccaaggagagcctaggtcgcaagatccagattcagagatcaggccacttgaacttatacctgcttcttgattgcagtcagagtgtgagcgagaatgattttctgatattcaaggagtcagccagcctcatggtggatagaatcttcagttttgagataaatgtgagtgtggccattataacgtttgctagtgaaccaaaagttcttatgagtgtccttaacgacaatagcagggatatgaccgaggtgatttcatccctggaaaacgcgaactacaaagaccacgagaacggcactgggacaaatacatatgctgccctgaatagcgtgtacctcatgatgaataaccagatgagactactgggcatggagaccatggcatggcaggaaatccggcatgcaatcatcctcctcactgacggaaagagtaatatgggcggtagtccgaagactgctgtcgatcacattcgggagattctgaacatcaatcagaagcgaaacgactacttggacatctacgcaatcggggtagggaagctcgatgtagactggcgggaactgaatgaactgggaagtaagaaggacggcgagagacatgcttttattctgcaggacactaaagcattgcatcaggtgttcgagcatatgctggacgtttctaagttgacagatacaatatgcggagtcgggaatatgtctgctaatgcctcggaccaggagcggactccctggcacgtcactattaagcccaagtcccaggaaacatgcagaggcgcattaattagcgaccagtgggtcctgacagccgctcattgcttcagagacgggaatgaccactccctatggagggttaatgtcggggaccccaagtcacagtggggcaaagaattcctgatcgagaaagctgtgatcagcccaggattcgatgttttcgctaagaagaatcaaggcatattggaattctatggggatgacatagccctgctgaaactcgcccagaaggtgaagatgagtacccatgccagaccaatctgcctgccgtgtacaatggaagccaatctggccctccggaggccccagggctccacctgcagggatcatgaaaatgagttactcaacaagcagtccgtgccggctcactttgtggcgttaaacggatctaagctgaacataaatcttaaaatgggtgtggagtggacatcctgtgccgaagtggtgtctcaggaaaagactatgttcccaaacctgactgacgtccgggaagtcgtgacagaccaatttctctgctccgggacccaggaagacgagtctccatgtaagggtgagtcaggcggagctgtttttctcgagaggcgattcaggttttttcaggtcggattggtaagttgggggctctacaatccgtgtctgggaagtgccgacaagaactcccgcaaacgggcaccacgtagtaaagtgccaccccctcgagattttcatatcaacttgttccgaatgcagccatggctcaggcagcatctcggtgacgtcctcaattttttgcccctgtag

SEQ ID NO: 218988 - DNA, 1062 bp, synthetic construct
  misc_feature 1..1062: note = Description of Artificial Sequence: Synthetic coding sequence
  source 1..1062: mol_type = other DNA
atgggacccctcatggttctgttctgcctcctgtttctctacccagccggacactgccccaatccgggtatctctctaggcgctgtcaggacaggatttcgatttggccacggagacaaagtgaggtataggtgtagttccaacctggtgctgaccggttccagcgagagggagtgtcagggaaacggggtctggagtgggacagaaccgatctgccggcaaccttattcatacgacttccctgaggacgtggcaccagctctgggtacatcatttagccacatgcttggtgcaaccaatcctacccaaaagacaaaggagagcttagggcgaaagatacaaattcagcgcagcggccacctgaacctctacctgctattagactgcagccagagcgtgtcagaaaacgattttctgatcttcaaagagtcagcaagcctgatggtggataggattttctccttcgagattaatgtgtctgtagcgattatcactttcgcctcggagcccaaagtgctgatgagcgtgcttaacgacaacagcagggacatgaccgaggttatctccagtttggagaatgcgaattacaaggatcacgagaacggaactgggactaatacatacgcagctctgaattcggtatatctaatgatgaacaaccagatgcgcctgcttggcatggaaacaatggcgtggcaagaaatacgccatgccattatcctattaactgacggtaagtcaaatatggggggtagtcctaaaaccgcagtagaccacatcagagagattctgaacattaaccagaaaaggaacgactacctggatatctatgccatcggggtgggcaagcttgatgtggattggcgcgaactgaacgagctcgggagcaagaaggatggagagcggcatgcattcatcctacaggacactaaggctttgcatcaggtatttgaacatatgttggatgtgtcaaaactgacggacaccatatgcggagtgggtaacatgagcgccaatgcaagcgatcaggagcgaaccccatggcacgtcaccatcaagtag

SEQ ID NO: 218989 - DNA, 1062 bp, synthetic construct
  misc_feature 1..1062: note = Description of Artificial Sequence: Synthetic coding sequence
  source 1..1062: mol_type = other DNA
atgggtcccctcatggtcttattctgcctcctcttcttgtaccccgctggccactgccctaacccgggaatttctcttggtgccgtgagaacaggattccggtttggccatggcgacaaagtacgatatcggtgctcctctaatctggtactgactggctcctcagaacgcgagtgccagggtaatggtgtgtggtccggcacagaacccatctgtcggcagccttattcatacgatttccccgaagacgttgccccagcacttgggacttcctttagtcacatgttaggggctaccaacccgacccaaaagacaaaggaatctctgggcagaaagattcagatccagaggagtggtcatttgaacttgtacttactgctcgattgttcccagtccgtgtcagagaatgactttctaatctttaaggaatctgcgtcactgatggtagaccgcatcttcagtttcgagatcaacgtgagcgtagccataatcacatttgccagcgagcctaaggtgctgatgagcgtgttaaatgataactcgcgtgacatgacggaggttataagctccctggagaatgcaaattacaaggaccacgagaatgggacgggaacaaacacgtacgctgctctgaacagtgtgtatctgatgatgaataatcagatgaggctgctcgggatggaaacaatggcgtggcaggaaatacgccacgcaatcattttgttgacagatggtaagtctaacatgggcggatctccaaagactgctgttgaccatatcagggaaattctgaatattaaccagaaaaggaatgattaccttgacatctacgcaattggggtcggcaagttagatgtagattggcgggaactcaatgagctcggaagcaagaaggacggcgaacgccacgcttttatactgcaggatactaaggccttgcatcaagtgtttgagcacatgctggacgtgtccaagcttactgatacgatctgcggcgttggcaatatgagcgccaatgcttcagatcaagagaggaccccttggcatgtaactataaagtag

SEQ ID NO: 218990 - DNA, 510 bp, synthetic construct
  misc_feature 1..510: note = Description of Artificial Sequence: Synthetic coding sequence
  source 1..510: mol_type = other DNA
atgagagccctctgtattagggaaacctgtagctccgagcttggcttctctcgcaactggtctcggagaaaggcagggcactgcccgaatcctgggatcagcctgggtgccgtgcgtaccggatttcgtttcgggcatggagacaaagttcggtataggtgttcgagcaatctggtactgactggctccagcgagcgggagtgtcaaggaaatggagtttggtctggcacagaaccaatctgccggcagccctattcctacgattttcccgaggacgtcgcgcctgccctggggaccagcttcagccacatgctcggcgcaactaatcccacccagaagactaaagaccacgagaacgggaccggtaccaatacatatgccgctctgaattccgtgtacttaatgatgaacaaccagatgcgactgctgggaatggagacgatggcctggcaagagatcaggcacgcaatcatattgctcacagatggaaagtcaaatatgggcggttag

SEQ ID NO: 218991 - DNA, 1578 bp, synthetic construct
  misc_feature 1..1578: note = Description of Artificial Sequence: Synthetic coding sequence
  source 1..1578: mol_type = other DNA
atggttctgttttgtttactttttttgtaccctgcaggccactgccctaaccctggcatctctttgggtgccgttcggaccggttttagatttggacacggtgataaagtgcgctaccgctgcagtagtaacctcgtgctgaccggttccagtgagcgagagtgtcagggcaatggtgtatggagcggaactgaaccaatttgccgacagccatattcctatgactttcccgaggatgtcgcccctgccttaggaacaagctttagccatatgctaggggcaacaaatcctacccagaagacaaaagaccacgaaaacggtaccggcacaaatacttatgccgcactgaacagcgtgtatctgatgatgaacaatcagatgcggttgctcgggatggaaactatggcatggcaggaaattcgccatgccattattctccttactgatggcaaatctaacatgggaggaagccccaagacggccgtcgatcatattcgagaaatcctgaatatcaaccagaagcgaaatgattatctggacatctacgcaattggggtgggaaagctggatgtggattggagggaactgaatgagctgggatcaaaaaaagatggcgaacggcacgcattcatactgcaggatactaaggccctccaccaggtctttgagcatatgctagacgtcagtaagttaacggacaccatctgtggtgtcggaaatatgtcagctaacgctagtgatcaagaacgaactccgtggcatgtgacaataaagccaaaaagtcaggagacctgtcgaggagcattaatttcggaccagtgggttttgaccgcggctcattgcttccgtgatggaaatgaccactcactttggagggtgaacgttggtgatcccaaatcccagtggggcaaagaattcttgatagagaaggccgtgattagccccggttttgatgttttcgctaaaaagaatcaagggattcttgaattttatggcgatgatattgcccttttaaagctcgcccaaaaggtgaagatgagtactcatgcccgtccgatatgcctgccctgtaccatggaggccaacctggctttaaggcggcctcagggatcaacttgtcgtgatcatgaaaacgaactcctgaataagcagagcgttcccgcacatttcgtggcactaaacggcagcaaactgaatattaacctcaaaatgggcgttgaatggacatcctgtgccgaggtcgtgtcacaggagaaaacaatgttccccaacctcacagacgtaagagaggtagtcacagatcagttcctgtgttctgggacacaggaggatgagtcgccatgcaagggcgagtccggcggagcggtgttcctcgagcgcaggtttaggttcttccaagttggactcgtgagctggggcctatataacccatgtctcggttcagccgataagaactctcgcaagcgcgctccgcgatctaaggtcccaccaccccgagattttcacataaacctgttcaggatgcagccttggctgaggcaacatcttggcgatgtgctgaatttcctgcccttatag

SEQ ID NO: 218992 - DNA, 1062 bp, synthetic construct
  misc_feature 1..1062: note = Description of Artificial Sequence: Synthetic coding sequence
  source 1..1062: mol_type = other DNA
atgggcccactgatggtcctgttctgcctgctgttcctctacccggctgggcattgccctaatcctgggatatctctcggtgctgtgagaaccgggttcagatttgggcacggggataaggtccggtatcgatgctcctctaatcttgtcctcacgggcagctcagaaagggagtgccaagggaacggcgtctggagcgggacagagccgatatgcagacagccatacagctatgattttcccgaagacgtggctcctgcgttgggtaccagcttctctcacatgcttggggcaactaacccgacccagaagacgaaagaatctttaggtcggaagattcagatacaacgttcaggccatctgaatctgtacctgctgctggactgtagccaatcagtcagcgaaaacgacttcctcatcttcaaagagtccgcctctctgatggttgaccgcattttctcgttcgaaatcaatgtgagcgtggccatcattaccttcgcctcagagccaaaagttctcatgtcagtcctgaatgataacagtagagatatgaccgaggtcatttctagtctcgagaacgccaactacaaggatcatgaaaacggcacgggcacaaacacatatgccgcacttaactccgtgtacctgatgatgaataatcagatgagactgctgggcatggaaaccatggcttggcaggaaatacgacacgctatcattttgctgacagacggcaaaagcaacatgggaggaagccccaaaaccgctgtggaccacatccgagagattctcaatatcaatcaaaaacggaacgactacctagacatctatgccattggcgttggaaagttagatgtggactggcgggagttaaacgaacttggcagtaaaaaagacggcgagagacacgccttcatactgcaagatacaaaggctcttcaccaggtgtttgagcatatgctagacgtcagcaaactcacggacactatttgcggggtgggtaatatgtcagcgaacgcctccgaccaagaaagaaccccatggcacgttactatcaaatag

SEQ ID NO: 218993 - DNA, 405 bp, synthetic construct
  misc_feature 1..405: note = Description of Artificial Sequence: Synthetic coding sequence
  source 1..405: mol_type = other DNA
tgaggccactgtcccaacccaggcatcagcctcggcgctgtgcggaccggtttcaggtttgggcatggagacaaagtcagatacagatgttcctctaatctggttctaaccggatcgagcgaacgagaatgtcagggcaacggggtatggtccggaaccgagcccatctgtaggcaaccgtattcatacgatttccctgaggacgtggctccagctctcggcacaagtttctcgcacatgctgggggctacaaacccaacccagaagacaaaggaaagtctgggtcgtaagatacagatccaacgctctgggcatctgaatctctacctgctcctggactgttctcagagtgtgagtgagaacgattttctgatcttcaaagagagcgcctcactgatggtgtag

SEQ ID NO: 218994 - DNA, 1578 bp, synthetic construct
  misc_feature 1..1578: note = Description of Artificial Sequence: Synthetic coding sequence
  source 1..1578: mol_type = other DNA
atggtactcttctgcctcctgttcttgtatccagcgggacactgccccaaccctggaatctccctgggcgcagtcagaaccggatttcgcttcggtcacggcgataaagtgcggtatcgatgtagctctaacctggttctaactggcagttctgagcgagagtgtcaggggaacggcgtatggtctggtaccgagccaatatgccgacaaccatatagctacgatttccctgaggacgtggccccagctcttggaacatcgttcagccacatgctgggcgctacaaaccctacacagaagacaaaagaccatgagaacggaaccggaaccaatacttatgccgctcttaattcggtgtatctaatgatgaataaccagatgcgcctcttgggaatggagaccatggcatggcaggagatccgccatgccataatcctgctgaccgacgggaagagcaatatgggaggatcccccaagactgccgtcgatcacattcgagagatccttaatatcaaccagaaaaggaacgattacctggatatctacgccattggtgtgggaaaactggacgtggattggcgggagctaaacgaactcggcagcaagaaagatggagaacggcatgcctttattctccaggacactaaggctctgcatcaggtgtttgaacatatgttggacgtgagcaagctcacagacacaatctgcggagtgggtaacatgtcagctaacgcttcagaccaggaacggactccatggcatgttaccatcaagcccaaatcgcaggagacatgccgcggtgctctgatcagtgaccagtgggtgctgactgcggctcattgttttcgagatggaaacgaccattcactgtggagggtcaatgtaggagacccgaagagtcagtggggaaaagaattcctgattgagaaagctgtgatctcccccggtttcgacgtgtttgcaaagaagaaccaggggattctcgaattttacggagatgatatcgcccttctgaagctggcccagaaagtgaagatgtctacacatgcacgcccaatctgtctcccctgcacaatggaagcaaacttggccttaaggcggccacagggcagtacctgccgagaccacgagaacgagttactaaataaacaatctgtcccagctcacttcgtggcactgaacggaagcaagctgaacatcaatctgaaaatgggagttgagtggacgagctgcgccgaggttgtgagccaggaaaaaaccatgttccccaatctcacagatgtgcgagaggtcgtcacagaccagttcctctgcagcggcacacaagaagacgaatccccatgtaagggagagtcaggtggtgccgtattccttgagaggcgttttagattttttcaggtgggccttgtgtcttgggggctgtataatccttgtctcggcagtgccgacaagaatagtcggaaacgggcaccaagaagcaaagtgccccctcctcgtgactttcacataaacctgttcagaatgcagccttggttgcgccagcatttgggagatgtcctgaattttctgcctttatag

SEQ ID NO: 218995 - DNA, 1578 bp, synthetic construct
  misc_feature 1..1578: note = Description of Artificial Sequence: Synthetic coding sequence
  source 1..1578: mol_type = other DNA
atggtcctattctgcctgctgttcctgtaccccgcaggccactgtcccaaccccggaatcagcctcggcgcagtgcggaccggttttcgctttggacacggagacaaggttcgttataggtgctcatccaacctcgtgttaacgggatcttccgaacgggagtgtcaaggtaacggggtgtggtccggcactgagccaatctgtagacaaccgtattcttatgattttccagaggacgtggcgcctgcgctggggacttctttttcccacatgttgggtgcaacaaaccctacgcaaaaaaccaaggaccatgagaacgggaccggaacgaacacttacgcggcactaaattctgtatacctaatgatgaataaccagatgcgcctgttgggtatggaaaccatggcgtggcaagagattagacatgccataatcctgctcaccgatgggaaatccaacatgggcggatcacccaagacggcagtggaccatatccgtgagatcctgaacataaaccagaaacggaatgattacttggatatctatgcaattggagtaggaaagctggacgtcgattggcgagaactcaatgaactcgggagcaaaaaggacggagagcggcacgcttttattttgcaggatacaaaggctctccaccaggtgtttgagcacatgctggatgtgtctaagctgaccgatacaatctgcggagtgggtaatatgtccgccaatgcctctgaccaggagagaaccccctggcacgtcacaatcaagcctaaatcccaagaaacctgtcggggagccctgatatctgaccaatgggtgctgacagcagctcactgctttagggacggaaacgaccacagcctgtggcgggtgaatgtgggtgaccccaaatctcagtggggaaaggagttcttgatcgaaaaggcggttatttcaccgggatttgacgtctttgccaaaaaaaaccagggaatcctggaattctacggtgacgacattgccctactcaaactagcgcagaaggtcaaaatgtccactcacgcgaggcctatctgcctgccgtgcactatggaagcgaacttagctctgagaaggccccagggaagcacttgccgggaccacgagaacgaattgctaaacaagcagtctgtcccagctcatttcgtggctttgaacggaagcaagttgaacattaatctaaagatgggggtggagtggacctcctgcgccgaagtggtatcccaagagaagaccatgttccccaacctcaccgacgtgcgggaggtcgtaacagaccagttcctgtgctcaggcactcaagaagatgaatcaccttgtaagggggagagcgggggagctgttttcttggaacgcagatttcgcttctttcaggtgggcctggtgtcttggggtttgtataacccttgtctggggtccgctgacaaaaactctcgcaagcgggctcccaggagcaaggttcccccaccacgcgatttccacattaatctgttcagaatgcagccgtggctcagacagcacttaggtgatgtgctaaacttcctgcccctctag

SEQ ID NO: 218996 - DNA, 1062 bp, synthetic construct
  misc_feature 1..1062: note = Description of Artificial Sequence: Synthetic coding sequence
  source 1..1062: mol_type = other DNA
atgggccctctgatggtgctgttctgccttcttttcctttacccggcaggtcactgcccaaaccccggaatctctctcggcgcagtgcgtactggatttcgcttcggacatggtgataaggtgagatacagatgctcatctaatcttgtgctgacggggtcgtccgagcgtgagtgccagggtaatggtgtgtggtcaggtaccgaaccgatctgccgccagccctactcttatgacttccctgaagatgtcgctccagcactgggtacatctttctcccacatgctgggcgctaccaaccctacccaaaagactaaagagagcctgggaagaaagatccagattcagagatcaggtcacttgaacctgtaccttctcttggattgttcgcagtcagtatccgagaatgattttctgatttttaaagaaagtgcctcactgatggttgatcgcattttctcttttgagatcaatgtctctgtggctatcatcaccttcgcttcagaaccaaaagttctcatgtcggtccttaatgataactctcgggacatgactgaagtgattagtagccttgaaaacgcgaattacaaagatcacgagaacggaacagggacgaacacctatgccgcacttaattcggtttaccttatgatgaataaccaaatgcgcttgttaggcatggaaactatggcctggcaggagattcgccacgctatcattctcctcaccgatggcaagtccaatatgggcggtagccctaagacagccgtggaccacattcgcgagatactgaacattaaccaaaaaagaaacgattatctcgacatctatgcaatcggcgtaggcaagttagacgttgactggcgggaactcaacgaactggggagcaaaaaggacggtgagagacacgcctttatcctccaagatactaaggccctgcaccaggtatttgagcacatgttggatgtgagcaagttgaccgatactatctgtggagttggaaacatgtcagcaaacgcgagcgaccaagaacgcactccctggcatgtcacgatcaagtag

SEQ ID NO: 218997 - DNA, 477 bp, synthetic construct
  misc_feature 1..477: note = Description of Artificial Sequence: Synthetic coding sequence
  source 1..477: mol_type = other DNA
atgcgcgcactgtgtattcgggagacttgtagctcagaactgggctttagtcggaattggtcaaggaggaaggctggccactgccccaaccctgggatctcgctcggagccgtgagaacgggtttccgcttcggccatggggataaagtgcgttaccgttgttcttccaaccttgtgctgaccgggagcagtgagagagaatgccagggtaacggggtgtggagtggtaccgagccaatctgtagacagccatattcctacgattttccggaagacgttgccccagctctcggcactagtttcagtcacatgctgggcgctactaatcccacgcagaagacaaaagagagcctgggaagaaagatacagatccagcgaagcggacaccttaacctgtacctgctcctggattgctcgcagtccgtatcggagaatgatttcctaatttttaaagagagcgccagcctgatggtatag

SEQ ID NO: 218998 - DNA, 477 bp, synthetic construct
  misc_feature 1..477: note = Description of Artificial Sequence: Synthetic coding sequence
  source 1..477: mol_type = other DNA
atgagggcgctgtgtataagagagacgtgcagctccgaattgggcttttctcgtaattggtcaaggagaaaggccggtcattgtccaaaccctgggatttccctgggggctgtccgaaccggcttcagattcggacatggagataaagtgaggtatagatgcagctcaaatcttgtgctgactggttcctctgagagggagtgtcaaggtaacggagtgtggtcaggcacggagccaatatgccggcagccgtatagctacgacttccctgaggacgtggcacctgccttagggacctccttttctcacatgctgggtgccaccaacccaacgcagaaaaccaaggagagccttggacggaagattcagattcagcgatccgggcatctgaatctgtatttgctcttggactgttctcagtctgtgagcgaaaatgactttctgattttcaaggagtccgcctccttaatggtctag

SEQ ID NO: 218999 - DNA, 978 bp, synthetic construct
  misc_feature 1..978: note = Description of Artificial Sequence: Synthetic coding sequence
  source 1..978: mol_type = other DNA
atgggtacgaggagtgcaatcgccgcaccccgtatcctgtgttctcgcggtctgcggagtggcagcgcgagggcgactggctctggggtagagcggagcccatctgccgcaaatcccaccttgatgacctcgctgcgaacttggcccctcccctgggcattgccatctcccacctgtctaggaccaccaatccccccacgcagacagcgcattttttcattcgagatcaacgtttccgtggccatcatcacctttgcatctgagccaaaggtgctcatgtctgtgcttaacgacaattcaagagatatgacagaagtgatatccagtctagaaaacgctaattacaaggaccatgaaaatggaaccggaactaatacttacgcagcgctaaactctgtttatttgatgatgaacaaccagatgaggcttcttggaatggagaccatggcctggcaagaaatccgccatgccatcatccttctaaccgatggcaaatctaatatgggtggttctcccaagaccgccgtggatcatatacgggaaatacttaatatcaaccagaaacggaatgactatctggacatctacgcgattggcgtcgggaagttggacgtggactggagggagctgaacgaacttgggagcaagaaagatggtgagagacatgcctttatcctccaggatacgaaggcacttcaccaggtgttcgagcacatgctagatgtatcaaaactcacagacacaatttgcggggtgggaaatatgagcgcgaacgcgagtgatcaggagaggacaccctggcacgtcaccatcaagcccaagtcacaggaaacttgcaggggtgccctgatctccgaccagtgggtgctgaccgccgcacactgctttagagacggcaacgatcactccctttggcgggttaacgttggggatccgaaaagtcaatgggggaaagagttcttgatcgaaaaggcctag

SEQ ID NO: 219000 - DNA, 477 bp, synthetic construct
  misc_feature 1..477: note = Description of Artificial Sequence: Synthetic coding sequence
  source 1..477: mol_type = other DNA
atgagagccctgtgtatccgggagacctgctctagtgaactgggcttcagcagaaactggtcccgcagaaaggctggtcactgccctaatcccggtatctccttgggagcggtccgcacaggtttccgcttcgggcacggcgataaagtcagataccgctgcagctccaacctagtgcttacagggtcctctgagcgggagtgccagggtaacggagtgtggtccggaactgaacccatttgtcggcaaccgtacagttatgatttccctgaggacgtggccccagcgctcggcactagctttagccacatgttaggtgcaacaaacccgactcagaagaccaaagagtccctgggcagaaaaattcagattcagaggagtggccatcttaacctttacctgctgctcgattgttcccaatcagttagcgagaatgactttctcatcttcaaggagagcgctagcctaatggtatag

SEQ ID NO: 219001 - DNA, 1062 bp, synthetic construct
  misc_feature 1..1062: note = Description of Artificial Sequence: Synthetic coding sequence
  source 1..1062: mol_type = other DNA
atggggccactcatggtccttttttgtcttttattcctctatcccgcagggcactgccccaatcccggtatctccctaggcgcagtcaggaccgggtttcgtttcggccacggtgataaggtaagataccgatgtagctcaaacctggtcttgaccggttcttccgagcgggagtgccaaggaaatggagtgtggtcagggaccgaacccatatgtaggcagccttactcatatgacttccctgaggatgtggcccctgcgctagggacctctttttcccatatgctgggtgctacaaacccaacacagaagaccaaagaatccctgggcaggaagatccagattcagagatcagggcatctgaacctgtatcttctgctggactgttcacagagcgtcagcgagaatgattttttaatcttcaaagagtccgcttctctgatggtggacagaatatttagtttcgaaataaacgtatcagttgcaatcattaccttcgctagcgagcctaaagtcctgatgagcgttctgaacgacaatagtcgggacatgaccgaggtcatctctagcctggaaaacgctaactacaaagaccacgaaaatgggaccggtaccaacacatacgccgctctgaactcagtttatctgatgatgaataaccagatgaggctactggggatggaaactatggcttggcaggagatacggcatgctataattcttctcaccgacggaaagtccaacatgggaggcagccccaagacagcggtagatcatattagggagattttgaatatcaatcagaagaggaatgactatttggacatatacgccatcggggttggaaagctggatgtcgattggcgagagctgaacgagctgggcagtaagaaggatggcgaacggcacgcctttatcttacaagatactaaagctctgcaccaagtattcgagcacatgctggacgtgagcaaactcaccgataccatttgcggtgtcgggaacatgtcagccaatgccagcgatcaagaaagaactccttggcatgtcacaatcaaatag

SEQ ID NO: 219002 - DNA, 420 bp, synthetic construct
  misc_feature 1..420: note = Description of Artificial Sequence: Synthetic coding sequence
  source 1..420: mol_type = other DNA
atgggcccattaatggtattattttgcctcctgtttctgtacccaggtctggcggattcggctccaagctgtccccaaaatgtcaatatttcaggcggaacattcactctatctcacggctgggcgcctggaagtctcttaacctactcatgccctcaggggttgtatccttcgcccgcttcacggctttgtaagagcagtggacagtggcagacccctggtgcaacaagatccctttcaaaagctgtgtgcaagcccgttagatgcccagcacccgtttctttcgaaaatgggatttatacaccgcgtttggggtcatacccagttggaggtaacgtgtcattcgagtgtgaggatggttttattctgaggggaagccctgtgcgtcaatgtcgaccaaatggcatgtgggacgggtag

SEQ ID NO: 219003 - DNA, 438 bp, synthetic construct
  misc_feature 1..438: note = Description of Artificial Sequence: Synthetic coding sequence
  source 1..438: mol_type = other DNA
tgaggacattgccctaatccgggaatttcacttggcgctgtgcggactggctttagattcggccacggagacaaggtacgatacagatgctctagcaatttggttctgacaggctccagcgagagagagtgtcaaggaaacggagtttggtccggaactgagcctatctgtaggcagccttactcctatgatttccctgaggacgtggcacctgccctgggcacatcctttagtcacatgttgggtgccacaaaccccacacaaaagacaaaagatcacgagaatggcaccggcactaacacttacgcagccctgaactctgtttacctgatgatgaataaccagatgcgccttctgggaatggagacaatggcttggcaggagatacgccacgcgattattttacttacggatgggaagtcaaacatgggaggttag

SEQ ID NO: 219004 - DNA, 378 bp, synthetic construct
  misc_feature 1..378: note = Description of Artificial Sequence: Synthetic coding sequence
  source 1..378: mol_type = other DNA
atgggcccactgatggtactattttgcctccttttcttgtaccctggcctcgccgacagcgccccttcttgtcctcagaatgtgaacatttcagggggtacgtttaccctgagccacggttgggcaccaggatccttgcttacttactcctgtcctcagggtctgtatccttctccagctagccggctctgtaagagctcggggcagtggcagactccgggagcaacccggagtctgtctaaggccgtgtgcaagccaggtcactgtcctaatcccggaatcagtctcggagctgtgagaacaggatttcgatttggacacggcgataaggtccgctaccgttgcagtagcaacctggtgcttactggatcttcctag

SEQ ID NO: 219005 - DNA, 420 bp, synthetic construct
  misc_feature 1..420: note = Description of Artificial Sequence: Synthetic coding sequence
  source 1..420: mol_type = other DNA
atgggaccactgatggtccttttttgcttattgtttctgtaccccggtctggcggactcagccccaagctgtcctcaaaacgtgaatatttccggtggaacctttacactgtctcacgggtgggcccctgggtctctgctgacctattcttgccctcagggattatatcccagcccggcttctcgactctgtaaatccagtggtcagtggcaaacgcctggggctacgcggtctctgagtaaggctgtgtgtaagccagttaggtgtcctgcaccggtgtctttcgaaaacgggatctacacacctcgcctgggcagttaccctgtgggtggtaacgtttcattcgagtgtgaggacggctttatcctgagggggtctcctgtgaggcaatgtcgtccaaatggcatgtgggacggatag

SEQ ID NO: 219006 - DNA, 477 bp, synthetic construct
  misc_feature 1..477: note = Description of Artificial Sequence: Synthetic coding sequence
  source 1..477: mol_type = other DNA
atgcgggctctgtgcattagagagacatgttcttccgaactcggcttcagtcggaactggtctcgtaggaaggctggacactgccctaatccaggcattagcctcggcgcagtcagaaccggattccgcttcggacatggcgacaaagttcggtaccgatgctcatccaacctggtccttacagggagcagcgaacgcgagtgccaaggaaacggagtgtggtctggaactgagcctatctgcaggcagccctattcttacgacttccccgaggatgttgcccctgcgctgggaacctccttttctcatatgttgggcgcaactaaccccacgcaaaaaactaaggaaagtctgggacgcaagatccagattcagagatctggccacctgaacctgtaccttctccttgactgctcacagagtgtaagtgaaaacgatttcttaatattcaaggagagtgcaagtctgatggtgtag

SEQ ID NO: 219007 - DNA, 378 bp, synthetic construct
  misc_feature 1..378: note = Description of Artificial Sequence: Synthetic coding sequence
  source 1..378: mol_type = other DNA
atgggccctcttatggtgctcttctgtctcctctttctttatcctggtctggccgatagtgccccatcttgtccacagaatgtcaatattagcggtgggactttcacactgagccatggctgggctcctgggtccctcctgacctactcctgtccccaagggctgtacccatcgcccgcatctagactgtgcaagagcagcgggcagtggcaaactcctggcgctacgaggagcctcagtaaggccgtgtgcaagcctggacactgtccgaaccccggaatatccctaggggcagtccgcactgggtttcgattcggacatggcgacaaggttcgttatagatgttcgtctaaccttgttcttactggatcatcctag

SEQ ID NO: 219008 - DNA, 1863 bp, synthetic construct
  misc_feature 1..1863: note = Description of Artificial Sequence: Synthetic coding sequence
  source 1..1863: mol_type = other DNA
atgggcccacttatggtgttgttttgccttctgttcctgtaccctgccggacactgtcctaatccaggcatctcgttgggagctgtgcgcacaggatttaggtttggacatggtgacaaagtgaggtatcggtgttcttccaacttggtacttactggctcctccgagagggagtgtcagggcaatggtgtctggtctgggactgagcctatatgtagacagccctactcttatgattttccagaggatgttgcgcctgctctgggaacatcatttagccacatgctgggcgcaaccaacccaacccagaaaaccaaggagtctctgggtcgcaaaatccaaatccagcgcagtggccacctcaatttatatctgctgctggattgtagccagagtgtgtccgaaaacgacttcctcatctttaaagaatctgccagcctcatggtagatcggatattcagcttcgagatcaacgtgtctgtcgctatcattactttcgcttccgaacctaaggttctgatgtcggtcctcaatgacaacagccgcgatatgactgaagtcatttcgtctttggagaacgccaattacaaggatcatgaaaatggcactggaaccaatacatatgccgctcttaactctgtgtaccttatgatgaataaccagatgcgtcttctggggatggaaaccatggcatggcaggagattagacacgccattattctgttaaccgacggcaaatctaatatgggaggcagccccaagacagccgtggatcatattcgggagatccttaatatcaatcagaaacggaatgattacctcgacatctacgctatcggagtaggcaaactggacgttgactggagagagctgaatgaactaggttcaaaaaaggatggtgagaggcacgctttcatcttacaggacacaaaggcccttcatcaggtgttcgagcatatgctggacgtgtccaaattaaccgatacgatatgtggagtgggaaacatgagcgctaacgcttcggaccaggaacgcacaccatggcatgtgaccatcaaacccaaatcccaggagacgtgtcgtggagcattgatcagtgaccaatgggtccttactgccgcacactgtttcagggacgggaacgatcactcactatggagagtaaatgtgggggacccaaagtcccagtggggtaaagagtttctgatcgagaaagcagttattagccccggattcgatgtattcgccaagaaaaatcagggcatcctggaattctatggtgatgacatcgccctgttgaagctcgcacagaaggtgaagatgtccacacacgcacgtccgatctgcttgccctgcaccatggaggcaaatctggcgcttcggagacctcagggatccacttgtagagaccacgagaacgaattgctgaataagcaaagtgtgcccgcacacttcgtggcgctgaatggaagcaagctgaatattaacttaaagatgggagttgagtggacaagttgcgctgaagtagtatctcaagaaaaaactatgttcccaaaccttacagacgtgagggaggtcgttaccgaccagttcctgtgctcgggcacccaggaggatgagagtccctgcaagggagaatccggaggcgctgttttcctggaaagaaggtttcgcttcttccaggtgggtttagtgagctgggggctgtataatccatgcttgggaagcgctgacaagaattctcggaaacgagccccacgatctaaggttccccctcccagagactttcacatcaatttatttagaatgcagccatggctgcgacagcatctcggtgatgtgctcaactttctgccactgtag

SEQ ID NO: 219009 - DNA, 378 bp, synthetic construct
  misc_feature 1..378: note = Description of Artificial Sequence: Synthetic coding sequence
  source 1..378: mol_type = other DNA
atgggaccactgatggtcttgttctgccttttattcttgtaccccggtctcgctgatagcgcaccaagctgtccccaaaatgtgaatatcagtggagggaccttcacgttgtcccatgggtgggcgccagggtccctgctgacatacagttgtccacagggcttatatcctagtcccgctagtcggttgtgtaaaagcagtggacagtggcaaacacccggtgcaacgaggagcctctccaaggccgtctgcaagcctggtcattgtccaaaccccggtatttcactcggcgcagtgcgcacaggctttcgattcgggcatggggacaaggtgagataccgatgctcttcaaatctcgtgctaactggttcatcgtag

SEQ ID NO: 219010 - DNA, 420 bp, synthetic construct
  misc_feature 1..420: note = Description of Artificial Sequence: Synthetic coding sequence
  source 1..420: mol_type = other DNA
atgggaccccttatggtactgttttgcctcctgtttctgtatcccggactggccgattctgcccctagttgtcctcagaacgtgaatatcagcggcggaacttttacactgtcacatggatgggcccctggctctcttcttacgtactcctgtcctcagggtctatatccgtcaccagcatcccggctctgtaagtccagcggtcagtggcagacacctggagctaccagatcgctgtctaaggcggtatgtaaaccagtccgctgccctgcgcctgtgagcttcgagaacggaatctacactcctcgtctaggaagctatcccgtgggcggaaatgtcagttttgaatgcgaggatggctttatcctcaggggctcgccagttcggcagtgtaggccaaacggaatgtgggatgggtag

SEQ ID NO: 219011 - DNA, 378 bp, synthetic construct
  misc_feature 1..378: note = Description of Artificial Sequence: Synthetic coding sequence
  source 1..378: mol_type = other DNA
atgggcccactgatggtgcttttctgcttactgttcctgtaccctggactggctgacagcgccccaagctgtccccaaaacgtgaacattagtggtgggaccttcaccctctcacatggttgggcacctggatctctcctcacctattcctgccctcaagggctgtatcccagcccagcgagtagactctgtaaaagcagtggtcagtggcagacccccggtgcaacacgctccctttccaaagcagtctgtaaaccagggcactgtccaaatcccggaattagcctgggcgcagtacgtacgggcttccgattcggacatggcgataaagtacggtatagatgtagtagcaatctcgtgctgactggaagcagctag

SEQ ID NO: 219012 - DNA, 2259 bp, synthetic construct
  misc_feature 1..2259: note = Description of Artificial Sequence: Synthetic coding sequence
  source 1..2259: mol_type = other DNA
atggggcctctcatggttctgttctgcctgctgttcttatatcctggtttggcggattctgccccttcttgcccacagaacgtaaatatcagtggtggaactttcacattgtcccatggctgggccccaggttccctcctgacatacagctgtccccagggcctctacccctcccctgcctcgaggctgtgcaaatcatccggccagtggcaaactcccggagccacgagatcgctgtcaaaggctgtgtgcaaacccgtgcgctgtcccgcaccagtttcttttgagaatgggatatacacaccaagactggggagttaccctgttggtggcaacgtgagttttgaatgcgaggacggatttatattacggggttcccccgtaagacaatgcaggcccaatggaatgtgggatggggagaccgctgtatgcgacaacggagcaggacactgtccgaaccctggtatctctctcggcgcagtgcggacaggattcaggtttggacatggtgataaggtccgctaccgatgttcatccaaccttgtgctgactgggtcaagtgagcgggagtgtcagggaaacggcgtgtggagtggcacagagcccatctgtcgccagccatactcctatgacttccctgaagacgtggctcccgcactggggacgagctttagccacatgctaggggcaacaaaccccacacagaagaccaaagagagcctgggacggaagatccagatccagaggagcgggcatttaaacctttacttgctactggactgctcacagagtgtttctgaaaatgattttctcattttcaaagagtctgctagtctgatggtagatagaatcttctcattcgaaattaatgtaagcgtggctatcatcacattcgccagcgaacccaaagtgttgatgagcgtattaaacgacaattctcgagatatgacagaggttatctcatccctcgaaaacgcaaattacaaagatcatgaaaatgggacaggcactaacacctacgcggcactcaacagcgtgtacctgatgatgaacaatcaaatgcgcctgctcggaatggaaactatggcctggcaggagatccgacacgcaattatcctcctaaccgacgggaagagcaatatggggggtagccccaagacagccgtcgatcacattcgggagattctcaatattaaccagaagcgcaatgattatctagacatttatgctatcggagtgggaaaactggatgtggattggcgcgagctaaacgaacttggctctaagaaggacggggagcgccacgcattcatactacaagacaccaaagccctgcatcaggtgtttgagcacatgttggacgtctctaaactcactgataccatatgtggtgtcggtaatatgtcagccaatgcatccgaccaggagcggaccccttggcacgttactattaagccaaagtcacaagagacttgccggggagctttgatcagtgaccagtgggtgttgactgccgctcattgctttagagacggcaatgatcatagtttgtggcgcgttaacgttggcgaccctaagtctcagtggggaaaagaattcctcatcgaaaaggcagtgattagccccggattcgatgttttcgccaagaagaatcagggtattctcgagttctatggcgacgacattgccttgttgaagctggcacaaaaagtcaaaatgtctacccatgctaggcctatatgcctgccgtgtaccatggaagcaaaccttgccctccggagaccacaagggtcaacttgtagagaccacgagaatgagttgttgaataaacagtctgttcccgcacacttcgtcgcgttgaacggctctaagttgaacatcaatctcaagatgggagtagagtggactagctgtgccgaagtggtgagccaggagaagactatgtttcccaatctgactgacgttagagaagtggtaacagaccagtttttatgttctgggactcaggaggatgaatctccctgcaaaggcgaatcaggaggagcggtctttctcgaaaggcggtttaggttcttccaggtcgggctggtgtcatggggactgtacaacccatgtctaggttcagcagacaagaactcccggaaacgcgcacctcgttccaaagtgccccctccacgcgacttccatatcaacctgtttcgaatgcaaccctggcttcggcagcatctgggggacgtcctaaacttcttacctctttag

SEQ ID NO: 219013 - DNA, 378 bp, synthetic construct
  misc_feature 1..378: note = Description of Artificial Sequence: Synthetic coding sequence
  source 1..378: mol_type = other DNA
atggggccattgatggtactattttgcctgctgttcctatacccgggtctggccgacagcgcccctagttgccctcagaacgtaaatatctcgggaggtactttcaccctgtcacacggatgggcccctggcagcctccttacctacagttgtccgcaaggactatacccttctcccgcaagccgcctctgtaaatcctccggccaatggcagacaccaggcgctactaggtctctttcaaaggccgtgtgtaaacccggacactgccccaaccccggtatctcactgggagcagtgcggacaggctttcggtttggtcacggtgacaaggtccgctacaggtgctcatcaaatctggtgctgactggtagctcctag

SEQ ID NO: 219014 - DNA, 510 bp, synthetic construct
  misc_feature 1..510: note = Description of Artificial Sequence: Synthetic coding sequence
  source 1..510: mol_type = other DNA
atgcgggcattgtgtattcgcgagacctgctctagcgaactgggcttttctcgcaactggagtcgtagaaaagccggacattgtcctaatcctggaatatccctgggggcagtgcgtacaggcttccgtttcggacatggagataaagtacggtaccgctgctcaagcaacttggtgctgacgggaagctccgagcgggaatgtcaggggaacggagtgtggagcgggacggaacctatttgcagacagccatactcctatgacttccccgaagatgtcgctcctgccctcgggactagcttttctcacatgctgggtgcgactaatcccactcaaaaaacaaaggaccacgaaaacggcactggtactaacacctatgccgcactgaacagcgtctacctcatgatgaacaaccagatgcgccttctcggtatggaaactatggcctggcaggagatccggcacgcaattatcctgctgacagatggcaaaagtaatatgggcggttag

SEQ ID NO: 219015 - DNA, 1578 bp, synthetic construct
  misc_feature 1..1578: note = Description of Artificial Sequence: Synthetic coding sequence
  source 1..1578: mol_type = other DNA
atggtcctcttttgcttgctgttcctgtacccggctggccactgccctaaccccggtatttcgctgggggcagtcaggactggcttccgctttggacacggggacaaagtgaggtaccgctgctctagtaacttggttttaaccggttcctctgagcgggaatgccaggggaatggcgtgtggagtggcaccgagcctatctgtcgccaaccctacagctatgattttcccgaagatgtcgccccagctctgggcacatctttctcccacatgctgggtgcgacaaacccaacacagaagaccaaggaccatgagaacggtaccggcacaaacacctacgccgctcttaactctgtttacctgatgatgaacaatcagatgaggcttcttggaatggagactatggcctggcaggagattaggcatgccataatccttctgaccgacggaaagagcaatatggggggatcccctaagacagctgtagaccacattcgggaaattctgaacataaaccagaagcggaacgactatcttgatatctacgccattggcgtgggtaagctcgatgtggattggcgggagctaaacgagctcggcagcaagaaggacggggagaggcatgcgttcatacttcaggatacaaaagccctccaccaggtcttcgagcacatgctcgacgtgtccaaactcaccgatacaatttgcggagtaggcaatatgtccgcaaacgcctcagatcaggagagaactccctggcacgtcacaattaaacctaagagtcaggagacgtgtaggggtgccctgatctccgatcaatgggtgctcaccgcagctcattgtttccgcgacggaaacgatcattcattgtggcgcgtgaacgtcggggaccctaaatctcagtgggggaaggaattcctgattgaaaaggcggtcatctctccgggttttgatgtgtttgctaagaagaatcaaggaatcttggagttttacggagatgatattgctctgttaaaactagcccaaaaggtgaaaatgtccacccacgctaggccgatttgtctgccctgtacgatggaagcaaatctggccctccggagaccgcagggttccacatgtcgcgaccacgaaaatgagctgctgaacaaacagtccgttcccgcacatttcgttgccttgaacggatcaaaattgaatatcaatctgaagatgggcgtcgaatggaccagttgcgcagaggtggtctcacaggaaaaaaccatgtttccaaatttgactgatgttcgagaagtcgtcacagatcaattcctatgctctggtactcaggaggacgagtcgccttgtaaaggcgagtctggcggagccgtcttcttagaaagacgattcaggttctttcaggtcggactagtatcatggggcttgtataacccctgcctaggctccgccgacaagaactcaaggaaacgagccccaaggagcaaagtgccaccacctagggattttcacattaatctatttaggatgcagccctggttacggcagcatttgggtgacgtcctaaactttctgcctctgtag

SEQ ID NO: 219016 - DNA, 438 bp, synthetic construct
  misc_feature 1..438: note = Description of Artificial Sequence: Synthetic coding sequence
  source 1..438: mol_type = other DNA
taagggcactgtccaaaccccggtatcagtctgggcgcagtccggacgggcttccgcttcgggcacggcgacaaggtcagatatagatgttccagtaacctggtactgacaggatcctccgaaagagagtgtcaagggaacggagtgtggagtggcaccgagccaatctgtaggcaaccttacagctacgacttcccagaagacgtggctccagctctgggcacctcttttagccacatgctcggcgctactaaccctacacagaaaactaaggatcatgagaacggaacaggaaccaacacctacgcggctcttaacagtgtctacctgatgatgaataatcagatgaggctgctcggcatggaaaccatggcctggcaggagattcgacatgccatcatcctcctaactgacgggaagtcaaacatggggggatag

SEQ ID NO: 219017 - DNA, 405 bp, synthetic construct
  misc_feature 1..405: note = Description of Artificial Sequence: Synthetic coding sequence
  source 1..405: mol_type = other DNA
taaggccactgccccaaccccggtatctctctgggggctgtcaggacaggttttaggttcgggcatggagataaggtgcggtatcggtgctcttccaatcttgttttaacagggtctagcgagagggagtgtcagggcaacggagtgtggagcggaactgagcctatttgtagacagccctactcttatgattttcccgaagatgtggctcccgcactgggtaccagtttctcacatatgctcggcgcaaccaatcccacccagaaaacaaaggagagcctaggacggaagatccagatacagagatccgggcatttgaacctatatctgttattggattgtagccagtccgtgtcagagaatgattttcttatctttaaagagtcagcaagcctgatggtgtag

SEQ ID NO: 219018 - DNA, 420 bp, synthetic construct
  misc_feature 1..420: note = Description of Artificial Sequence: Synthetic coding sequence
  source 1..420: mol_type = other DNA
atgggcccactgatggtgctgttctgcctcctgtttctgtatcccggattagccgattcggctccctcttgtccccaaaacgttaacatctccgggggaacattcacactgtcgcatggttgggccccaggcagtcttttgacctacagttgcccccaaggcttgtatccgagccctgcttcacgcttgtgcaaaagctccggccaatggcagacacccggagctactcgaagcctctctaaagccgtctgtaaacctgtgcgttgtcctgcacctgtcagctttgagaacggtatttacactccacgactcggctcttacccggtgggcggtaatgtgagttttgaatgtgaagacggcttcatcttgcgaggcagtcccgtaagacagtgcagaccaaacgggatgtgggacggttag

SEQ ID NO: 219019 - DNA, 420 bp, synthetic construct
  misc_feature 1..420: note = Description of Artificial Sequence: Synthetic coding sequence
  source 1..420: mol_type = other DNA
atgggcccactgatggtgctcttctgtctgctgttcctgtacccaggtcttgccgattcggctcccagctgccctcagaatgtgaatattagcggtgggacctttacgcttagccatgggtgggccccaggtagcctgctgacatatagctgtccccaggggttgtatccatcccccgcttcacgcctgtgcaagtctagcgggcagtggcagaccccaggcgctactcgctccctgagtaaagccgtctgcaaaccggttaggtgcccagccccagtgagcttcgaaaacggaatctacaccccccgattgggctcttacccagtcggtggaaatgtgtcattcgaatgtgaagatggcttcatcctcagaggttcacctgttaggcagtgcagaccaaatggcatgtgggatggctag

SEQ ID NO: 219020 - DNA, 1617 bp, synthetic construct
  misc_feature 1..1617: note = Description of Artificial Sequence: Synthetic coding sequence
  source 1..1617: mol_type = other DNA
atgcgggcactttgcatcagagagacgtgctcctccgaactggggttttctcgcaactggtcgcgccgtaaggccggacattgcccaaacccgggaatctctctcggtgcggttcgaaccggattccggttcggccacggagataaagttcgttatcgctgcagctcaaacctagtgctcacagggagcagcgaacgcgagtgccagggtaatggtgtctggtccggaactgaaccaatatgcagacaaccctattcatatgacttccctgaagacgttgcacctgccttaggcacgtcgttttcgcacatgctgggggctaccaaccctacacaaaagaccaaagaccatgaaaatgggactggaactaatacgtatgcagccctaaactccgtgtacctaatgatgaacaaccagatgagactgctgggtatggaaacaatggcttggcaagagattcggcacgccataatcctactgacagacggcaagagcaatatgggcggaagtcctaagactgcagttgatcatatcagggaaatcctcaacataaaccagaagcgaaacgattatctcgacatctacgcaattggcgtgggcaagctggacgttgattggcgcgaactgaacgagcttgggtctaaaaaggatggggaacgccatgccttcatcctgcaagatacgaaagcattacaccaggtcttcgagcatatgctcgacgtctctaagcttacagacactatctgcggagtcggcaatatgtctgcaaacgcttcagaccaggaacgaacaccatggcacgtgacaattaagcccaagtcgcaggagacctgtagaggcgctctgattagcgatcagtgggtcctgactgccgcacactgctttcgagatgggaacgatcactcattatggagagttaatgtcggtgacccaaaaagtcagtggggaaaagagtttcttatcgagaaagctgtgatttccccaggatttgatgtctttgcaaagaaaaaccagggcattctcgagttctacggcgatgacattgccttgttgaaactggctcagaaggtgaaaatgtctacccatgccaggccaatctgcctgccctgcacaatggaggccaatctcgccctgcggaggccccaggggagcacttgtcgtgatcatgagaatgaattgctgaataagcagtccgtgcctgcacactttgtcgcccttaacggctccaagttgaacatcaatttgaagatgggtgtcgagtggacttcatgcgctgaggtggtcagtcaagaaaaaacaatgtttcctaacctgacagatgtcagagaagtggtgacagaccagtttctgtgctcaggaacgcaggaggatgagtccccttgtaagggcgagtctggaggagcggtgtttctggagaggcggtttcggttctttcaggttggtcttgtctcctggggcctctataacccatgcctaggaagcgccgacaagaatagccgcaagcgagctcctcgctccaaggttcccccacctcgggactttcatatcaatttgttccgcatgcagccatggctacggcagcacctcggtgatgtcctgaatttcctgcccctgtag

SEQ ID NO: 219021 - DNA, 1521 bp, synthetic construct
  misc_feature 1..1521: note = Description of Artificial Sequence: Synthetic coding sequence
  source 1..1521: mol_type = other DNA
atgggcacacgctccgcaatagctgcccctcgtattctttgcagccggggacttaggagcggctccgcccgagccactggctctggcgtcgaacgatctccttccgcggcaatcttctcattcgaaatcaacgtgagcgtggccattatcaccttcgcctctgagcccaaagtactcatgagtgtactgaatgacaacagcagggatatgacggaggtgattagctcattggagaatgccaattacaaggaccacgagaacgggaccggtacgaacacctacgctgccctaaacagtgtttacttgatgatgaacaatcagatgcgattacttggcatggagactatggcttggcaggaaattcgacacgcaattattctgctgaccgatgggaaatcaaacatggggggaagcccgaaaactgccgtggaccacataagagagattctgaatatcaaccagaaacgcaacgattacctcgacatatacgcaatcggggtgggaaagctggacgtcgactggagggaactgaatgaactgggctctaagaaggacggcgaaagacacgcattcatcctgcaggatacaaaggctctgcaccaggttttcgagcacatgctggacgtgagtaaactgaccgatacaatctgtggagtggggaacatgagcgccaacgcatccgaccaagagaggaccccttggcatgttaccattaagcccaaatctcaggagacctgcaggggggcactcatttcagatcagtgggttctcacggcggctcattgttttagagacgggaacgaccattcactttggcgtgtgaacgtaggtgatccaaagagtcagtggggaaaggaatttcttatcgagaaggcggtgatctcacccggattcgatgtcttcgcgaagaagaatcaggggatccttgaattttacggtgacgatattgccctgttaaagctggcccagaaagtcaagatgtccacccacgctagacctatctgcctcccttgtactatggaagccaacttggccctccggagaccccagggcagcacttgccgcgatcacgaaaacgaactgctcaacaaacagtccgtgccagcacattttgttgcactcaatggatcaaaactgaatattaatctgaaaatgggcgtcgagtggacaagttgcgctgaagtggtaagtcaggagaaaaccatgttcccaaatctgacagatgtgcgggaagtggtgactgaccagttcctctgttccggtacccaggaggatgaaagcccatgcaagggcgagagcggcggagctgtgtttttggagcgaagatttcggttttttcaggtcggcttagtgtcctggggactgtataatccctgtctgggtagcgcagacaagaattcaaggaaacgggctccccgtagcaaagtcccccctcccagggattttcatatcaacttgtttcgaatgcagccttggcttcgccaacatctcggtgatgttttaaatttcctgcctctgtag

SEQ ID NO: 219022 - DNA, 1521 bp, synthetic construct
  misc_feature 1..1521: note = Description of Artificial Sequence: Synthetic coding sequence
  source 1..1521: mol_type = other DNA
atgggaacaaggagtgcgattgctgcccctcggatcctatgctcacgcggactgagatctgggagtgcccgtgcaacaggtagcggtgtggaaagatccccatctgccgctatctttagttttgagattaatgtttctgtggctattattacatttgcttcagaacccaaggtgttaatgagtgttcttaacgataacagtcgcgatatgacagaagtgatttcttccctcgaaaacgcgaattataaggaccatgagaatggcactggaacaaatacatacgccgctttaaattccgtgtacttaatgatgaacaaccaaatgagactgttgggcatggagacaatggcgtggcaagagatcaggcatgcaatcatactgctcaccgacgggaaatctaatatgggaggtagccctaagaccgctgtggatcatatccgggagatccttaacatcaatcagaagcgaaatgattacctggacatatatgccatcggcgttgggaaactggacgtcgattggagggaattgaacgaactaggcagcaagaaagacggcgagagacacgccttcatcttgcaggacactaaagcactccatcaggtcttcgagcacatgcttgatgtgtcaaagctgaccgatacaatttgcggtgtgggcaatatgtcagctaatgcttctgaccaggaacggacgccatggcacgtcacaattaaaccaaagtctcaggagacctgcaggggggcactgattagcgatcagtgggttctcacagcagcacattgcttccgggacggtaacgatcactccctctggagggttaatgtgggcgatcctaagagtcagtgggggaaggaatttctcatcgaaaaagccgtcataagcccaggctttgacgtattcgccaaaaaaaatcagggcatcctggagttctacggcgacgacatagctttgctcaagctggctcagaaggtgaaaatgtcaactcacgcccgtccaatatgtctaccctgcaccatggaagctaacctggccttgcgtaggcctcaaggatctacatgtcgtgaccatgaaaatgaactgttaaataagcagtcagtcccagcccacttcgtcgccctcaatggttcgaagctgaatatcaatcttaagatgggcgtagagtggaccagctgtgcagaggtcgtttcccaggaaaagacaatgttcccaaatctcacagacgtgagggaagtagtaaccgaccagttcctgtgcagcggcacacaggaggacgaaagtccctgtaaaggagaatcgggtggagctgtgtttctggagcgtcggtttcgattcttccaggtgggtttggtcagctggggactctataatccatgtctcgggagtgccgacaaaaacagcagaaaacgggctccacgttccaaagtcccacctccccgtgactttcacatcaacctcttccggatgcaaccctggttgaggcaacacttgggagacgtgcttaattttctcccgctttag

SEQ ID NO: 219023 - DNA, 1521 bp, synthetic construct
  misc_feature 1..1521: note = Description of Artificial Sequence: Synthetic coding sequence
  source 1..1521: mol_type = other DNA
atgggcacgagatccgccattgccgcacccaggatcctatgcagtaggggtttaaggtcaggcagtgctagggccactggaagcggcgttgagcgctctccttcggcagccatattctcgtttgagattaatgtatctgtggccatcatcacttttgccagtgagcccaaggtgttaatgtccgtcctcaacgataactcaagagatatgacggaggtgattagcagtctggagaatgctaattacaaggaccacgagaacgggactggcaccaacacttacgccgctctaaacagtgtgtatctgatgatgaacaaccagatgagactgctgggtatggagacaatggcctggcaggaaatcagacacgccattattctgctgacagatggtaagtccaatatgggtgggtcgccgaagaccgccgtggaccatataagagagatcctgaacatcaaccagaaacggaacgattacctggacatttacgctataggagtcggaaagctggatgtggattggcgtgaactcaacgaattaggaagtaaaaaggatggcgaacgccacgcgtttattctgcaggacaccaaggctctgcaccaagtgtttgagcatatgctggacgtgtctaaactgacagacacgatttgtggggtcggcaacatgagcgcaaatgcctccgatcaggagagaacgccatggcacgtaacaatcaaacctaagtcccaggagacctgtcggggagccctcatcagcgaccaatgggtacttaccgcagctcactgtttccgcgatggcaatgaccactccctctggcgcgtgaatgtgggtgaccccaagtcacagtggggaaaagagtttctgatcgaaaaagccgtgatttctcccggatttgatgtgttcgctaagaaaaaccagggcatcctggaattctatggcgatgatatcgctttactgaagctggctcaaaaggtcaagatgtctactcacgcacgccctatctgtttgccctgcacgatggaggctaatctggctctgaggcgaccacagggttccacctgtcgcgatcacgagaacgagctgctaaataaacaatccgttcccgctcattttgtggccctgaatggcagtaaattgaatataaatctcaagatgggggtggaatggactagttgcgctgaggttgtgtcccaggagaagacaatgtttccaaatctgaccgatgttcgggaggtggtgaccgatcaattcctgtgtagtggtacgcaggaagatgagagcccgtgcaaaggggaaagtgggggtgcagtgtttctcgaacggcgtttccggttttttcaagtagggctggtcagctggggcctgtacaacccatgtttgggttccgcagataagaattcccggaaaagagccccacgctctaaggtgcccccaccgagggacttccacattaacctgttcaggatgcagccatggctgcgacagcatctcggcgacgtcctgaattttcttcctctgtag

SEQ ID NO: 219024 - DNA, 1134 bp, synthetic construct
  misc_feature 1..1134: note = Description of Artificial Sequence: Synthetic coding sequence
  source 1..1134: mol_type = other DNA
atgactgaggtgatttcatccctagagaatgcaaattacaaggatcacgagaacggcactggaacaaatacatacgctgcccttaacagcgtttacctgatgatgaataaccagatgagactgttgggcatggagactatggcttggcaagaaatccgccacgccataatcctgctgaccgacgggaaatctaacatgggaggatcccctaaaacagcggtggatcatatacgagagatcctcaacattaaccagaagcgcaatgattatcttgatatctatgcaattggcgtgggtaaactggatgtggactggcgggagcttaacgaactgggctctaaaaaagatggtgaaagacatgcgttcatcttgcaggacacaaaggctttgcatcaagtgttcgagcacatgctggacgtgagcaagctgaccgacaccatctgcggcgtggggaacatgtcagcaaacgctagtgaccaggagagaaccccatggcacgtaactattaagccaaagagtcaggaaacatgccgaggagcattgatcagtgaccagtgggttttaactgccgctcactgtttccgggatgggaacgaccattcattgtggcgggttaacgtgggagatccaaagtctcagtggggtaaggaatttctgatcgagaaagctgtaattagccccggattcgacgtgttcgccaagaagaaccagggcattctggaattctatggcgacgacattgccttgcttaagctggcccagaaggtgaagatgagtacacatgcgcgacctatctgcctgccatgtacaatggaggctaatttggccctgaggaggccccaaggctcaacatgccgcgatcatgagaacgaactcctcaataaacagagcgtacccgcacactttgtggcactgaacggctcaaagctcaatattaatcttaagatgggggtcgaatggacctcttgtgccgaggtggtgtcccaggagaagacaatgtttcccaacctgactgacgtcagggaagttgttaccgaccagtttctgtgctctggtacgcaggaagacgaatccccctgcaaagggggaagcggggagctgggctcattgcagcccctgccttggttgtgttag

SEQ ID NO: 219025 - DNA, 978 bp, synthetic construct
  misc_feature 1..978: note = Description of Artificial Sequence: Synthetic coding sequence
  source 1..978: mol_type = other DNA
atggggaccagaagcgctatagcagcacctcgcattctttgcagtcgaggactgagaagcggctctgccagggcaaccggcagtggggtggaacggtccccaagcgcagccaatccaacactcatgacgtcgctgcggacgtggcccctgccgtgggctcttcccagtcccacctgtcttggcccacccattccgccacgtcgccagaggatttttagctttgaaataaacgtgtcagtcgcgattattactttcgcgtcggaacccaaagtgctgatgtccgtcctcaatgacaacagtcgggacatgaccgaggtgatttcaagtcttgaaaacgccaattacaaagatcacgaaaacggaacaggcacgaatacatacgcagccctgaattctgtctatctcatgatgaataatcaaatgcgcctactcgggatggagacaatggcatggcaagagatcaggcacgctatcattctgctgaccgatgggaagtccaacatgggcggaagccctaagacagcagtggatcacatcagggagatcctgaatataaatcagaagagaaacgactacctggacatttacgctataggcgttggcaagctagacgttgattggcgagaactcaacgagctcggttcaaagaaagacggggaaagacatgcgtttatccttcaggataccaaagccctgcaccaggtgttcgaacatatgctcgacgtgagtaaactcactgacacaatatgcggcgtcggaaacatgagtgctaatgcctcagatcaggaaaggacaccttggcacgtcactattaagcctaagtctcaggagacctgtcgaggagccctgattagcgatcagtgggtgctgacggctgcacattgttttagagatgggaacgatcatagtttgtggcgtgttaatgtgggtgaccccaagagccagtgggggaaggagtttctcattgagaaggcatag

SEQ ID NO: 219026 - DNA, 1521 bp, synthetic construct
  misc_feature 1..1521: note = Description of Artificial Sequence: Synthetic coding sequence
  source 1..1521: mol_type = other DNA
atgggcacacgatctgctatcgccgctccgagaatactgtgctccagaggtctcaggtcaggcagcgcacgcgctacgggctccggcgtggagcggagtccttccgcagcgatcttcagctttgaaatcaatgtgtccgtagccattataacatttgccagtgaacctaaagtcctgatgtctgtactcaacgacaactcccgggatatgacagaggtaatctcatcactagagaacgccaactacaaggatcacgagaacggcaccgggacaaacacatatgctgctctcaatagcgtttatcttatgatgaataatcagatgcgtctgctgggaatggagacgatggcgtggcaggaaatcagacatgccatcatactattaaccgacggaaagagcaacatgggagggtccccgaaaaccgctgtcgatcacattcgcgaaatcctgaatattaaccagaagcgcaacgattacttagacatctacgctatcggcgtcggcaagctcgacgttgattggcgggagctcaacgaactcggttctaaaaaggatggtgaacggcacgcttttattttgcaggacaccaaagcacttcatcaagtgtttgagcacatgctggatgtcagtaaattgacagacaccatttgtggcgtcggcaacatgtcggccaacgcttccgatcaggaacgcacaccctggcatgtgaccatcaaacccaagtcccaggagacctgtaggggcgctctcatctctgatcagtgggtgctgaccgctgcccactgcttccgtgacggaaatgaccattctctctggcgcgtcaacgttggagaccccaagagccaatgggggaaggaattcctcatagaaaaggctgtgatttctccaggattcgacgtgttcgctaaaaaaaatcagggcatcctggaattctatggcgatgacattgcgctgcttaagttggcccagaaggtcaaaatgtctacccacgcacgacccatctgcttgccatgtactatggaagccaatctggccctgcgcagacctcaaggcagcacgtgccgcgaccatgaaaacgaactcttaaataagcagtctgtccccgctcactttgtcgcattgaacgggtctaagcttaatatcaacctgaagatgggggtggaatggacctcatgtgctgaggtggtctcacaggaaaaaaccatgtttcctaatctgaccgacgtgcgcgaggtggtcaccgatcaattcctgtgttctgggactcaggaggacgaatctccctgcaagggtgagtctggaggtgccgttttccttgagaggcgtttccggttctttcaggtgggtctggtttcatgggggttgtacaacccgtgtttgggcagcgccgataaaaatagcaggaagcgcgctccaaggagcaaggtgccgccacctagagactttcacatcaacctgtttcgaatgcagccatggctacgccaacatttaggcgatgtgctgaacttcctgccactctag

SEQ ID NO: 219027 - DNA, 1521 bp, synthetic construct
  misc_feature 1..1521: note = Description of Artificial Sequence: Synthetic coding sequence
  source 1..1521: mol_type = other DNA
atgggtacaagatccgcgatcgctgcgcctcggatcctttgttctaggggcctgcggagcggttcagcgagggcaactggttctggcgtcgagaggtcacctagcgcagcaattttcagctttgagatcaatgtgtcagtggccattattacctttgcatcagagccaaaggttctcatgtctgtgcttaacgacaacagccgggacatgacagaagtgatcagctccctggagaatgccaattataaagatcacgagaatgggacaggtactaatacttacgcagctctaaattctgtttatctgatgatgaataaccagatgcgcctgctagggatggagacgatggcctggcaggagattcgccacgccattattctgctgacagatggcaagagtaacatgggcggaagcccaaagacagccgtggaccatattcgcgagatccttaatattaaccagaagaggaatgactatcttgacatctatgccatcggagtcggcaagctcgatgtggattggagggaattgaacgaacttgggtctaagaaggacggcgagaggcatgctttcatcctgcaagataccaaggctctgcatcaggtgtttgagcacatgctggatgtgtcaaaactgactgacacaatctgtggagtgggtaacatgtcggcaaacgcaagcgatcaggagcgaaccccgtggcacgtcactatcaagccaaaatcccaggagacatgccggggagctcttatctccgatcagtgggtgctcactgcagcccattgttttcgtgatgggaacgaccactcactgtggcgtgtaaacgtgggggacccaaagtctcaatggggcaaggagttcctcatcgaaaaagctgtaattagccctgggtttgacgtgtttgccaagaaaaatcagggtatactggagttctacggtgacgatatcgctctccttaagctagcccagaaagtgaaaatgtcaactcacgcccgtcccatatgtctgccttgcacaatggaggccaacctggcgctcagacgccctcagggaagtacctgtcgggatcacgaaaatgaactgctgaacaagcaatctgtgcccgcacacttcgtggcactgaacggaagcaagctcaatatcaatctcaagatgggagtggagtggacctcctgtgccgaggttgtgtctcaggaaaaaacaatgtttcccaatctcacagacgtgcgcgaggtggtaactgaccagttcttgtgctcaggtacccaagaagacgagagtccctgcaagggggaatccggaggagccgtgttcctggagcggcgttttagattttttcaagtcggcctcgtttcctgggggctgtacaatccctgtctcggttctgcagataagaatagtcgcaaacgggctcccaggagcaaggtcccaccaccacgggatttccatataaacctgtttcgaatgcaaccctggctgagacagcatctgggtgacgttctcaactttctgcctctctag

SEQ ID NO: 219028 - DNA, 1617 bp, synthetic construct
  misc_feature 1..1617: note = Description of Artificial Sequence: Synthetic coding sequence
  source 1..1617: mol_type = other DNA
atgagggcactctgtattcgggagacatgcagttcggagttgggtttctcaagaaattggagccgtcgcaaagccggtcattgccctaatccagggatttcactgggtgccgtgcggacagggttccgattcggccatggcgataaagtgcggtatcggtgtagttctaatttggtgctcacgggttctagtgagcgcgagtgccaaggtaatggcgtgtggagtggaaccgaacccatctgtaggcagccttatagctacgatttcccagaggatgtcgcgccagcactgggcacttccttctcacatatgcttggcgctacaaatccaactcaaaagacgaaagatcatgaaaatgggaccggtactaatacctatgccgcattgaacagcgtttatctgatgatgaataatcaaatgcgcctcttgggcatggagaccatggcgtggcaagaaataaggcatgctattatcctccttactgatggtaagtcaaacatggggggatcaccaaaaacagccgtagatcatattcgagaaatcctgaatataaaccagaaaaggaacgattatctggacatttacgccataggggtggggaaactggacgtggactggcgcgagctcaacgaactggggagtaagaaggatggagaacggcacgcatttatactgcaggacacgaaagcactccatcaagtgttcgagcacatgttggatgtgagcaagctgactgatactatctgtggggtgggaaacatgagtgccaacgcctccgaccaggagaggaccccctggcacgttaccatcaaacccaaaagccaggaaacgtgtagaggtgctctgattagcgaccaatgggtgctcaccgctgctcactgtttccgggacggcaacgaccatagcttgtggcgcgtcaacgtgggcgaccccaaaagccagtgggggaaagagttcctaatagaaaaggcagtcatctctccaggctttgatgttttcgcaaagaagaaccagggaattttggaattctacggtgatgacatcgccttacttaaactggcacaaaaggttaagatgagcacccatgctcgcccaatctgcctgccctgtacaatggaagctaatctggctctaagaagaccccagggctccacgtgtcgcgaccacgagaatgaactgctcaataaacagagtgtgccggctcacttcgtggcgctgaatggatcaaaacttaacatcaatctgaagatgggcgtggagtggacaagctgcgccgaggtcgtgtcccaggaaaagaccatgtttcccaacctgaccgacgtacgggaggtcgtgaccgatcagttcttgtgcagtggtacccaagaggacgaaagcccctgcaagggagagagtggaggtgcggtcttcttggaaaggcgctttcggttcttccaggttgggttggtcagctggggactgtacaacccgtgtctcggttcggctgataagaacagtagaaagcgggctccacgttccaaagtaccgcctccccgagacttccatatcaatctgtttcgtatgcaaccgtggctgcgccagcacctcggggacgttctgaatttccttccgctatag

SEQ ID NO: 219029 - DNA, 1134 bp, synthetic construct
  misc_feature 1..1134: note = Description of Artificial Sequence: Synthetic coding sequence
  source 1..1134: mol_type = other DNA
atgaccgaggtcatttccagtctagagaatgcgaattacaaggatcacgaaaatgggaccggtactaatacatatgcagcactgaattctgtgtatcttatgatgaataaccagatgcgcctcttgggcatggaaaccatggcttggcaggaaatcaggcacgccataatcctgttgactgatggaaaatccaacatgggcggttctcctaagacagccgtcgatcacatcagagagatattgaacattaatcaaaaacgcaacgactacctggatatctatgcaatcggagtgggaaagttggatgtcgactggagggagcttaacgagctgggctcaaaaaaagatggcgagaggcacgccttcatactccaggataccaaggcgctacaccaggtgttcgaacatatgcttgacgtctcaaaactgactgatactatatgcggcgtggggaatatgtccgctaatgcctcagaccaggagcgcactccatggcatgttacgattaagcccaaatcacaggaaacctgcagaggggctctgatatcagaccaatgggttctcacggcagcacactgtttccgcgacggtaatgatcacagtctctggagggtgaacgtgggcgaccccaagtcccagtggggcaaagagtttctcattgaaaaagccgtgatttctccaggatttgatgtgtttgcaaaaaaaaatcaaggcattctcgaattctatggagacgacatcgccctactgaagcttgctcagaaggttaagatgagtacccatgccagaccaatatgtctcccgtgtactatggaggccaatctggctctccggaggcctcagggatcaacctgtcgggatcacgagaatgagcttctaaacaagcaaagcgtgcccgcacattttgtggcgctcaacggctccaaacttaacattaacctaaagatgggcgtggaatggacaagctgcgccgaggtagtatcccaggagaagactatgttcccaaatctgacagatgtgagagaagtggtgaccgaccaatttctgtgctccgggacgcaggaagacgagtccccatgtaagggcggttcaggggagctcggaagcttacagcctttgccttggctatgctag

SEQ ID NO: 219030 - DNA, 1863 bp, synthetic construct
  misc_feature 1..1863: note = Description of Artificial Sequence: Synthetic coding sequence
  source 1..1863: mol_type = other DNA
atgggcccacttatggtgctcttctgtctcctgtttctttatccagcaggtcactgccccaaccccggtatctcattgggggcagtacgaactggttttaggttcggacatggagacaaggtacggtatagatgctcaagcaatctggttttgaccggttcttctgaacgagagtgccagggaaacggtgtgtggtcgggcacagaaccaatttgtagacagccctattcatacgacttccccgaagatgtcgccccagccctagggactagctttagtcatatgttgggcgctacaaatccgacacagaaaaccaaggagtcgcttggtcgcaagatacagatccagcgttctgggcacctgaacctttacctcctgcttgactgtagccagagtgtgagcgaaaacgatttcctgatcttcaaggagtcagcatcattaatggtggaccggattttctcatttgaaattaacgtgtccgttgcgataatcacttttgcatcagagccaaaagttttaatgtccgtgcttaacgacaattctcgagacatgaccgaagtgattagcagcctggagaacgccaactacaaagaccacgagaatgggaccggcaccaacacatatgccgctctaaactccgtgtatctgatgatgaacaaccagatgcgactcctgggcatggagacaatggcatggcaggaaatcagacacgcgatcattctccttacagacggcaaatcaaatatgggaggatctcccaaaaccgctgttgaccacattagagaaattctgaatatcaaccaaaagcggaacgactacctggacatctatgcgatcggggtgggaaagctcgacgtcgactggcgagaactgaatgaactgggttctaagaaggatggagagcgccatgcattcatcttgcaggataccaaggcgcttcaccaagtatttgagcacatgctggacgtgagtaagctcactgacaccatttgtggagttggcaatatgtcagccaatgcaagtgaccaggaacgcactccatggcacgtgaccatcaagccaaagtctcaggagacttgtcggggagccctgatctctgatcagtgggtgctgacagctgctcactgcttcagagatggtaatgaccacagcctttggcgggttaacgtgggcgacccgaagtctcagtgggggaaagagtttcttatcgagaaggccgtcataagtccagggttcgatgtcttcgccaagaaaaatcagggcatcctcgaattttacggcgacgatatcgcactcttgaaactggcacagaaagtgaaaatgtctacacatgcacgcccaatttgtttaccatgtaccatggaggcgaatctcgcattgagaagaccccagggctccacatgtagggatcacgagaacgagctgctgaataagcagtccgtcccagctcacttcgtggctctaaatgggtctaaactgaacatcaatctgaaaatgggggtcgagtggacgagttgcgccgaagttgtttcacaagagaagactatgttccccaacctaaccgatgtccgggaggtggtgacagatcagttcctttgcagcgggactcaggaggacgagtctccctgcaagggagaatcaggcggagctgtctttttggagcgccgatttcgcttcttccaggtcgggctcgtgtcatggggcctgtacaatccttgtctgggaagtgctgacaagaactctaggaaaagggcaccccgatctaaggtgcccccaccaagagatttccatatcaacctgtttcggatgcaaccatggctgagacagcacttaggcgacgttctgaactttctgcccctgtag

SEQ ID NO: 219031 - DNA, 1863 bp, synthetic construct
  misc_feature 1..1863: note = Description of Artificial Sequence: Synthetic coding sequence
  source 1..1863: mol_type = other DNA
atgggccctttaatggtgttattctgtctgctgttcctctatcctgcaggtcattgccctaaccctggaatcagtttaggagccgttaggaccggattccgattcggccacggagacaaggtgaggtaccgctgcagcagtaaccttgtgttaacgggcagctcagagcgcgaatgccaaggaaatggcgtttggtccgggaccgaacccatctgtcgacagccttatagctatgacttcccagaggatgtggcgcctgcattgggtacctcgtttagccatatgctgggggctacaaatcctacacaaaagactaaggagtctctgggtcgcaagattcagatccagcggtcgggacaccttaatctctacctgcttttggactgttcccagtccgtgagcgagaacgattttctgatctttaaagaaagcgctagcttgatggttgatcgcatcttttcttttgaaatcaatgtgtctgtagccataatcacgttcgcttccgaaccaaaggtccttatgtccgttctgaacgacaactctagggatatgaccgaagtcatcagctccctcgagaatgccaattataaggaccacgagaacgggacaggtaccaacacatacgctgcacttaactcggtctacctcatgatgaacaatcagatgcgactgctcggcatggagacgatggcctggcaggagatcagacacgccatcatcctgctgacagatgggaaatctaacatgggagggtcccccaaaactgccgtggatcacattcgcgaaatcctgaacatcaaccaaaagcgtaacgactatctggacatctacgccattggagttggaaagttggatgtagactggagggaactgaatgaattaggaagcaagaaagacggagagcgtcacgcttttattctgcaagataccaaggcactccatcaggtcttcgaacacatgctggatgtcagtaagctcaccgacacaatctgcggagtcggcaacatgtccgccaacgcctccgaccaagagagaacaccatggcatgtgaccatcaaaccaaagagccaggagacctgtagaggggctctgatatcggaccagtgggttcttacagccgctcattgcttcagagatggcaatgaccacagtctctggcgcgtgaacgtcggagatcctaaaagtcagtggggaaaagagtttctgatagagaaagcagtcatttcacccggatttgacgtattcgcaaaaaagaaccagggaatccttgagttctacggggatgatattgcactgcttaaactggcccagaaggtgaagatgagcacccacgcacgcccaatttgtctcccttgtactatggaagctaatttagccttacgcagaccacagggatccacctgtagagaccacgagaatgagcttttgaacaagcagagcgtccctgcgcactttgtggccctgaacggaagtaagttgaatataaacttaaagatgggggtggagtggacctcatgtgctgaggttgtgagtcaagagaaaacaatgttccccaacctgacagatgtcagggaagtggttactgatcagttcctttgtagtgggacccaagaagacgagagtccatgcaagggcgagagtggcggagctgtctttttggagagacggtttcggttctttcaggtcggactggtaagttggggactgtacaatccatgcctgggtagtgctgacaaaaactctcggaagcgtgcaccacggagcaaagtccccccacccagagacttccacatcaacctattccgtatgcaaccctggctgcggcaacacctcggcgacgtacttaattttttgcccctgtag

SEQ ID NO: 219032 - DNA, 978 bp, synthetic construct
  misc_feature 1..978: note = Description of Artificial Sequence: Synthetic coding sequence
  source 1..978: mol_type = other DNA
atgggcacacggtccgccattgctgccccacggattctttgctcaaggggcttgaggagtggttcagcgagagccactgggagtggagtggagcgctcccctagtgcagcgaatccaaccctgatgactagtctacgtacatggcctctgccttgggcactgcccagccccacttgcttgggcccacctataccgccacgacgacaaagaattttctcattcgaaatcaacgtgtcagtcgctattatcacgttcgcctctgagccgaaggttctgatgagcgtccttaatgataatagcagggatatgaccgaggttatcagttcgctcgagaatgccaactataaagaccatgagaacgggacgggtaccaatacttacgccgctctcaattctgtatatctgatgatgaacaaccagatgcgtttattaggtatggagactatggcatggcaagaaataaggcacgccatcatcctgcttacagacggaaagtcaaacatgggtgggtcgcccaagaccgcagtggaccatataagagagatccttaatatcaatcagaagcgcaacgactacctggatatatacgcaataggggttggcaaactcgacgttgactggagggagctcaacgagctgggttctaagaaggatggagaacggcacgccttcatcctacaagacactaaggctctgcatcaggtttttgagcacatgctcgatgtgtctaaacttaccgacacaatttgtggggtgggcaacatgagcgctaacgcctccgaccaggagagaaccccgtggcatgttactattaagcccaagtcacaggaaacttgtcgtggcgctttaattagtgatcagtgggtcctcacagccgctcactgcttccgggacggtaatgaccatagcctatggagagtcaatgtgggcgatccaaagtcccagtggggaaaagagtttctcatcgaaaaagcctag

SEQ ID NO: 219033 - DNA, 978 bp, synthetic construct
  misc_feature 1..978: note = Description of Artificial Sequence: Synthetic coding sequence
  source 1..978: mol_type = other DNA
atggggaccaggagcgctatcgcagctccacgaatactttgttcccgaggcctgagatcaggctccgcgagggcaacaggcagcggggtggaacggtccccaagcgccgcaaatcccacgctgatgacatccctccgaacgtggccccttccgtgggcactgccgtctccaacatgcctcggccctccaattcccccacgtagacaacggattttttcctttgagataaatgtctcagttgcgattatcacatttgcatcggaacccaaggttctgatgtccgttctcaacgataatagtagagacatgaccgaggtgatctcatcactggagaatgctaactataaagaccacgagaatggcacaggcactaatacttacgccgctctgaatagcgtttacctcatgatgaataaccagatgcgccttcttggcatggagacaatggcatggcaggaaatccgccacgccataatcctcctaaccgacggaaaatcaaatatggggggatcaccaaagaccgccgtggatcatatacgcgaaattctcaacattaaccagaaaagaaatgactatcttgacatttatgcaataggggtgggtaagctcgacgtagactggcgggaacttaacgagctaggaagtaaaaaggacggagagcgacacgccttcattctgcaagacactaaagccctccaccaggtgtttgaacatatgctggacgtctctaagctgacagacactatttgcggggttggcaatatgagcgcaaacgccagcgatcaggagcggaccccttggcacgttacaataaagcctaagagccaggaaacctgtaggggagcccttatctctgatcagtgggtactgaccgctgcacattgctttagagacgggaacgaccactcactgtggcgagtgaatgttggcgaccctaaatcccagtggggcaaggagtttctcatcgaaaaagcctag

SEQ ID NO: 219034 - DNA, 1521 bp, synthetic construct
  misc_feature 1..1521: note = Description of Artificial Sequence: Synthetic coding sequence
  source 1..1521: mol_type = other DNA
atgggcacacgatctgcaattgccgctcccagaatcctgtgttcccggggattgaggtctgggtcggccagagcaaccggttcgggggttgagcggtctccgtccgcagctattttttcctttgagatcaatgtgagcgtcgccatcatcacttttgcgagcgagccaaaggttctcatgagcgtgcttaatgacaattctagggatatgaccgaagtgattagctccctggagaacgctaattataaggaccatgaaaacggaaccggcacgaatacctacgcagccctgaattcagtctaccttatgatgaacaaccagatgagactactgggaatggaaactatggcatggcaggaaattcgtcacgccattattttgctgaccgacggaaagagcaacatgggcggtagtccgaagacagctgtcgatcatattagggagattctgaacattaaccaaaaaagaaacgattatctggatatatatgccatcggggttgggaagctggatgtggactggagggagctgaatgaattgggctccaaaaaagatggagagcgacacgcctttatactacaggatactaaggccctccaccaggtgtttgaacacatgctggacgtaagtaaactcactgatactatctgtggagtcggcaatatgtctgcgaatgcttcggaccaggaaagaacaccctggcacgttaccatcaaaccgaagagccaggagacgtgcagaggcgctctgatttccgaccagtgggttctgaccgcagctcattgtttccgggatggtaacgaccactccctatggcgggtgaacgtcggcgacccgaaatcccagtggggaaaggaattcttaatcgagaaggccgtgattagcccaggcttcgacgtcttcgccaagaagaatcagggcattctagagttttatggagacgacattgcgctgctcaaactggcccagaaggtgaaaatgagtacccatgctagacctatatgcctgccctgcacgatggaggctaatctggcgcttcgacgccctcaggggagcacgtgcagagatcacgaaaatgagttgctgaataaacaatcagtgcccgctcacttcgtggctctcaacggatctaaacttaacatcaatttgaaaatgggagtggagtggacctcttgtgctgaggtggtatcccaggagaagacaatgtttccaaacctgacagacgttagggaagtggtcacagatcagtttctgtgtagcggcactcaggaggacgagagtccttgtaaaggcgaaagcggtggggctgtattcctagagcgcaggttcagattcttccaagtggggttggttagctgggggctctataacccttgcttggggtcggcagataagaatagcaggaagagagcacccagaagtaaagtgcctcctcctcgtgatttccacattaaccttttcaggatgcagccttggctgagacaacacctcggcgacgtgctgaatttcctgccattatag

SEQ ID NO: 219035 - DNA, 978 bp, synthetic construct
  misc_feature 1..978: note = Description of Artificial Sequence: Synthetic coding sequence
  source 1..978: mol_type = other DNA
atgggtactcgatctgctatagctgccccaaggatcctgtgtagtcggggtctgcggagtggaagcgcacgggcaaccggctccggcgtcgagcgatctccaagcgccgcaaatccaaccctgatgacgagcctccggacctggcctcttccctgggccttgccatcgccaacgtgcctcggcccacccataccacccaggagacagcggatcttctcattcgagatcaatgtgagcgtcgcgattatcaccttcgcctcagaacccaaggttcttatgagtgtgctgaatgacaactctcgcgacatgaccgaagtcatctcgtctctcgaaaatgctaactataaagaccatgagaatggtacaggaactaacacatatgctgcgttaaatagcgtgtatctgatgatgaataaccagatgcgcctgctgggcatggaaaccatggcatggcaggaaatccgacacgcgattatcctcctgaccgacggaaagagtaatatggggggatcacctaagactgccgtggaccacattagagaaatcctgaacattaaccaaaaacgcaacgattatctggacatctacgctattggagtaggaaaacttgatgtggattggcgcgaattaaatgagttgggttctaagaaggacggagagcgccacgctttcattctgcaggacaccaaagcgttacaccaagtcttcgagcatatgcttgatgtcagtaagttaaccgacacaatctgtggagtgggaaacatgagcgccaacgctagcgatcaagagcgaacgccttggcatgtcacgatcaaaccgaagagccaggaaacctgcaggggtgctcttatatccgatcagtgggtgctgacagctgcacactgcttcagagatggaaacgaccactcgttatggcgagtgaacgttggtgatcccaagagtcagtggggaaaagaattcttgatagagaaggcatag

SEQ ID NO: 219036 - DNA, 1863 bp, synthetic construct
  misc_feature 1..1863: note = Description of Artificial Sequence: Synthetic coding sequence
  source 1..1863: mol_type = other DNA
atgggaccactgatggtcctattttgtcttctctttttgtatcccgctggccattgcccgaatccaggtatcagtctaggcgctgtacgcacaggcttcaggtttggccacggagataaagtgagataccgctgctctagcaatctggttctcacaggatcttcagaacgagagtgccaaggaaacggggtgtggtctggaacagaacctatatgcagacagccgtattcctacgacttccccgaagacgtcgccccagctcttgggacgagtttctctcacatgctcggagctacaaatccaactcagaagaccaaggagagcctgggacgtaagattcaaatccaaaggagcggtcatctgaacttgtatctgctgctggactgttctcaatccgtgtcagagaacgacttcctgattttcaaagagtccgcatccctaatggtggatcgtatcttcagcttcgaaattaatgtgtctgtggccatcattactttcgcatccgagcctaaagtccttatgagcgtgcttaatgataattcccgtgatatgaccgaagtcatcagtagcctggagaatgccaattacaaggatcacgaaaacggcaccggtactaacacgtacgccgcactgaatagcgtttacctgatgatgaacaaccagatgagattgctcgggatggagactatggcatggcaagaaattcggcatgccattatactgctgacagacgggaagtctaatatggggggtagcccaaaaacagccgtagatcacatcagagagattcttaacataaaccaaaagcgcaacgactatctcgatatttacgcaattggagtggggaaactggacgtggattggagagagcttaacgagcttggctccaagaaggacggcgaaagacatgcatttatcctgcaggatacaaaggccctccaccaggtgttcgagcatatgctagatgtgtccaagcttacagacaccatctgcggagttggcaatatgtcagccaatgcttccgaccaggagcggaccccctggcatgtcaccattaagcccaagagtcaagagacttgtagaggggctctgatttctgaccagtgggtgctgacagcggctcactgcttcagggacggcaacgaccacagcctgtggagggttaacgtgggtgatccgaaatctcaatggggaaaagagttcctcatcgagaaagccgtaatctcccctggctttgatgtgtttgccaaaaaaaatcagggaatcctggagttttatggggatgacattgccttattaaaactggcgcaaaaggtcaagatgtctacccacgctcggccaatatgtttaccttgtaccatggaggcgaacttggcgctccggcgaccgcaggggagcacctgtcgcgaccatgagaatgagctcctcaataaacagtccgtgcctgctcactttgtagcgctgaatgggtccaaactcaatatcaacctgaaaatgggtgtcgaatggacctcctgcgcagaagtggtgagccaggagaagactatgttcccaaatttaacagatgtcagggaggttgtcaccgatcagttcctctgttccggaacccaggaggacgagagcccctgcaagggtgagtctggcggagccgtctttctggagcgcaggtttagattcttccaggtggggctggtcagctgggggctgtataatccctgcttaggaagtgcagacaaaaattcacggaagcgggctcctagatctaaggtcccgcctccacgggattttcacatcaacctttttagaatgcagccatggctccggcagcacttaggtgatgtgttaaatttcctgccgctgtag

SEQ ID NO: 219037 - DNA, 1134 bp, synthetic construct
  misc_feature 1..1134: note = Description of Artificial Sequence: Synthetic coding sequence
  source 1..1134: mol_type = other DNA
atgacggaggtcattagcagcttggaaaatgcgaattacaaggaccacgaaaacggtacaggaaccaacacctacgccgcattgaactctgtgtacttaatgatgaacaatcagatgcgcctgctgggtatggagacaatggcctggcaggaaattaggcacgcgattatcctgctcaccgatggcaagtctaacatggggggttctccgaagaccgcagtcgaccatatacgcgagattctcaacatcaaccaaaagcgtaatgattatctcgatatctacgccataggggtggggaagcttgatgttgactggagggagctgaatgagctgggaagcaagaaggacggggagaggcatgcctttattttgcaggacaccaaggctctccaccaagtgttcgagcacatgctcgatgtctcaaagctcaccgacactatttgcggggtcggcaacatgtccgccaatgctagcgatcaggaacgcactccttggcacgtgacaataaaacctaagagtcaggagacgtgccgcggtgccctgatcagcgaccagtgggtcctgaccgcagctcactgctttcgtgacggaaatgaccatagcctgtggagagtcaacgtcggggaccctaagagtcaatggggcaaagaatttttgattgagaaagccgtgatcagtcctggattcgatgtttttgcaaagaaaaaccagggtatcctggaattttatggagatgacatcgccttgctcaaattggcccagaaggtgaaaatgagcacccacgccaggcctatctgtctgccttgcaccatggaggctaatttggctctgagacgcccacagggctcgacctgtagagaccacgagaacgagctgctgaataagcagtccgtgccggctcattttgtcgctctgaacggctcaaagcttaacatcaacctgaaaatgggggtggagtggacgagttgtgcggaggtagtgtctcaggaaaaaaccatgtttcccaatctgacggacgttcgggaagtagtgacagaccagttcctgtgttcaggcacacaggaagatgagagtccctgcaaaggaggatccggagagttgggaagcctccagcccctgccttggctctgctag

SEQ ID NO: 219038 - DNA, 1134 bp, synthetic construct
  misc_feature 1..1134: note = Description of Artificial Sequence: Synthetic coding sequence
  source 1..1134: mol_type = other DNA
atgactgaagtaatctcatccctcgagaatgcgaattacaaagatcacgaaaatgggaccggcacaaatacatatgctgctttaaactctgtgtacctgatgatgaacaaccagatgcgacttctagggatggaaaccatggcctggcaggagatccgtcatgccatcatcctgctgacagatggaaaaagtaacatgggaggcagtcctaagacagcagtggaccacatccgagagattctcaacattaaccagaaacggaatgactacctggacatctacgctattggggtaggcaagctcgatgtggattggcgggaactaaatgagctgggctccaagaaagacggggagcggcacgcgtttatcctgcaagatacgaaagctctgcaccaggttttcgagcatatgcttgatgtgagtaaactaactgacactatttgcggggttggaaatatgtctgcgaatgcatctgatcaggaacgcaccccttggcatgtcaccatcaaaccgaagtctcaagaaacatgcaggggagccctgatcagcgatcagtgggtccttactgcagcccactgtttcagggacggaaacgatcactccctgtggagggtgaatgtcggcgaccccaagagccagtgggggaaggagtttttaatcgagaaggccgtcatctctccgggtttcgacgtctttgccaagaagaatcagggaatcctagagttttacggggacgacatagccctcctcaagctggcccagaaggtcaagatgtctactcatgcacgccctatttgcctcccatgtacgatggaggctaatctggcacttcgcaggcctcaggggtccacctgcagggatcatgagaatgagctcctcaacaaacagtctgtgccagctcactttgtagctctgaacgggtctaaactcaacatcaacctcaaaatgggcgttgagtggacgtcctgcgcagaagtggtatcccaggaaaagaccatgtttccaaatcttacagacgtcagggaggtagtcaccgatcagtttttatgttcaggcacccaggaagatgagtcaccctgcaaaggaggcagtggagaattaggcagcctgcagcccctcccatggctctgctag

SEQ ID NO: 219039 - DNA, 978 bp, synthetic construct
  misc_feature 1..978: note = Description of Artificial Sequence: Synthetic coding sequence
  source 1..978: mol_type = other DNA
atgggaacccgttccgctatcgctgcacctcgcattttgtgttcccggggtcttcgaagcggcagcgcccgagccacggggtccggtgtcgagcgctctcccagcgctgcgaatcctactctaatgacatccctgagaacatggcccttaccctgggccctgccctcaccaacatgtctgggccctccaattccacccagaagacagcggatttttagcttcgagataaatgtgtctgtcgctatcatcacatttgcatctgaaccaaaggtcctcatgtcagtgctgaatgacaacagtcgggatatgacagaggtgatttcctctctggagaatgctaactacaaggaccacgaaaacgggaccggcaccaatacgtacgctgctttaaacagcgtctacctcatgatgaataatcagatgagactgctcggcatggagacgatggcctggcaggaaatacgccacgcaataattctgctcactgatggaaagtccaatatggggggaagccccaaaactgccgttgaccatatcagggagatccttaacattaaccagaaacgcaatgactacctggatatttatgctattggcgtgggcaagttggatgtcgactggcgcgagttgaatgaactcggttctaaaaaagacggagaaaggcacgcttttatactgcaggacaccaaggcattgcaccaggtttttgagcacatgctcgatgttagcaagctcaccgacactatatgcggggttggcaatatgagcgcaaatgcaagcgaccaggaacgcacaccatggcatgtgaccatcaaacccaagtcccaggagacatgtcgaggggcactcataagtgatcagtgggttctgaccgctgcacactgttttagggacggcaacgaccactccttatggagggtaaatgtaggtgaccccaagtcccagtggggcaaggaatttctgatagagaaggcctag

SEQ ID NO: 219040 - DNA, 1134 bp, synthetic construct
  misc_feature 1..1134: note = Description of Artificial Sequence: Synthetic coding sequence
  source 1..1134: mol_type = other DNA
atgaccgaggtaattagctcactggaaaatgcaaattacaaggatcacgagaatggcaccggcaccaatacatatgccgctctgaattccgtgtatctcatgatgaataatcagatgcgtctcctggggatggagacgatggcatggcaagagatccgccacgccatcattctccttaccgatggaaaatcgaatatggggggatcccctaagacggctgtggatcacatccgtgaaatcttgaacataaatcaaaagcgtaacgattacctggacatttatgcaatcggggtgggaaagctggatgtggactggcgcgagctgaacgaactgggaagcaagaaagacggggagagacacgccttcatcctgcaggatactaaggccctgcaccaagtgttcgagcatatgctggatgtcagtaagcttacagatacgatctgtggtgtgggaaacatgtcagcaaacgcaagcgaccaggaaagaaccccctggcacgtaaccatcaaacctaaatcccaggaaacatgtcgcggtgctttgatctcagaccagtgggtgctaacagcggctcactgttttcgggacgggaacgaccacagcctgtggcgtgtaaatgtgggggacccgaagtcgcagtggggcaaggaattcttaatcgagaaggccgttatatcccccggattcgacgtattcgccaaaaagaatcaaggaatcctggagttctatggcgacgacatagcactgctgaagctagcgcagaaagtgaaaatgagcacccatgctaggccgatctgtctcccttgcaccatggaggcgaaccttgcactgaggcggcctcaaggctccacatgccgggatcacgagaacgagctgctgaacaaacagtccgtccctgcccatttcgttgcactgaacgggtccaaattgaacataaatctgaagatgggcgtcgaatggacatcctgtgccgaggtcgtcagccaggagaaaaccatgtttcctaaccttaccgacgttcgcgaagtcgtcaccgaccaattcttatgctctgggactcaggaggatgagagtccatgcaagggtggatccggcgaactgggcagcttacaacccctgccctggctatgttag

SEQ ID NO: 219041 - DNA, 1617 bp, synthetic construct
  misc_feature 1..1617: note = Description of Artificial Sequence: Synthetic coding sequence
  source 1..1617: mol_type = other DNA
atgagggccctctgtattcgggaaacatgttcttctgaacttgggttctctcggaactggtctcgtcgtaaagcaggtcactgtcccaatccaggcatcagcttgggcgctgtgcgcaccgggttcaggttcggccacggggataaggtgcggtaccgctgcagctccaatctcgtcctgacagggagcagtgagagagaatgccaaggcaatggggtgtggtcaggaaccgaacctatctgccgacagccctatagctacgatttcccggaagacgtcgctcccgctttaggtactagcttcagtcatatgttaggcgctaccaaccctacacagaaaaccaaggaccatgagaacggcactggcaccaatacgtatgccgcactgaatagcgtatatctaatgatgaacaatcagatgcggctcctggggatggaaactatggcttggcaggagatccgtcatgccattattctccttaccgacgggaagagtaatatgggaggaagcccaaaaaccgccgtagatcatattcgcgagattctcaatatcaatcaaaagcgaaacgattatctcgacatttatgctatcggtgtgggcaaattagacgttgattggcgagagctaaacgaactaggcagtaagaaagatggggagagacacgccttcatcctgcaggatactaaagctctccaccaggtgttcgagcatatgctggatgtgtctaaactaacggatacaatatgtggcgttggaaatatgtcagccaacgctagtgaccaggaaaggaccccttggcacgttactatcaagcccaagtcacaagaaacttgtagaggggctctaatcagcgaccagtgggttctcactgctgcccactgcttcagagacggtaatgaccactccttgtggagagtcaacgtgggggaccccaagagtcagtggggcaaggaattccttatcgagaaggctgtgatcagcccaggcttcgacgtcttcgcaaagaagaatcaggggatcctcgagttttacggggacgatattgctttgctcaaattggctcaaaaggtgaaaatgtctacccacgcgcgtcccatttgcctgccctgtacaatggaagccaatttagctctgcggagacctcagggttctacctgccgggaccacgaaaacgagttactcaataaacaatctgtacctgcccattttgtggccctcaacggctccaaactcaacattaacctgaaaatgggcgtcgagtggactagctgtgccgaggttgtgtctcaagaaaagactatgtttcccaatttgactgacgtgcgagaagtggtgaccgatcagtttttatgttccgggacccaggaggatgaaagtccctgcaagggcgaatccgggggtgcagtcttcttggagagaaggttcagatttttccaagtgggtctggtatcatggggattgtacaatccctgcctcggctccgctgataagaactcaagaaagcgggcaccccgtagtaaggtgcctccccctcgggattttcacataaacctgttccggatgcagccctggttacgccagcacctcggcgacgtgttaaattttttgcctctctag

SEQ ID NO: 219042 - DNA, 1863 bp, synthetic construct
  misc_feature 1..1863: note = Description of Artificial Sequence: Synthetic coding sequence
  source 1..1863: mol_type = other DNA
atggggccacttatggtcctcttttgtcttctgttcctgtaccctgctggccattgtccaaaccccggtattagcctgggcgctgtgagaacgggcttccggttcggacacggtgacaaagtgcgctatagatgctcaagcaacttagtcctaacagggtcatctgagcgtgagtgccagggcaacggagtgtggtccgggaccgagcccatctgccggcagccctacagctatgactttccagaagacgtggcccctgcactcggcacatccttttctcatatgctaggtgccactaacccgacccagaagaccaaagagagcctgggtcgcaagatccagatccaacgttccgggcacctcaatctgtatctgctgctggactgttctcaaagtgtgagtgagaatgacttcctcatctttaaggaatccgcgtccctgatggtagatcgcatcttttccttcgaaattaacgtctcagtcgccatcatcacattcgcatctgagcctaaggtgctcatgagcgtcctcaacgataacagcagagatatgacagaggttatctcgagcctggagaacgcgaattataaagaccacgagaacggaactggcactaacacttatgcagcccttaactcagtgtatctcatgatgaacaaccagatgcggcttttggggatggaaactatggcttggcaagaaatcaggcatgccattattttgttgacagacggtaaaagcaatatgggaggctccccgaaaaccgcggtggaccatatcagggagatcttaaatatcaaccagaagaggaatgattacttggatatttacgctatcggggtgggcaagctcgacgtggactggagagaacttaatgagctgggctcaaaaaaagacggcgagcggcatgcattcattttacaagacaccaaggctctacaccaggtttttgagcacatgctggacgtctccaagctgactgacacaatctgcggtgtaggtaacatgtcggccaatgcctcagaccaggagagaaccccctggcacgtgacgatcaaacctaagtcccaggagacctgccgcggtgccctcattagtgatcagtgggtgctcaccgcagcccattgttttcgggatggcaatgatcactccctgtggagggtgaatgtcggagacccgaaaagccagtggggcaaggagtttctgatagagaaagccgtgatttcacccggttttgacgtgtttgcaaagaagaaccagggcatcctcgaattttacggggatgacattgcactgctgaaattggctcaaaaggtcaagatgtcaacccacgcgcgacctatatgtttgccatgtacgatggaggccaacctcgcgctgcggcgtccacagggctcgacgtgtcgcgaccacgagaacgagctcctgaataagcagagtgtccccgcacactttgtggctctaaatggttccaaacttaatattaacttgaaaatgggcgttgagtggaccagctgcgcagaagtggtgtcacaggagaagactatgtttcctaacctcacagatgtgcgagaggtcgtgactgaccaatttctgtgctcagggacacaagaggatgagagcccttgcaagggagagtcggggggagccgttttcctagaacgaagattcagatttttccaggtgggactggtgagctggggtctgtataatccatgcttggggtctgccgacaagaattcacgcaaacgcgcacctcgcagcaaagtaccccctccgcgtgattttcatatcaaccttttcaggatgcaaccatggctgcgacagcatctcggtgacgtattaaattttctgccactctag

SEQ ID NO: 219043 - DNA, 1863 bp, synthetic construct
  misc_feature 1..1863: note = Description of Artificial Sequence: Synthetic coding sequence
  source 1..1863: mol_type = other DNA
atgggacccttgatggtccttttttgcctcctcttcttgtaccctgctggacactgtcccaatcctggcatttctctgggggctgtccggaccggctttcgcttcggccatggggacaaggttagataccgttgttcttccaatctggtcttgaccggctcctcagaacgggagtgccagggcaatggagtgtggagcggtactgagcctatatgtcgccaaccttacagctatgactttccagaggacgttgcccctgctctgggaacttctttttcacatatgctcggagctacaaacccaacccagaagactaaagaaagcctcggtcggaagattcagatccagcgcagcggacacttaaatctttacctactccttgattgctcacagagtgtctccgaaaacgactttctcattttcaaggagtctgcctccctgatggtggaccgtatctttagttttgagattaacgtgtccgtcgcaataattaccttcgcctctgaaccaaaggttcttatgtccgtgctcaatgacaattcccgcgatatgaccgaggtgatttcttctctggaaaacgccaactacaaggaccacgagaatggtacaggaactaacacatatgcagccctaaattccgtgtatttgatgatgaacaaccagatgagactcctggggatggagacaatggcctggcaggagatccgtcatgccatcattcttctcaccgacggtaagagcaacatggggggtagtccgaaaactgcagtcgaccacataagagaaattttaaatattaaccagaagcggaatgactacctggatatttatgccattggcgtggggaagttggacgtcgactggcgggagctgaatgaacttggcagcaagaaggatggcgagagacatgctttcattcttcaggacacaaaagcactacaccaggttttcgagcatatgttagacgtctctaagctgacagacaccatctgtggagtcggtaacatgtcagcaaacgcttcagaccaggaaagaacgccttggcacgtaacaattaagcccaagagccaggagacctgcagaggggctctcatttccgaccagtgggtgttgactgcagcccactgttttagagatggaaatgatcattctctttggagagtgaacgtgggcgatcccaaatcacagtggggtaaggagtttctcatagaaaaggcagtgatttccccaggattcgatgtgttcgcaaaaaagaaccagggcatcctcgaattttacggtgacgacatcgcactactgaaattagctcagaaggtaaaaatgagtacacatgccagacctatctgcctgccttgtaccatggaggcaaatctggctttgcgtcggccacaggggagcacctgcagagatcatgaaaacgagttactgaacaaacagtccgtcccggcacatttcgtagcccttaatggctcgaagctgaacatcaatctcaagatgggggtagaatggactagttgcgcggaggttgtgtctcaggagaaaaccatgttccctaacctgactgacgtgcgcgaagtcgtgacagaccagtttctttgctccggaacccaggaggacgaatccccttgcaagggagaatcaggaggcgcagtgttcttagagagacgctttcgcttcttccaggtggggttagtgagctggggattatataatccctgcttaggcagcgcggacaagaattcaagaaagcgagccccaaggtctaaagtgccccctcccagggatttccacatcaacttatttaggatgcagccttggttgaggcagcacctcggcgatgtgcttaactttttacccttgtag

SEQ ID NO: 219044 - DNA, 1863 bp, synthetic construct
  misc_feature 1..1863: note = Description of Artificial Sequence: Synthetic coding sequence
  source 1..1863: mol_type = other DNA
atgggacctctaatggttcttttttgtcttcttttcctgtaccccgctgggcattgcccaaaccccggaatttctttgggcgctgttcgcaccggcttccggtttggtcatggggacaaggtgcgttaccggtgttcgtctaatctagtcctcaccggaagctctgaaagggaatgccagggaaacggcgtatggtccggcaccgagcctatatgtcgccagccatattcatacgacttccctgaagacgtggcgcctgcactgggaactagtttctcccacatgttgggagctaccaacccaactcagaaaaccaaggaaagcttgggcaggaaaatccagatccagcggagcgggcaccttaatttgtatctactcctcgactgttcgcagtccgtgtcagaaaacgattttcttatctttaaagaatcagccagcttaatggtggatagaattttctcattcgagatcaatgtgagcgtggctataataaccttcgccagtgagcctaaggtgcttatgtcagttctaaacgataattcccgcgatatgaccgaggttattagctccctggagaatgccaattataaggaccatgagaacggcaccgggaccaacacatacgccgctctcaactctgtatatctgatgatgaataatcaaatgagactgctcggaatggagaccatggcttggcaggaaatcagacacgcaattatcctcctcaccgacgggaagtcaaacatgggtggcagcccgaaaacggcagtggaccatatacgcgagatcctgaacatcaaccagaagagaaatgactatttggatatctatgccattggagtcgggaagctcgacgtggattggcgtgagctcaacgagctggggtcgaagaaggacggcgagaggcatgcttttattttgcaggacactaaagctctgcatcaagtcttcgaacacatgctggacgtgtccaaactcaccgataccatatgcggcgtgggtaacatgagcgctaatgcctccgaccaagagaggacgccttggcacgttaccattaagcccaagtcccaggaaacctgtcgaggtgccctgatctctgatcagtgggttctcactgccgcacattgttttcgggatgggaatgatcactccctttggagggttaatgtcggggacccgaagagccagtggggtaaggaattcctgatcgagaaagcagttatcagcccaggcttcgatgtctttgcgaagaagaaccaggggattctcgagttctatggcgatgatatcgccctcctgaagctggcccagaaggtgaaaatgtccactcacgctcgcccaatatgcctgccatgtacaatggaggccaacctcgcgctccggagaccccagggttccacgtgcagagaccacgaaaatgaactgctgaacaagcagtccgtacccgctcatttcgtcgctttgaacggctcaaaattgaatatcaacctcaaaatgggggtggagtggactagctgcgccgaggtagtaagtcaagagaaaactatgttcccaaatcttaccgacgtgagagaggtcgtcacagatcagtttctgtgctctggcactcaggaggacgagtccccctgtaagggtgagagtggtggcgcagtcttcttagagcgcaggtttaggttcttccaggtggggctcgtgagctggggcctctacaacccctgtctgggttctgctgataaaaattcaagaaagagagcacccagaagcaaggtgccaccacctagggacttccacatcaacctattcaggatgcaaccctggttaaggcagcatctcggtgacgttttgaacttcctgcccctgtag

SEQ ID NO: 219045 - DNA, 978 bp, synthetic construct
  misc_feature 1..978: note = Description of Artificial Sequence: Synthetic coding sequence
  source 1..978: mol_type = other DNA
atgggtacccgatctgcgattgccgctccgaggattctctgtagtcgaggactgaggagcggatccgcccgagcaaccggctcaggcgttgaacgctctccttccgctgctaaccccaccctaatgacgtccttaagaacatggcctcttccatgggctttaccctctcccacctgcctgggtccgcctatacctccaagacggcagcgcattttttcatttgagattaacgtgtctgtcgcaataatcactttcgcaagcgagcccaaggtgctgatgtccgtgctgaacgataactcgagggacatgactgaggttatctcgagtttagagaacgccaactataaagaccacgagaatgggacaggcacgaatacctatgccgcactgaattctgtgtacttgatgatgaataaccagatgaggttactgggtatggaaacaatggcctggcaagaaattagacacgctattatcctgctcacagatggcaagtcaaacatgggtggatcacccaagaccgctgtggaccacattcgggagatccttaatataaatcagaaaaggaacgattatctcgatatctatgccattggggtcggcaagctagatgttgactggagggagctaaatgagcttggaagcaagaaggatggtgagcgtcacgccttcatcctccaggatacaaaggcattgcaccaggttttcgagcacatgcttgacgtcagtaagctaaccgatacgatctgcggtgtgggtaatatgagtgctaacgcaagcgatcaggaaagaaccccttggcacgtcaccatcaagccaaagagtcaagaaacctgcagaggggcactgatctccgatcaatgggtactcactgctgcccactgctttcgggacgggaatgatcatagcctgtggcgggtgaacgttggggacccgaagtcacaatggggaaaggagttcctgatcgaaaaggcctag

SEQ ID NO: 219046 - DNA, 1134 bp, synthetic construct
  misc_feature 1..1134: note = Description of Artificial Sequence: Synthetic coding sequence
  source 1..1134: mol_type = other DNA
atgacagaagtgatctcttctctagagaatgctaattataaggaccacgaaaatggaacagggacaaatacctatgccgcactgaattctgtgtacttaatgatgaataatcagatgcgactattgggtatggagacaatggcgtggcaggagattcgacacgcaattatcctcctgaccgatggcaaatccaatatgggagggtcacctaaaaccgctgttgaccacatccgggagattctgaatataaatcagaagagaaacgactacctggatatctacgctatcggcgtgggcaaattggatgtggactggagggaattaaacgagcttggcagcaaaaaggacggcgagcggcacgccttcatattacaggatacaaaggcgctgcatcaagtatttgaacacatgttggatgtgtccaaacttactgacactatctgtggggtgggtaacatgtccgccaacgcttctgaccaagagcggacaccttggcacgtgacaattaagccgaagagccaggagacatgtcggggtgcgcttatttctgaccaatgggtcctgactgccgcacactgttttcgcgatggaaacgatcatagtttgtggcgtgtgaatgtaggtgaccccaaatctcaatggggaaaggagttcctcatcgagaaggccgtcatttctccagggttcgacgtattcgctaaaaagaatcagggcattcttgaattctacggggatgacatcgcccttctcaaattggcccagaaggttaagatgtccactcacgcccgtcccatctgtctgccgtgtactatggaggccaatctggcactgagacgaccgcagggctcaacctgccgtgatcacgagaacgaattgctcaataaacagtccgttcccgctcactttgtggccttgaatggctctaagctaaatataaaccttaagatgggggtggagtggaccagctgcgcggaggtggtatcacaggagaaaaccatgtttccaaatctgacagatgtgagggaagtcgtgacggaccaattcctctgttcaggtacccaggaagacgagtctccctgcaaggggggatcaggtgaactaggttctttacaacctcttccatggctgtgctag

SEQ ID NO: 219047 - DNA, 1617 bp, synthetic construct
  misc_feature 1..1617: note = Description of Artificial Sequence: Synthetic coding sequence
  source 1..1617: mol_type = other DNA
atgagggccctctgtatcagggagacctgtagctcggagctgggattttcaagaaattggtcacgccgtaaagcagggcattgcccgaatccgggtataagtctgggtgcggtcagaaccggttttcggtttggacacggggacaaagtgcgctaccgttgttcctccaaccttgtcctgaccggatcaagcgaaagggaatgccaggggaatggcgtctggtctgggactgaacccatctgtcgtcagccttattcgtatgactttcctgaggatgtcgcacctgcactggggactagctttagccacatgctgggggcaacaaatcctacccagaagaccaaggaccatgaaaatgggacagggaccaacacatatgccgctcttaacagtgtctacttgatgatgaacaaccagatgcggctgctgggaatggaaacaatggcctggcaggagattagacatgccattatactgctgacagacggcaaatcaaatatggggggttccccaaaaacagctgttgatcatatccgcgaaatcttgaacatcaaccagaagcgcaacgattacctggacatatacgctattggggtcggcaagctagatgttgactggcgggaactaaacgagctgggcagtaagaaggatggcgaaaggcacgcatttatattacaagataccaaagccctgcaccaggttttcgagcacatgttggacgtgagcaagcttaccgataccatttgtggagtgggcaatatgtccgcaaacgcaagcgaccaggagcgcaccccatggcacgtcaccatcaagcccaagtcacaggagacctgtcgcggagctctgatttccgatcagtgggttttgacagctgcacattgcttccgagatggaaatgatcactctctgtggagggtgaatgtgggagatccaaagtctcagtggggcaaggaatttctgattgaaaaggcagtgatctcgccaggctttgatgtgtttgctaaaaagaaccaggggatcctcgagttttacggggacgacatcgcccttctaaagctcgcccagaaagtgaagatgtctacacacgcccgtcctatttgtctgccctgtactatggaggccaatttggctctccgcaggccacagggctctacctgccgtgaccacgagaacgagcttctcaacaagcagagtgtgcctgcgcactttgtcgctctgaatgggagcaaacttaatattaacttaaagatgggagtggaatggacatcatgcgcagaagttgtgtcacaggagaaaaccatgtttccaaacctgactgatgtgagagaggtcgtaacagaccaatttctgtgtagtggcacacaagaggacgaatcaccttgtaagggggagtcagggggagctgttttcctagaaaggcggttccggtttttccaggtagggctagtctcctggggcctgtacaatccctgcctgggctccgctgacaagaatagcaggaagcgggcacccaggtccaaggtaccgcctccaagggactttcacattaatctgtttaggatgcagccttggttgcgccaacacttgggggacgttttgaattttcttccactctag

SEQ ID NO: 219048 - DNA, 1617 bp, synthetic construct
  misc_feature 1..1617: note = Description of Artificial Sequence: Synthetic coding sequence
  source 1..1617: mol_type = other DNA
atgcgggctctatgtatccgggagacatgcagctctgaattgggttttagtagaaattggtccagacgtaaggctggccactgccctaacccaggtataagtctcggagccgtgaggactggtttccgattcggtcatggggataaggtgagatatcgttgtagctccaatctcgtcttaacaggatcttctgagcgggagtgccagggaaacggggtgtggagcggcactgagcccatctgtaggcagccgtactcatatgatttccccgaggatgtcgcccctgcactaggcacctcgttctcacacatgttaggcgcaacgaatccgacccagaagaccaaggaccatgagaatggaaccgggacaaacacatacgcagctctcaactccgtgtatctgatgatgaataaccagatgcgcctcttgggcatggagactatggcttggcaggagatacgccatgctataatactcctcaccgatggtaaatctaatatgggcggatctccaaagaccgcggtggaccacatccgggaaatactgaacattaaccagaagaggaacgattacctagatatatacgcaataggtgtgggaaagctagacgtggattggcgggagctgaacgagctaggttccaagaaggatggcgagcgtcacgccttcatcctgcaggatactaaggccctgcaccaggtgtttgagcatatgctggatgtgagcaaactgacagacacaatttgcggcgtgggcaacatgtcagccaacgcctcagaccaggaacgcactccctggcatgtgactatcaagcccaagtcccaggagacatgtcggggtgctctaatttcagaccaatgggtgctcacagccgcacactgcttccgcgatggaaacgatcattccctttggcgggtgaatgtgggcgatcccaagagccagtggggcaaggaattcttgattgaaaaggctgtgatctctccaggattcgacgtttttgccaagaagaatcagggaatcctcgagttctacggagacgatatagcacttctcaagctggcccaaaaggttaagatgtctactcacgcacgccctatatgcctgccttgtaccatggaagccaacctcgcgttacgaagaccgcagggatcaacttgcagggaccacgagaatgaactattgaacaaacagagtgtgcctgctcactttgtggccctcaacggctccaaactgaacatcaacctgaaaatgggcgttgaatggacctcatgtgccgaggttgtgtcacaggaaaaaaccatgtttcctaacttgacagatgtgcgcgaggtggtcacagaccaattcctgtgctctggtacccaggaggacgagagcccatgtaagggcgagtccgggggtgccgtgtttctagaacgacggttccgcttctttcaggtcggcttggtgtcttggggactgtataatccttgcctgggctctgctgacaaaaacagccggaaacgggctccaaggagcaaagtccctcccccaagggacttccacatcaacctgtttaggatgcagccgtggttacgccagcatctgggcgatgttctgaatttcctgccgctttag

SEQ ID NO: 219049 - DNA, 4992 bp, synthetic construct
  misc_feature 1..4992: note = Description of Artificial Sequence: Synthetic coding sequence
  source 1..4992: mol_type = other DNA
atgggacccacttccgggccttcattattgctgctgctgctgactcacctccctctcgccctcggatctcccatgtactccatcattacccctaatattctgcggttggagagtgaagagaccatggtcctcgaggcacatgatgcacagggtgatgtgccagtcacagtgacagtgcacgactttccgggtaagaagttggtgctgtccagcgagaaaactgttctcacgcccgcaaccaaccacatgggaaatgttacctttacgatccctgctaatcgggagttcaagagcgaaaaggggaggaacaagtttgtgactgtgcaagcgacattcggaacccaggtcgtcgaaaaggtggtcctggtctctctccagtcgggatatctgttcattcagaccgacaagacaatttacacgccaggctcgacagtcctgtatcgcattttcaccgtcaaccataagttgctgcccgtggggcgaaccgtaatggtgaatattgaaaatcccgagggcatccctgtgaagcaggatagtctgagtagccagaaccagttaggagtactgcctctctcgtgggatatccctgaactggtcaatatgggccagtggaagataagagcctactacgagaattctccccaacaggtattttctactgaatttgaggtgaaggaatacgtactccccagcttcgaagtgatcgttgaaccaactgagaagttctactatatttacaatgagaagggtttagaagtcaccatcactgcaagatttctgtatggcaagaaagtggagggaaccgcattcgttatttttggcattcaggatggggagcaacgcatttccttgcccgagagtttgaaacggatccctatagaagacgggtctggagaggtcgtgctgagtcgtaaggttctcttggacggcgtccagaacccgagggctgaggacctggtgggaaaatctctctacgtgagcgccacggtcatattgcacagcggatcggatatggttcaggccgagaggagcggcatcccaattgtgacatccccttaccagatacactttacaaaaaccccaaagtactttaagccagggatgcccttcgacttgatggttttcgtcaccaatccagatggatcccccgcataccgggtcccagtggcagtgcagggcgaggacacggtgcagtccctgactcagggtgatggggtggccaaactgtccatcaatacccacccctctcaaaagcccctcagtatcacagtgaggactaaaaagcaggagttatccgaagctgagcaggctacccggactatgcaagccttgccatacagcacagtggggaatagcaataattacttgcacctgtcagtgctgcgaacggagctgcgtcccggagagactcttaacgtaaattttctcctccgcatggatcgcgcacatgaggccaagatccggtactatacttatttgatcatgaacaaagggcgtctgctgaaagcaggcagacaggtccgcgagcctggacaggatctggtggttctccctctatctattacaacagactttatcccatcatttagactcgtggcatactacactctgatcggggcttccgggcagagagaagtagttgctgactcggtttgggtagacgtcaaggactcatgcgtaggctctctggtcgtgaagtcagggcagtcagaagatcggcaacctgtccccggacagcagatgactttaaaaatagagggtgaccatggcgcaagggtggtgctggtagccgttgacaaaggagtatttgtgctgaataaaaagaataagttaactcagtcaaaaatctgggacgttgtggaaaaggccgatataggttgtactcccggttcaggcaaagactatgccggtgtgttctccgacgccggtctgacctttacctctagttccggacagcaaactgcccagcgcgctgagttacaatgccctcagcctgccgcaagacggagaagaagcgtgcagttgactgagaaacgaatggacaaggtgggcaagtaccctaaagagttacgcaaatgctgcgaagacggcatgagggagaacccgatgcgattcagctgccagcggcgaaccaggtttatatccctcggagaggcatgcaagaaggtctttctggattgttgcaactacataaccgaacttaggcgacaacatgcgagagcgtcacatcttgggttagcaaggagtaaccttgacgaggacattatcgcagaggaaaatatagtctctcggtcggagtttccagaaagctggctctggaatgttgaagaccttaaggagccgccaaagaacgggataagtaccaaactgatgaacatcttcctgaaggactctatcacgacctgggaaattcttgccgtgagcatgagcgataagaaggggatctgcgtggccgatccattcgaggttaccgttatgcaggattttttcatagatctgaggcttccgtactctgtcgtgaggaatgagcaagtcgaaattcgcgctgttctgtataactacaggcaaaaccaggaacttaaagtgagagtggagttactgcacaatcccgctttttgcagcctcgccaccactaaacgccgacatcagcagactgtaacaatccctcccaaaagttccctgtctgttccttacgtgattgtacccctgaaaacagggctgcaagaggtcgaagtgaaagcagctgtgtaccatcactttatctctgacggagtccgtaagtcacttaaggtcgtgcctgagggaattaggatgaataaaaccgtggcagtccgtaccttagaccctgagcggctgggccgagaaggtgttcagaaggaagatattccacccgcagatttgtctgatcaggttcccgacaccgagagcgagacccgcatacttctacagggaaccccagtcgcgcagatgaccgaggacgctgtcgatgcggaaaggctcaagcatctgatcgtcactccctcaggctgtggcgagcagaacatgataggcatgacccctactgtcatagccgtgcactatctggacgagacagagcaatgggagaagtttggactggagaagcgacagggagccttggagttaattaagaaagggtatacgcagcagctggccttccgtcagccctcatcagccttcgccgcatttgtaaaaagagccccaagcacctggctcactgcctatgtcgtcaaagtcttcagcctcgcggtcaacctaatcgccatcgactcccaggtgctttgcggtgctgtgaagtggctcatattggaaaaacagaagcctgacggcgtattccaggaagatgcgccagtcatacaccaagaaatgataggtggcctccggaataacaacgagaaggacatggcactgactgcttttgtgctcatctcgctgcaagaagcaaaggatatctgcgaggagcaagtgaacagcttgccgggaagtattaccaaggcaggtgattttctcgaggcaaactatatgaatctgcaaagatcctacacggtggccatcgccggatacgctttagcccagatgggacgtttgaaaggacctctactgaataaattcctaaccaccgccaaggacaaaaatcgctgggaagacccaggaaaacagctctacaacgtggaggctacgagctatgcactgcttgcgctgcttcagctcaaggactttgatttcgtaccaccagtcgtacgttggctgaatgaacagcgatattatggcggaggctacgggagcacgcaggccacgttcatggtctttcaggctctcgcacaataccagaaggacgctcccgatcaccaggagctcaacctggatgtctcattacagctcccttcccgttcgtcaaaaatcacgcacagaatccactgggaaagcgccagtctgctgagaagcgaggaaactaaggagaacgagggcttcacagttacagccgaaggcaagggtcagggcacactgagcgtggtgaccatgtatcacgccaaggcaaaggaccagctgacctgtaacaagttcgatttaaaggtgacaatcaagccagccccagaaaccgaaaagcgtccacaggatgcgaaaaacaccatgatcttggagatctgcacccggtataggggagaccaggacgcaaccatgagcatcctagatatcagtatgatgaccggatttgcccctgacacagacgacttaaaacagctggctaatggagtggaccggtatataagtaagtacgaactcgataaagccttcagtgatcggaacacgttgattatctatttggataaggtgtcccatagcgaagatgactgcctggcattcaaggtgcaccagtatttcaacgtagagctcatacagcctggcgcagtgaaggtctatgcatattataacttggaggaatcttgtaccagattttaccaccccgagaaggaggacggcaaactgaataagttgtgccgcgatgaactctgtcgctgcgccgaggagaactgttttattcagaagtcagatgacaaagtgacactggaagaaaggttggataaggcctgcgaaccaggcgtcgactatgtgtacaaaacgcgcctagtgaaggtgcagctcagcaacgatttcgatgagtacattatggctatagaacagactattaaatctggatccgatgaagtgcaggtgggacagcaaaggaccttcatcagccctatcaagtgcagagaagccctcaaacttgaagagaagaagcactatcttatgtggggcctgagctcagacttttggggagagaaaccgaaccttagttacatcatcggcaaggatacctgggtggagcattggcctgaagaggatgagtgtcaggacgaggaaaaccagaagcaatgccaggatctcggcgcatttacagaatctatggtggtgtttggttgcccaaactag

SEQ ID NO: 219050 - DNA, 1794 bp, synthetic construct
  misc_feature 1..1794: note = Description of Artificial Sequence: Synthetic coding sequence
  source 1..1794: mol_type = other DNA
atgcatcctcctaaaactccgtccggcgctctacacagaaaaagaaagatggccgcttggccttttagccgtttgtggaaggtcagtgatccaattttatttcaaatgacactgatcgccgcattactgccggctgtccttggcaattgtggccctcccccaaccctctccttcgcagcgccaatggacatcaccctaacagagacccgtttcaaaaccgggactactttgaaatatacttgcctgcccggttatgtccggtcccacagcacgcagaccctgacctgtaacagcgacggagagtgggtgtataataccttctgcatttacaagaggtgcagacaccctggcgagctgaggaacgggcaagttgaaatcaaaacggatttatcattcggtagccaaatcgagttctcctgcagtgagggattcttcctgattggatcaactacgtctcgatgcgaggtacaagacaggggtgttgggtggtcgcatcccctacctcagtgcgaaatagtgaaatgtaaaccacctcctgacatcagaaacggcaggcattctggggaagaaaacttctacgcctatggtttcagtgttacctactcctgtgaccccaggttctctctactggggcacgcaagcatcagttgcaccgtggaaaacgaaactatcggcgtatggaggccttcaccccctacttgcgaaaagatcacgtgtagaaaaccggatgtgtctcacggggagatggtgtcaggcttcggccctatttataactataaggataccattgtctttaaatgtcagaagggttttgtgttaaggggaagttccgtgattcactgcgacgcagactctaagtggaatccatccccacctgcctgtgaacctaacagctgcattaatctcccagatattcctcacgcgtcttgggaaacatacccaaggcctacgaaagaggatgtgtatgttgtcggaactgttctccgttaccggtgtcatccaggctacaagcccaccaccgatgagcctactaccgtaatttgccagaagaatctgaggtggaccccatatcaagggtgcgaagccttatgttgcccagaacccaaactgaacaatggagagatcactcagcatcgcaagtcgagacccgcaaaccattgcgtgtatttctatggcgacgaaatttctttctcttgccatgagaccagccgcttctcagctatatgccagggcgacgggacttggtcgcccaggacccccagctgcggcgatatttgtaactttccacccaagattgcacacggtcattataaacagagtagcagctacagcttcttcaaagaggaaatcatctatgaatgcgataaggggtacatcctggtcggccaagccaagttgtcctgcagttattcccattggtctgcgcctgctcctcaatgcaaagctctgtgcaggaaacctgagctcgtgaatgggaggctcagcgtggacaaagatcaatacgtcgagccggagaacgtcacaatccagtgcgattctggatatggggtggttgggccacaaagcattacctgttcagggaataggacctggtaccctgaagtcccaaaatgcgagtgggagacaccagaaggctgtgagcaggtcctgactgggaagagactgatgcagtgtctccccaatccggaggacgtcaaaatggccctggaggtgtataagttgtcgctggagattgagcagttggagctgcagagagatagcgcccgacagagcacacttgacaaagagctgtag

SEQ ID NO: 219051 - DNA, 459 bp, synthetic construct
  misc_feature 1..459: note = Description of Artificial Sequence: Synthetic coding sequence
  source 1..459: mol_type = other DNA
atgcacccgcctaagacccccagcggagccctgcatcgcaagcgcaagatggccgcttggcctttcagcaggctttggaaagtgtccgatccgatcttattccagatgaccctgatcgccgctctgctgcctgcagtgctgggaaactgtggtccccctccaactctcagttttgccgctccaatggacataactttaaccgagacccgctttaaaacaggcaccactctaaagtatacctgcttgcctggatatgtccgatcccactccacccagacattaacctgtaactctgacggcgaatgggtgtacaacactttttgcatctacaaacggtgccggcacccaggcgaattgagaaacggacaagttgagatcaaaacagacctgagtttcggaagccagatagaatttagctgttccgaaggcttctttcttatcggtagcactacaagctag

SEQ ID NO: 219052 - DNA, 759 bp, synthetic construct
  misc_feature 1..759: note = Description of Artificial Sequence: Synthetic coding sequence
  source 1..759: mol_type = other DNA
atgtttttctggtgcgcatgctgcttgatggtggcatggagagtcagtgcctctgatgccgagcattgccccgaacttccgccagtggacaattcaatttttgtggctaaggaggtggaagggcagattttgggaacatatgtatgcataaagggataccatctggtagggaaaaaaaccctgttttgcaatgcgagcaaagagtgggataataccacaactgaatgccggctgggccactgtcccgatccagttcttgtcaacggcgaattctccagttccggacctgtgaatgtgagtgacaagatcaccttcatgtgcaatgatcattatatccttaaaggcagcaaccgctcacaatgtctggaggaccacacttgggcccctccatttccaatctgtaagtctcgggactgtgacccacccggtaatcctgtgcacggatattttgaaggcaataattttactctagggtctacgatctcctattactgcgaggaccggtactacctagtgggcgtacaggagcaacagtgcgtggacggcgaatggtccagcgctttacccgtctgcaagctcatccaagaggcgccaaagcctgaatgtgagaaggcccttctcgcgtttcaggagtccaagaacctgtgcgaggccatggaaaatttcatgcaacaattaaaagaatccggcatgaccatggaggaactgaaatacagcctggagttaaagaaggcagagttaaaagctaagcttctctag

SEQ ID NO: 219053 - DNA, 756 bp, synthetic construct
  misc_feature 1..756: note = Description of Artificial Sequence: Synthetic coding sequence
  source 1..756: mol_type = other DNA
atgtttttctggtgcgcgtgctgtctcatggtcgcctggagagtgtctgcaagcgacgaacactgtcccgagctcccccctgtggacaatagcatcttcgtagctaaagaggtggagggacagattctgggcacctacgtatgtataaaggggtaccaccttgtagggaaaaagaccctattttgcaacgcttctaaggaatgggacaacacaacaactgaatgccgactgggccattgtcctgatcccgtactggtgaatggggagttctcttcatcaggccctgtaaacgtttctgacaaaatcacatttatgtgcaatgaccactatatcttaaagggttccaataggagccagtgtctcgaagaccatacttgggcaccaccttttccgatctgtaaaagcagggattgcgatccacctgggaatccagttcacggttactttgaaggtaataatttcactctgggatcaaccatctcctattactgcgaagatcggtattatctcgtcggagtgcaagaacagcagtgcgtggatggggagtggtctagcgcactcccagtctgcaaactgatccaagaggctccaaaacctgaatgtgagaaggccctgctcgcgttccaggagagtaaaaatctgtgcgaagcgatggaaaactttatgcagcagctaaaggaatcaggaatgacaatggaagaactgaagtactccctggaactgaagaaagcggagctcaaagctaaactgctatag

SEQ ID NO: 219054 - DNA, 759 bp, synthetic construct
  misc_feature 1..759: note = Description of Artificial Sequence: Synthetic coding sequence
  source 1..759: mol_type = other DNA
atgtttttctggtgcgcctgctgtctgatggtagcgtggcgtgtctcagcttccgacgcagagcattgccctgaactgccacccgtggacaacagtatttttgtagcgaaagaagtggagggtcagattctgggcacttacgtttgtataaagggctaccacctggtgggaaagaagactctgttttgtaacgcgtctaaagagtgggacaacaccacgactgagtgtcggctgggccactgtcccgatccggtgctcgttaatggggagtttagcagtagcgggcctgtcaacgtcagtgataagataacctttatgtgcaacgaccactatattttaaagggctccaatagaagccaatgcctcgaagatcatacctgggcgccacctttccccatttgcaaatcgcgagattgcgacccccctggcaatcccgtgcacggatattttgaaggcaataatttcactctgggcagcacgatttcatattattgtgaggaccgttattacctggtgggcgtgcaagaacaacagtgcgtggacggcgaatggagctcagccctgccagtatgtaagctcattcaggaagctcccaagccagaatgtgaaaaggctctactggccttccaggaatcaaagaacctctgtgaagcaatggagaatttcatgcagcaattaaaggagtcagggatgaccatggaagaactgaagtattcattagaactgaagaaagccgagttgaaggctaaactgctgtag

SEQ ID NO: 219055 - DNA, 759 bp, synthetic construct
  misc_feature 1..759: note = Description of Artificial Sequence: Synthetic coding sequence
  source 1..759: mol_type = other DNA
atgttcttttggtgtgcttgttgtctgatggtggcgtggcgggtgtccgcaagcgatgccgagcactgccctgagttgccccctgtcgacaactcaattttcgttgctaaggaggtggagggtcaaatccttgggacatacgtgtgtataaaaggctatcatctcgttggcaagaagacattattttgcaacgcgtctaaggagtgggacaacactaccactgaatgtcgtctcgggcactgccccgaccccgtgttagtgaacggagaattcagcagctcgggcccagtgaacgtttctgataagatcacctttatgtgtaacgaccattacatactgaagggatcaaataggtcccagtgcctagaagatcatacgtgggcccctccctttcctatctgtaagagccgggattgcgatccccctggtaaccctgtgcatggctatttcgaagggaacaacttcaccctgggcagtactatcagttactactgtgaggaccgctactatttggtgggtgtccaagagcagcagtgtgtcgacggagaatggtcttccgctctgccggtctgtaagctgatccaagaagcaccgaagcccgagtgcgaaaaggccctgctggcattccaggagtccaagaacctgtgcgaagctatggaaaacttcatgcagcagctgaaggaaagtggtatgacaatggaggagctcaagtattctctggagctgaagaaagccgaactaaaggccaagcttctgtag

SEQ ID NO: 219056 - DNA, 657 bp, synthetic construct
  misc_feature 1..657: note = Description of Artificial Sequence: Synthetic coding sequence
  source 1..657: mol_type = other DNA
atggtggcctggcgcgtgagtgcaagtgatgaacattgccccgagctccccccagtcgataattcaattttcgtggccaaagaggtggagggccagatcctgggtacgtacgtgtgcatcaagggctaccatctggttgggaagaaaaccctgttttgtaacgcttctaaagagtgggataacaccacaaccgagtgccgcttagggcactgtccggaccctgtcctggtgaatggcgaatttagttcctccggccctgttaacgttagcgataaaatcacctttatgtgcaacgaccactacatactgaagggatcaaataggagtcaatgcctcgaggatcacacgtgggcgcctccgttccctatatgtaaatctatacctcaaacacggccactgccgtttcagccctgttcacctctattcctttttttactgcgccagtccttggccctgtttcctaggctggagtgttctggtcgcattcttgcccattgcaatctacaccttcctggctcatcctcctcccatgcatcagcctcacaggttgccggaatcacaggcgcacaccccagatgggctaatttttgtatattttctagagattgggttagtccctgttggcccggttggtctcagattccggacttgaggtag

SEQ ID NO: 219057 - DNA, 546 bp, synthetic construct
  misc_feature 1..546: note = Description of Artificial Sequence: Synthetic coding sequence
  source 1..546: mol_type = other DNA
atgtttttctggtgcgcctgctgcctaatggtggcttggagggtctctgcatccgacgctgaacactgtcccgagctgcccccagtggacaacagtatatttgtcgctaaggaggttgagggtcaaatactggggacctacgtatgtattaagggctaccatcttgttggtaaaaagactcttttttgtaatgcatccaaggaatgggacaacaccacgacagaatgtagactcggccattgcccagatccggtgctggtaaatggagagttttcatctagcggcccagttaacgtcagcgacaaaatcaccttcatgtgcaacgaccactacattttgaaaggctctaacaggagccaatgtttggaggaccacacctgggcaccaccctttcctatttgtaaatcaagagattgtgaccccccaggaaatccagtgcatggttacttcgagggaaataactttacgttgggtagtacaatttcttattattgcgaggacaggtattatctcgtgggcgtccaggaacagcaatgtgtggattag

SEQ ID NO: 219058 - DNA, 5234 bp, synthetic construct
  misc_feature 1..5234: note = Description of Artificial Sequence: Synthetic coding sequence
  source 1..5234: mol_type = other DNA
atgaggctgctctggggtttaatatgggcatccagcttcttcacgctgagcctccagaagcctaggctcctactgttttctccttctgtggtgcacctcggggtgccactttcagtgggagtccagctgcaggacgtaccaaggggccaggtagtgaaaggctctgtttttttaaggaacccatcacgtaataatgtgccttgctcgcccaaggtggacttcacattatccagcgaaagagattttgcgctgctgtcattgcaagtaccactgaaggatgccaagtcctgtgggctgcatcagctgctaagagggccagaggtgcaactcgttgctcatagtccgtggctgaaggactctttgtctcgaactacaaacattcagggcatcaacctgctgttctcctcacggaggggccaccttttcctgcaaactgaccagccaatctacaaccctggacagcgggtcagataccgcgtgtttgctcttgaccagaagatgcgcccttcgaccgacacgatcactgtcatggtggaaaactcacacggactcagggtaagaaagaaggaagtgtacatgccatccagtatcttccaggacgattttgtcataccagacatctcagaacccggaacatggaagatctctgcacgcttcagtgatgggctggagtctaactccagtacgcaatttgaggtgaagaagtatgtgctgcctaacttcgaggttaagataactcccggaaagccctatatactcaccgtgccgggacacctggacgagatgcagctggacattcaagccagatatatctatggcaagccggttcagggagttgcctacgtaaggttcggtttactggatgaggatggaaagaaaactttctttcgtgggctggagtctcagactaagcttgtcaacggacagagtcacatctcgctctccaaggcagaattccaggatgccttggagaagctgaatatgggcataaccgacctccagggtctcaggctgtatgtggctgctgccataatcgagtaccccggtggagaaatggaggaggccgagctaacaagttggtatttcgtttcctcacccttcagcctcgatctgtccaagaccaaacgccacttggtgccaggggcacctttcctactgcaggcccttgtcagagagatgtcaggctcacccgcttcaggcatacccgtgaaggtgtccgcaactgtgagctctcccggaagcgtccctgaagtgcaggacattcagcagaacacggacggatctggtcaagtttccatacccataattattcctcaaacaatttcagagctgcagctctcagtgtcagccggttcaccccaccctgcgatcgcgaggctgacagtggccgctcccccatccggaggccctgggttcctgagtatcgaatggccagatagtaggccgcctagggtgggtgacaccctcaacctgaatttgcgcgctgtcggaagtggggcaactttctctcactattactacatgatcttatctagaggccagatcgtgttcatgaacagagaacctaaaagaaccctgacctccgtaagcgtgtttgtcgatcaccatttggctccctccttctattttgtagccttctactatcatggggaccacccagtggctaatagcctgcgtgtcgacgtgcaggctggagcttgcgagggtaaactggaactgagcgtggatggagccaaacagtaccgaaatggagaatccgttaagttacacttggagactgacagcctcgcattggttgcccttggagcgctcgatactgctctctatgcagccggtagcaagtctcacaagcctctgaacatgggaaaggtgtttgaggctatgaactcatacgatcttggctgtggaccgggaggtggcgactctgcccttcaagtgtttcaggccgcagggttagcttttagcgacggagaccagtggaccctgtcccgcaagcgcttaagctgccccaaagaaaagaccacccgtaagaaaagaaacgtgaactttcaaaaagccatcaacgagaaactgggccagtatgcatctcccacagcaaagagatgttgccaagacggagttacacgtctgcccatgatgcgctcgtgcgaacaacgagccgcaagagttcagcaacccgactgccgagaaccatttctctcttgctgccagttcgcagagtccctgaggaaaaagagccgggataaaggccaggctgggctgcagcgcgctctcgagatcttacaggaagaagacttgattgacgaggacgacattcctgtccggagtttcttcccagaaaattggctctggcgtgtcgaaacagttgacagatttcagatcctgactctgtggctgcccgactcattgaccacctgggagatacatggcctgtccttgtctaaaactaagggtctctgtgtcgccaccccagtccagctcagagtgtttcgcgaattccatctacacctgcgactgcccatgagtgtgcggagattcgagcagttagaactcagacctgtactttataattacctggacaagaacctcacagtgtcagttcacgtgtctcctgtggaaggattatgtctcgcgggtgggggagggttggctcagcaggttctcgtccctgccggttctgcgcgtcccgtggctttctctgtcgtgccaactgccgctgccgctgtgagcttgaaggtggtcgcaaggggatcttttgagttcccagtaggcgatgccgtgtccaaagtgctacagatcgaaaaagaaggcgctattcacagagaagagttagtctacgagcttaatcccttggaccatcggggtcgtacattggagatcccgggtaacagcgaccctaatatgatcccagacggagacttcaactcgtatgtacgcgttactgcttccgacccactggacacgctcggctcagagggggctctcagtcccggaggggtggcttccctgctgcggctccccaggggatgtggtgaacagacgatgatttacttagctccgaccttagccgcttccaggtacttggacaaaacagagcaatggtctacactgccacctgagaccaaggaccacgcagtcgatctgattcagaagggttacatgcgtatccaacagttccggaaggctgacggcagttatgccgcatggctgtcacgggactcatctacatggctgacagcctttgtattgaaggttctgtctctggcccaggaacaagttgggggttcccctgaaaaactccaggagacaagcaattggctcctaagccagcagcaagccgacggctctttccaggatccatgtcccgtgctggacagaagtatgcagggcggtctggtgggcaacgacgagactgttgcactcacagctttcgttaccattgccctgcaccacgggttagctgtgttccaggatgagggggcagaaccgttgaaacagcgcgtcgaagcctccatctccaaggctaactcgtttctgggcgagaaagcctcagctggcctgctgggggctcatgcggcagccattaccgcatacgcccttactttaaccaaggcgccagtggacttgttaggcgtggcccacaacaatttaatggctatggctcaggagactggagacaatctatactggggttccgtgacagggagtcagagcaatgcggtgagcccaacgcccgctcctagaaatccatcagaccccatgccccaggccccagctctgtggatagagaccacagcttatgccctgttgcacctgctgctgcacgaaggaaaagccgagatggccgaccaggcggctgcttggcttaccaggcaggggtctttccagggtggttttcgctctacacaggacactgtgatcgcgctagacgccctgagcgcttattggatcgcctcccacacaactgaggaaaggggcctcaacgtcaccctgtcctcaactgggagaaacggctttaaatctcatgccctgcaacttaacaaccggcagatccggggactggaggaggagctgcagttttcactgggatcaaaaatcaatgtcaaagtgggagggaactctaaggggacattgaaagtgctgcgcacatataatgttctggatatgaaaaatactacttgtcaggacttacagattgaggtgactgtcaagggacacgttgagtataccatggaggccaacgaagattatgaggactacgagtatgacgagctgccagctaaagacgaccccgatgcgccacttcagcccgtcacccctcttcagctatttgagggtaggcggaacagaagacgccgagaagcacccaaggttgtggaggagcaggagtcaagggtgcattacactgtatgtatttggcgcaatggaaaagtgggcctctcaggcatggccattgccgatgtgaccctgctctcagggtttcatgcgcttagagctgacctcgagaaacttacctccctgagcgatcgctacgtgagccattttgaaacggagggtcctcacgtcttgctctactttgactcagtgcctacgagtagagaatgtgttgggttcgaggccgtacaggaggtgcccgtgggcttggtccagcccgcatccgctactctttatgactattataaccccgaaaggcgatgctctgtattttatggagcacctagtaagtcacgcttgctggctaccctctgcagcgccgaggtgtgtcaatgtgctgaaggtaaatgccctcggcaacggagagccctcgagaggggcctgcaggatgaagacgggtacaggatgaaatttgcctgttactaccccagagttgaatacggattccaggttaaggtgctgcgagaggatagtcgggcagccttcaggctgttcgaaacaaaaatcactcaagtgctccacttcactaaagatgtgaaagcagcagccaaccagatgaggaatttcttggttcgtgcaagctgtcggcttcgcctggagcccggaaaagagtacttaataatggggctcgatggagccacctacgacctagaggggcacccgcagtatttgctggatagcaacagctggatagaggaaatgccctccgaacgcttgtgccgcagcacacgccagagggctgcttgcgctcagctcaacgacttcctgcaggagtacggcacacaggggtgtcaagttta

SEQ ID NO: 219059 - DNA, 5234 bp, synthetic construct
  misc_feature 1..5234: note = Description of Artificial Sequence: Synthetic coding sequence
  source 1..5234: mol_type = other DNA
atgaggctactgtggggattaatctgggccagttcttttttcactctaagcctgcaaaagccacgcctcctgctgttctctccctccgtggtacatctaggagtgccactgtcagtgggcgtacagctgcaggacgtgccgagagggcaggtcgtgaaggggtctgttttcctgcggaatccctcaaggaacaatgtcccgtgctcgcctaaggtggatttcacgctctccagcgagagggattttgcactgctgtccttacaggtgccccttaaagacgctaaaagctgcggcctgcatcaattgctacgcggtcccgaagtgcaactggttgcccacagcccctggcttaaggattctttgtctcgcacgacaaatatccaggggattaacctgttgtttagttcgcgcagaggtcatctcttcttacagactgaccagcctatatacaatcctggccagcgagtgaggtatagggtcttcgcattggaccagaagatgagaccaagcacggacaccatcactgttatggtggaaaattcacacgggttgcgagtgcgaaagaaggaagtttatatgccgagtagtatcttccaagatgactttgtgatccccgacatttctgagcctgggacttggaagatctctgctaggttcagcgacggactggaatccaattcaagcacacaattcgaggtgaagaagtatgtgctgccaaatttcgaggtgaaaatcacacctggaaagccatacattctgacagtgcccggtcatctcgacgagatgcaactggacatccaggccaggtatatttatgggaagccagtccaaggcgtggcctatgttcggtttggcctgctcgatgaagacggcaagaagacattctttagagggcttgagagtcagactaaactggtgaatggacagtcacatattagcctaagtaaggccgagtttcaggacgcactggagaaattaaacatgggaattaccgatttgcaggggctcaggctctacgtcgccgctgccataattgagagccctggaggcgagatggaagaggccgaactcacatcatggtacttcgtgtcttctccgttttctcttgaccttagcaaaactaagcggcacctggtgcccggtgctccctttcttttgcaggcacttgtcagggaaatgtccggctcgcctgcttcaggcatccccgtgaaggtgagtgccaccgtctctagcccaggcagtgttcccgaggtgcaagatatacagcagaatactgacgggagcggccaagttagcatcccaataatcatccctcagaccatctcagagctccagttaagtgtctccgctggctccccccaccccgctattgccaggctaacagtagcagctccccctagcggaggcccagggtttctttctatcgagcggccagacagcagacctccacgagtcggggatacactgaatctcaacctgagggccgtaggttctggagcgacgttcagccattattattacatgattctgtctcggggacaaatagtgtttatgaaccgggagccaaaaagaaccctgacgtccgtgagtgtgtttgttgatcaccacctggccccaagcttctatttcgtcgcattctattatcacggagatcaccctgtagcgaactctctccgcgttgatgtccaggccggagcttgcgagggcaaattggagctgtcggtcgacggcgctaaacagtaccgcaacggcgaatcagtgaagctgcatctggagacagactctctcgctctcgtggcactgggcgcattggacaccgccctatacgcagctggaagcaagtctcataaaccacttaacatgggaaaggtcttcgaagctatgaatagctacgatttgggatgcggacccggaggcggagactccgcccttcaagtgtttcaggctgccggattagccttctcagatggcgaccagtggaccctctcaaggaaacggctgtcctgtccaaaagagaaaacaacaaggaagaaacggaacgttaactttcagaaagctatcaacgagaagctggggcagtatgcaagccccactgcaaaacgatgttgccaggacggtgtcacaagactgcctatgatgcggtcctgcgaacagagagctgccagggtccaacaacctgactgcagggagcccttcctgtcttgttgccagttcgccgaaagtctccgcaagaaatctcgagacaaggggcaggcaggtcttcaaagagctcttgaaatcctgcaggaagaagacctgatagatgaggacgacatccctgtgcgtagtttttttcccgagaattggctctggagggttgagactgtggacagatttcaaatcctcactctatggctgcccgatagcctaactacatgggaaatccatgggttgagcttatcgaaaacgaaggggctctgtgtggcaacacctgttcaactccgggtcttcagggagtttcatctgcatttaaggctgccaatgagtgtgcgccgatttgaacagctcgaactcaggcccgtcttgtataattatcttgacaagaatttaacagtgagcgttcatgtgtcccctgtggaaggcctgtgtctcgctggaggcggagggctcgctcagcaagtgttggtccctgccggatctgctcgccctgtggcatttagcgtcgtgcctaccgcggcagccgctgtgtccctgaaagtggtggccaggggttctttcgaatttcccgttggtgatgccgtgagcaaggtgcttcagattgagaaggagggcgctattcacagagaggaactggtgtacgagttgaatcctttggaccaccgtggccgaactcttgagatccctggcaatagcgatccaaacatgatccctgatggcgacttcaattcatacgtgcgagttacggctagcgacccactggatacactggggagcgagggagccctgtctccaggaggtgtggcctccctgctgcgcctgcctcgaggttgcggagagcagacaatgatctatctggcccctacgctcgctgcctccaggtacctagacaagacagagcagtggagtaccctgccgcctgagaccaaggaccacgctgtggatctcattcagaaggggtacatgcgaatacagcagttccgaaaagctgacggctcttacgcagcctggttgtcaagggacagctctacctggctgaccgccttcgttcttaaggtcttgtctttggcacaggaacaggtcggtggctccccagagaaactacaggaaacctcaaactggcttctttcccagcaacaggcagatggatcttttcaggatccgtgtcctgtgttagacaggtctatgcagggcggattggtggggaacgatgaaactgtggccctgactgcgtttgttactattgccctccaccacggactcgcggtgtttcaggatgaaggtgcagagcccctgaagcaacgggtggaggcctctatttccaaggcctcctccttcctcggggaaaaggcctccgcgggacttttgggcgcacacgcggcagcgataaccgcgtacgctctgaccctgaccaaggcgccagtagacctgctgggcgtcgcccataataatcttatggcgatggcccaggagactggcgacaatctgtactggggaagcgtaacaggctcccagagcaacgcagtcagtcctacacctgctccgaggaacccgtcggatcctatgccacaagcaccagctttgtggatcgaaacaactgcatatgccctgctgcacctgctgttgcacgagggaaaggccgagatggctgaccaggctgcagcctggcttaccagacagggatcctttcagggaggcttcaggagtacgcaggataccgtcatagccctggatgccttatctgcctactggatagcctcacacacaaccgaggagagaggcttaaacgttactttgtcttcaacgggaagaaacggattcaaaagccacgctctgcagctgaacaatcggcagattcggggactggaggaagagctgcagttcagtctggggtctaagatcaacgtcaaagtgggcggaaactccaaagggaccctgaaagttttgcgaacctacaacgtattggatatgaagaataccacatgccaggaccttcagatcgaagtgacggtgaaggggcatgtagaatacactatggaggctaacgaagattatgaggactacgaatatgatgaacttcccgcaaaggatgatcccgacgcccctttgcagccagtgaccccacttcagctgttcgagggacggcgaaaccggcgacggcgtgaggcgccaaaagtagttgaggaacaagaatcccgtgtgcactacaccgtttgcatctggaggaatggaaaagtcgggttaagtggaatggccatcgccgacgtgacccttttgagcggattccatgcactacgggctgatctggagaaattaactagcttatccgacaggtacgtgtctcacttcgagactgagggtcctcatgttttgctctattttgattccgtgcctactagtagggaatgtgtgggctttgaagcagttcaggaagttcccgtcgggctggtacaacccgcatcagctacgctgtatgactactataatcccgaacgtcggtgctcggttttttatggcgctccttcaaagagtcggttgctggcaaccctttgctctgcggaggtatgccaatgcgctgaaggtaaatgtcctagacagcgacgagccctcgagagaggtctacaggacgaggacggatacaggatgaagttcgcttgctattatcctcgagtggagtacggctttcaggtaaaggtgctgagggaggactcccgggcagcatttcgactctttgagaccaaaatcacccaggtgttgcactttacgaaggacgtcaaggctgctgccaaccagatgcgtaactttctcgtccgggcttcatgccgtctccggttagagccaggtaaggaatatctcattatggggttggatggcgcaacatatgacctcgagggccatcctcagtacctgctggacagtaattcatggatcgaagaaatgccatctgaacggctgtgtcgctcaactcgacagagggccgcatgcgctcaactaaatgactttctgcaggaatacggaacgcaaggatgtcaggtata

SEQ ID NO: 219060 - DNA, 5234 bp, synthetic construct
  misc_feature 1..5234: note = Description of Artificial Sequence: Synthetic coding sequence
  source 1..5234: mol_type = other DNA
atgcgcttgctgtggggtctgatatgggcgagttcattcttcactctatcgctgcaaaagccacgtctgctgctcttctccccctcggtggtccaccttggagttcctctgtccgtcggggtacaactccaggacgtcccgaggggacaggtcgttaagggaagcgtttttctgcggaacccatccaggaataacgtaccttgctcccctaaagtggacttcactctgtcttccgaaagagatttcgccctgttgagcctccaggtccccctaaaagacgcgaagtcttgcggtctacatcagctgctgcggggacctgaagtacagttggtcgcacactccccctggcttaaggattcactgagtaggaccacaaacatccagggcataaacctcctgttttcatcacgtagaggacaccttttcctgcaaacagatcagcccatctacaacccaggacagagggtccgctatagggtctttgccttagaccaaaagatgcgaccaagtacagataccatcaccgtcatggttgagaattctcacgggttaagagtacggaaaaaagaagtctatatgccttcatccatctttcaagacgatttcgtcattcccgatattagtgaacccggtacttggaaaatttccgcccgattcagcgacggacttgagagtaactcctctacgcagttcgaagtgaaaaagtatgtgttgccaaattttgaagtcaaaataacccctggtaagccgtacatattaacagtgcctggccacttagacgagatgcagctggacatccaggcaagatacatctatggcaagcctgtgcagggcgtcgcttacgtgcgattcggattacttgacgaggacggaaagaaaaccttttttcgaggtctggagagtcaaactaagctcgtgaatggccaaagccacataagccttagtaaggctgaatttcaggacgctctggagaaactgaatatggggatcactgatctccagggcctgcgtctttacgttgccgctgcgatcattgaataccccggaggggagatggaggaggctgaacttacttcatggtatttcgtgtcttcccccttttctctcgacttaagcaagaccaaacgacatctcgtcccaggcgctccctttctcctgcaggcactcgttcgcgaaatgtcaggtagtcctgccagtggcatcccggtcaaagtctctgctactgtgagcagccccggaagtgtccctgaagtccaggatatccagcagaacacagatggaagcggccaggtgagtattcccatcatcatcccacaaaccattagtgaactgcagcttagcgtaagcgctggttccccacaccccgcaattgccaggctgaccgtcgcggcaccaccatccggcggtcctgggtttttatcaattgaaagacccgattcaagaccccctagggttggggacaccctcaatctgaatctgcgggcagtggggtccggtgcgacattttcgcactactattacatgatattgagccgtgggcagatcgtctttatgaatagagaaccaaagagaacgctgactagtgtttctgttttcgtagatcaccacctcgccccttcattttacttcgtggcattctactaccacggcgaccacccagtggcaaacagtcttcgagtagacgtgcaggcaggcgcatgcgagggcaagcttgaactctccgtggacggtgctaagcagtatcgcaacggcgaatctgtcaaactgcatctcgagactgacagtctcgcactggttgccttgggggcactagacaccgctctgtacgctgctggctccaagagccacaagcccctgaatatgggcaaagtgtttgaggcaatgaacagctacgacctaggttgcggacccggagggggagattcggcactccaggtcttccaggccgctggcctagcgtttagcgatggcgatcagtggacactctcccgcaagcgcctgtcttgcccaaaagagaagacaacgaggaaaaagagaaacgtgaacttccagaaggctatcaatgagaaactcgggcagtacgccagcccgaccgctaagcggtgttgtcaggacggagtcaccaggcttcctatgatgaggtcttgtgagcagagagcagccagagtccagcagcctgattgccgagagccatttctcagctgctgccagttcgccgagtctctgagaaagaaatccagggataaaggtcaggctgggttgcagcgggctctcgagattcttcaggaagaggacttgatagacgaagacgacattcctgtccggagcttttttccggaaaactggctttggcgcgttgaaactgtcgatagatttcagatactgaccctctggctgcccgactccctaaccacctgggagatccacgggttatccctctctaagacaaagggactatgcgtcgctacaccagtccaactgcgggtgtttcgcgagttccacctgcacctgcggctcccgatgtcagttcgcaggtttgaacagctggagttgcggcctgtgctgtacaattacctggacaagaatctgaccgtgtctgtgcacgtgtcacccgtagaggggctgtgtctggccggaggcggtggtttggcgcaacaagttctcgtgcctgccggttcagcgcgaccggtggccttctccgtagtccccacagcagccgctgctgtgtcgctaaaagttgttgcgcgtgggtcttttgagtttccggtgggggatgctgtaagcaaggtgctccaaattgagaaggagggcgctattcacagggaagagttggtgtatgaattgaatccgctcgatcaccggggaagaactttggagatacctgggaatagtgaccctaatatgattcccgatggagactttaatagttacgtacgagtgaccgctagcgacccgctggacactctgggcagcgagggagctctcagtcctggtggcgtcgcttcgttgcttaggttgccgcgtggttgtggcgaacagacaatgatttacctggctccaactctggcagcaagtaggtacctggataagacggaacagtggtctactctgcctcctgagaccaaagaccacgctgtggacctgattcaaaaagggtacatgcgcatccagcagttccggaaggctgatggttcttatgccgcatggttgtctagggactcatcaacgtggcttactgcattcgtcctaaaggttctttctcttgcccaagaacaagtcggcggatcccctgagaagctacaggagactagcaattggctgctgagtcagcaacaggccgatggatctttccaggacccctgccctgttttagatcgctccatgcagggtggactggtagggaatgacgagacggtcgcattgactgcattcgttacaattgcgctgcaccatggactcgccgttttccaggatgagggtgcggagccactgaaacagcgagtcgaggcctccatttcaaaagccaactcgtttctgggcgaaaaggcgtctgcaggacttctgggcgctcacgctgcggctatcaccgcctatgctctgactttgacaaaagcacccgtggacctgctcggggttgcacacaacaatttaatggccatggcgcaagaaactggggacaatctatactggggtagtgtcaccggatcacagagtaacgccgtttctcccacacctgcccctaggaatccctccgacccaatgccacaggctcctgcactgtggatagaaaccacagcgtacgctctcctccatctcctgctccatgagggcaaagccgagatggctgaccaggcggcagcctggctcactcgtcaaggttccttccagggcggtttccgttcaacacaggatacagtaattgccttggatgccctgtcggcgtactggattgctagccatacaaccgaagagcgtggccttaatgtgaccttatcctcgactggcagaaatgggttcaagagccacgctctgcagttgaacaatcgacagatccgcggtctggaagaggagttgcagttttctctgggtagcaagatcaatgtgaaggtggggggtaacagcaaaggtacactgaaagttttacgaacttataacgtcctggacatgaaaaacaccacctgccaggaccttcagatcgaggttacagtaaaagggcatgtcgaatatactatggaggctaacgaagattacgaagactatgagtatgatgagctccccgctaaggatgatcctgacgcccctctccagccagtcactcccttacagctctttgaggggcgaaggaatagaagacgaagagaggcacccaaagtcgttgaagagcaggagtcgagggtgcattatactgtgtgcatctggcggaacggcaaagttggattgtccggcatggctatcgctgacgtcacccttctgagcgggtttcatgccttacgcgctgatctcgaaaagctgacctccctgtccgaccgttacgtgagtcacttcgaaactgaaggtccccatgtgttattatacttcgacagtgtaccaaccagccgagaatgtgtagggtttgaagcggtccaggaggtgccagtggggcttgtgcaaccagcttcggccaccctgtacgattattataacccagaacggagatgctctgtgttctacggcgctccctcaaaatctcgacttcttgctactctgtgcagtgccgaggtttgtcagtgtgctgagggaaagtgccccagacagaggcgagccctcgagaggggtctccaagatgaggacggatatcggatgaaatttgcctgttactatccaagggtggaatatgggttccaggtgaaagtcctgagagaggactctagagccgctttccgcctgttcgaaactaagattacccaggtgttgcatttcactaaggacgtgaaagccgcagcaaatcagatgcgcaatttcctggtcagggcctcttgtcgcctcagactggaaccaggcaaggagtaccttatcatgggactggacggggcaacctacgatctggaaggccatccccagtacctactggactccaacagttggattgaggagatgcccagcgagaggctctgtaggtccaccagacaacgggcagcatgtgctcagctgaacgatttcctgcaggagtacggtacccaggggtgccaggttta

SEQ ID NO: 219061 - DNA, 5235 bp, synthetic construct
  misc_feature 1..5235: note = Description of Artificial Sequence: Synthetic coding sequence
  source 1..5235: mol_type = other DNA
atgcgacttctgtgggggctcatttgggcaagctctttctttaccttatccctgcaaaagccaagactgctcctgttcagcccctcagtggtccacttaggggtgcctctttcagtgggcgtacagctgcaggatgtcccacgaggccaagtggtgaagggttcagtctttctgaggaacccatcccgcaacaacgtgccctgtagccctaaagtggactttaccttgtcgagcgaaagagattttgccctcctgagcctgcaagtgcctctgaaagatgcaaaatcgtgtggactgcatcaactgctccgcggacccgaagtccagttggtggcccattcaccctggctgaaggactcgctttcgcggacaacaaatatccagggcattaacctgcttttctcttcccggaggggccacctgtttctccagactgatcagcccatctacaatcctggccaacgcgttcggtacagagtgttcgccctcgaccagaaaatgcgcccttctacagacactatcacagtcatggtggaaaactcgcatgggctgcgcgtcagaaaaaaagaggtttacatgcccagttccatctttcaggatgacttcgtgattccagatatctcagagccgggaacttggaagatttccgcacgcttctcagatgggctcgaatcaaatagcagtacacagttcgaggtgaagaagtacgtccttccaaattttgaggtaaaaattaccccaggaaaaccttatatattgacggttccaggacatctggatgagatgcaacttgacatccaagcccgatatatctacgggaagcctgtgcaaggagtagcttacgtgagattcggccttctggatgaggatggcaagaagaccttttttcgaggactggaatcacagactaagctggtgaatggccaaagtcatatttccctttcaaaagccgagttccaggacgctctggagaagctgaatatgggcatcaccgacctccagggattgagactttacgtcgctgccgctatcattgagtctcccggtggtgagatggaagaggcagaacttacgtcttggtatttcgtaagcagccctttctccctggacctgtccaaaaccaaaaggcacctggtgccaggtgcacctttcctccttcaggctcttgtgagggagatgagtggttcccccgctagcgggatacctgtcaaagttagtgccacagtgagctctcctggttctgtgcccgaggtgcaagatatccagcagaacacagatggatctggccaggtaagcattccaatcataatacctcagaccattagcgaattacaactatcggtgagtgccggatcaccacaccccgctatcgccaggctgacagtcgctgcccctccttcggggggacccggattcctgagcatcgaacgtcctgactcaagacctcctcgtgtgggggataccctcaacctgaatctccgtgcggttggctcgggagccacatttagtcactactactatatgattttgtctaggggtcagattgttttcatgaacagagagcccaagagaactctcacgtccgtcagtgtatttgttgaccaccaccttgcccctagcttctatttcgtcgcattttattatcatggagaccatccagtcgcgaactctttacgcgttgatgtgcaagcaggcgcatgtgagggcaagttagagctcagcgtcgacggggctaaacagtaccgaaacggagagtcagtgaagcttcaccttgagactgatagtttagcgcttgtggcgctcggagctctcgacaccgccctctacgctgcaggaagcaagtcgcacaaaccactcaacatgggcaaagtctttgaggcgatgaacagctacgacctgggatgtggacccggaggcggagacagcgcgctgcaagtgttccaagccgcaggattggccttctcggacggcgaccagtggacactcagcaggaagcggctcagctgccctaaagagaagactacaagaaaaaaacggaatgtgaacttccagaaggcgataaatgagaagcttggtcagtatgccagccccacagctaaacggtgctgccaggacggtgttacacggctgcctatgatgcggagttgcgagcagagggccgctagggttcagcaacctgattgccgggagccctttctgtcttgctgccagttcgccgaatctctcagaaaaaaatccagagataagggccaggcaggattacagagggcgctcgagatactccaggaagaggacctcatcgatgaggacgacatcccagtgcgctctttttttcccgagaactggctttggagagtggagaccgttgaccggtttcaaattttaaccctgtggctgccagacagcctcactacatgggaaatccacggactgtccctgagtaagactaaaggtctgtgcgtggctacgccagtgcagcttcgggtcttccgtgagttccacctccaccttaggcttccgatgagcgtgcggagattcgagcagcttgagttgaggccagtcctgtacaactatctggacaaaaatctcactgtgagtgtacatgttagtcccgtggagggactgtgtctggccggtgggggagggttagcacaacaggtgcttgtgccagccggatcagcacggcctgttgcattctccgtcgtgcccacagcagcggcagccgtctctctcaaagtcgttgcaaggggatcattcgagtttccggtaggagatgctgtgtcaaaggtgctgcagatcgaaaaagaaggggcaatccacagggaggaactggtgtacgagctgaatcctctggaccacaggggtcggacgctcgagatcccgggaaatagcgaccccaacatgattccggacggagattttaatagttacgtgcgagtgacagcttctgatccattggatacattgggcagcgagggcgcactctcacccggtggcgtggcaagccttctgagactgccacggggttgcggcgagcagacaatgatataccttgcgccaacccttgccgctagccgctacctcgataaaaccgagcagtggtctaccttgccgcctgaaaccaaagaccatgcggtggatctgatccagaaggggtatatgcgcatacagcagtttaggaaagctgatggatcctatgccgcatggctttccagggattcatctacatggcttactgcattcgttctgaaggttctgagcctggctcaggaacaggtgggtggaagcccagagaagctgcaggagacgtcaaactggctgctttcccagcagcaggccgatggcagcttccaggatccttgtcccgtgctggacagatcaatgcaaggcggtctggtcgggaacgacgagacagtcgccctcactgccttcgtgactatagcgctccatcatgggcttgcagttttccaagacgagggggctgagccactaaagcaacgtgtagaagctagtatctcgaaggccaactccttcctgggggagaaagccagtgctgggctgctgggggcacatgctgcagccattacagcatatgctctcacactgaccaaggccccagtggacctactgggagtcgcccataacaacctcatggccatggcccaggaaacaggcgacaacctgtactggggaagcgtgactggtagccagtcaaacgctgtctctcccacgcctgctccaagaaatccttccgacccgatgcctcaggcccctgcgctgtggatcgagacaaccgcatatgccttgctgcacttgcttcttcatgaaggcaaagctgaaatggccgaccaggcctctgcctggctgactaggcagggcagctttcagggcggttttaggtctacccaggacaccgtgatagcactggacgccctgtcggcatactggattgcctcccacaccacagaggaaagggggctgaacgtcactttgtcctcaacagggaggaacggtttcaagtcacacgccctgcaactaaacaacaggcagatccgtgggctggaggaagagctgcagttcagtttgggttccaagattaacgtaaaggttggtggaaattctaagggcacactgaaggtactgcgcacctataacgttctggatatgaaaaacaccacctgtcaagacttacaaatcgaggtaaccgtgaaagggcacgtagagtacacaatggaggcgaatgaagactatgaggattacgaatatgacgagttgcccgctaaagatgatcccgatgcccctctccaacccgtgacaccactccagttgtttgaagggaggcgcaaccgaagacggcgtgaagcacctaaagtcgtggaagagcaggagtctcgtgtgcattacactgtgtgcatttggcgcaacggtaaagtgggactgagtggaatggcaatcgccgacgttacactcttgtccggatttcacgctctgcgcgctgacctcgaaaaactgacttccctgtcagataggtatgtctcccattttgagacagaggggccacatgtgttgttgtatttcgatagcgttccaaccagcagggagtgcgtcgggttcgaagccgtacaggaggtgcctgtggggctggtccagcccgcaagcgccacactctatgactattacaatcccgaaaggcgatgctctgtgttttacggtgctcctagcaagagccgactgcttgccactctgtgctccgcagaggtgtgtcagtgcgctgagggaaagtgtccgcgacagcggcgagccctcgagagagggcttcaggatgaggatggatacaggatgaaatttgcgtgctattacccaagagtggaatacgggttccaggtaaaggtccttagagaggattcccgcgctgcttttcggctgtttgagaccaagatcactcaggtgttgcactttacgaaagatgttaaggccgctgccaatcaaatgagaaatttcctcgtgagggcgagctgcaggctgagacttgaacctgggaaggagtatctaataatgggcttggatggagctacctatgacttggagggccatcctcagtatctgttagacagtaatagttggattgaggagatgccctcagaacgcttgtgtcggagcacaagacagcgggcagcctgcgcccagctgaacgatttcctgcaggagtacggtacacaggggtgccaagtgtac

SEQ ID NO: 219062 - DNA, 5097 bp, synthetic construct
  misc_feature 1..5097: note = Description of Artificial Sequence: Synthetic coding sequence
  source 1..5097: mol_type = other DNA
atgcggctgttatggggcttgatttgggctagctcatttttcacactgagccttcagaagccacgtctcctcctcttttcaccgtccgtggtgcacctgggcgtaccactctccgtgggggtgcagctgcaggatgtgccccgtgggcaggtggtgaaggggtctgtttttctacgtaatccaagtaggaacaacgtcccctgtagtcccaaagtagacttcaccctgagctctgagcgcgactttgccctgttgagtctacaggttccactcaaggatgctaagtcttgcggattgcatcagctgctgcgtggccctgaggtgcagctggtcgcccattccccctggctgaaggacagtctgtctcggaccaccaacattcagggaatcaatctgctgttttcatctaggcggggacacctttttctgcaaaccgatcagcctatatataatcccggacagagagtgcggtacagggttttcgccctcgatcagaagatgaggccatcaactgatacgatcacagtgatggtcgaaaactcacatggtctgcgagtgcgcaaaaaagaggtctacatgcccagtagcatcttccaggatgactttgtcattcctgacatttcagaaccaggaacatggaagatcagtgctagattctccgatggactggagtcaaatagttctacccagttcgaagtaaaaaagtatgtgctccctaatttcgaagtaaagatcacacctggtaaaccgtacatcttaaccgtccctggtcacctggatgaaatgcagctagatatccaggctcgctacatctacggcaaacccgtccagggtgtggcctacgtaagatttgggttgctggatgaggatgggaagaagaccttcttccggggtctggagagccagacaaaacttgtgaacggccaatcccatatttctctgtccaaggccgagttccaggatgccctggagaagttaaacatgggcattacagacttacagggcctgagactctacgtcgcggctgccatcattgagtctccaggcggagaaatggaagaggccgagctaacgtcctggtatttcgttagctctccgttttccctcgatctaagtaaaacaaagcggcatctagtgcctggggctcccttcttattgcaggctctggttcgggagatgtctggctctccagcttcgggaatcccggtgaaagtgtctgccacggtttcctcacccggatccgtccctgaggtacaggacatacaacagaatactgatgggtctggacaagtctccatccctataatcattccgcagacaataagtgagctccagctatcggtgtctgcgggatcaccccatcccgctatcgcacggttgacggttgccgctcccccttccggcggtcctggatttctatcaatcgagcggccagattctcgacccccaagagtcggggatacgttgaatttgaacctcagagcagtgggctcgggagcgacattcagccattattactacatgattctttccaggggtcagattgttttcatgaatcgtgaacccaaaagaacactgaccagcgtgagcgtcttcgtggaccaccacctggccccttctttctattttgttgcattttattatcatggagaccaccccgtggctaactccctgcgcgtggatgtccaggcaggcgcttgcgagggcaaacttgagctatccgtggacggtgctaagcagtacaggaatggagaatcagtgaaattacacctggaaaccgacagcctcgctctggtggccctaggcgcactggatacggccctatacgctgcaggtagcaaatcacataaacctctcaacatgggcaaggtgtttgaagctatgaatagctatgaccttggctgcggccctgggggtggtgactccgccctgcaggtttttcaagcggctgggctggcattttctgatggtgatcaatggacgctcagcagaaaacggctctcatgtcctaaggaaaaaaccacgagaaagaagaggaacgtcaattttcaaaaagcaattaacgaaaaactgggtcagtacgcctcccctactgctaagcgatgctgccaggacggcgtgacacgactaccaatgatgaggtcatgcgagcagcgcgctgctagggtccagcaaccagattgtagggagccgtttctttcatgctgtcagtttgcggagagcttacggaaaaagtctcgggacaaggggcaagccggtctgcagcgagccctggagattctgcaggaagaggacctcattgatgaagatgatatacctgtgcgttctttcttccccgagaattggctatggagagtggaaacagtcgacaggtttcagattctcactctgtggctacccgattcgctgacgacctgggagattcacgggctgtccttgagcaagaccaaagggctgtgcgttgccacccctgttcagctacgcgtattcagggaattccatcttcatctccgcctgcccatgagcgtacggcgatttgaacaactggaactcagacctgtcctgtacaactatctggataagaatctaaccgtaagcgtgcatgtgtcccccgtagaggggctgtgcttggccggaggcggtggcctggcccagcaggttcttgtccctgccggatccgcacgccctgtggcctttagtgtagtgcccaccgcagctgcggctgtgagtctgaaggtcgtggctagagggagcttcgaatttccggttggggatgcagtgagcaaggtgctgcagatagagaaggaaggcgcaatccaccgggaggagctcgtgtacgaacttaatcccctagatcacagaggcagaactctggagattcccggtaatagtgatccaaatatgatcccagacggtgatttcaattcttatgtgagggtaaccgctagcgacccgcttgatacgctgggcagcgagggggctctgtctcccggtggcgtggccagtctactccgcctcccacgcggatgcggtgaacagaccatgatctacttagccccaacccttgccgcttctaggtacctcgataaaactgaacaatggtctaccctgccgcctgagacaaaagatcacgcagtggacttgatccaaaagggttacatgcgcattcagcagtttaggaaggctgatggatcttacgcagcctggctgagcagagattctagtacatggctgaccgcattcgtacttaaggtgctgtcgctcgcacaggagcaggttggcggaagccccgaaaagctgcaggaaacctccaactggctgctatctcaacaacaagccgatggaagcttccaggacccatgccccgtgctggatcgatcaatgcagggaggactggtgggtaatgatgagacagtcgctctaacggcttttgttaccattgccctacatcacggactggcagtgtttcaggatgaaggagccgagccactgaagcagagggtggaggcatcaatctctaaagccaacagttttcttggcgagaaggcgtcagccggactgctaggtgctcatgctgctgccattacggcctacgcactgaccttaacaaaagcgccagttgacctgctgggagtcgctcacaacaatttgatggcaatggcccaggaaacgggcgacaatctttactggggctccgtcacgggctcgcaaagtaacgctgttagtcccactcctgctcctcggaatccatcagatcccatgccacaggccccagccctgtggatcgagacgacagcgtatgcgttgctccatctgctcttacatgagggaaaagctgagatggctgatcaggcttccgcttggcttacacgccagggctcttttcagggcggatttcgtagcacacaagacaccgtgattgccctggatgccctttcagcctattggattgccagtcataccactgaagagcgaggcctgaacgttacgttgtcgtctactggtcgcaacggctttaaaagccatgccttgcagcttaataaccgacagattcggggtctggaagaggaactgcaatttagcctgggctccaagatcaatgtaaaagttggcggaaactctaagggaaccctcaaggtactgaggacatataatgtacttgatatgaaaaatacgacgtgccaagatctgcagattgaggttacagtgaaaggccacgtggaatataccatggaggccaatgaggattacgaggattacgagtatgacgagctgcccgcaaaagacgacccagacgcccctcttcagcctgttacccctctgcagctttttgaagggagacgcaatcggaggcggagagaagccccaaaattgaccagtctttcagaccggtatgtgtctcacttcgagactgagggaccccacgtgctgctgtacttcgactccgtgcccacatctagagagtgtgtgggcttcgaagccgtccaagaagttcccgttggactggtgcagccggcatctgcaactctgtacgattactacaacccagagcgacgctgctcggtcttctatggagcaccatccaagagccgcctgctggccaccctgtgctctgctgaggtctgccaatgcgcagaaggcaaatgccctaggcaacgcagagccctcgagagggggctccaggacgaagacggctatcgtatgaaatttgcttgttattatcccagagtcgagtacggtttccaggtcaaggtgttacgcgaggactctcgcgctgccttcaggctgttcgagacaaaaataacgcaggtgctgcattttaccaaggacgtgaaggccgctgcaaaccaaatgagaaacttcctggtccgggcaagctgcagattaaggttggaacccggtaaagagtatctgattatgggtttagacggcgcaacctacgatctagaaggacatccccaataccttctggacagtaacagttggatcgaagaaatgccctctgaacgcctgtgtcggtccacacggcagagagccgcatgcgcccagctgaacgattttcttcaggagtatgggacccaaggatgtcaggtctag

SEQ ID NO: 219063 - DNA, 813 bp, synthetic construct
  misc_feature 1..813: note = Description of Artificial Sequence: Synthetic coding sequence
  source 1..813: mol_type = other DNA
atgtgtccggaggactcactccaggtgccactgaaagatgccaaatcctgcggcctccatcagctcctccggggaccagaggtacagctggtagcccattccccgtggctgaaggattccctcagtaggacgacgaacattcagggcatcaatctgcttttcagcagcagacgaggtcacctgtttctgcagacagatcaacctatctataacccaggtcagcgtgtccgatacagagtcttcgcactggatcagaaaatgcgaccgtccacagatactatcaccgtgatggtagaaaactcccacggcttacgggtccgaaagaaggaagtctatatgccttcctcgatcttccaggacgatttcgtgatccccgacatttcagagcctggtacctggaagatctctgccagattctcagacggcctcgagtctaattccagcactcagttcgaggttaagaaatacgtgctgcccaactttgaagtgaaaattactcctgggaaaccctacatcttgaccgtgccaggccatctcgatgagatgcagctggatatccaggcccgttacatatacgggaagccggtacagggcgtggcatatgtcaggttcggacttttagacgaagacgggaagaaaacctttttcagaggccttgaatctcagaccaagctggtgaacggacagagtcacatatctttatccaaagcagaattccaagacgcgctggagaagctcaacatggggattaccgaccttcaggggctacgcctctatgtggctgcagcgatcattgaaagtccagggggatag

SEQ ID NO: 219064 - DNA, 5097 bp, synthetic construct
  misc_feature 1..5097: note = Description of Artificial Sequence: Synthetic coding sequence
  source 1..5097: mol_type = other DNA
atgagactcctatgggggttgatttgggcttcaagtttctttacactgtctcttcagaaaccccgtcttctgttattctcgcctagcgtggtccacttaggggtaccattgagtgtcggcgttcagctccaggacgtgcctaggggccaagttgtgaagggcagtgtgtttctgagaaacccttcaagaaacaacgtcccgtgtagccctaaagtagacttcacacttagcagcgaacgcgattttgctttgctgtctctgcaggttcctctcaaagacgctaaaagttgcggactgcatcagctgttgcgtggtcccgaggtccagctcgtggcgcattccccgtggctaaaggactctctgagcagaacaacgaatatccagggcattaatcttctgtttagcagcaggaggggccatctgttcctgcagactgatcagcccatctacaaccccggacagcgagtccgctaccgggtcttcgctctggatcagaaaatgcgcccatcaaccgataccatcactgtcatggtggagaactctcacgggctcagagttagaaagaaggaagtctacatgcctagttccatcttccaagatgatttcgtcatcccagacatcagcgagcctgggacctggaagatttccgccagattctccgatggattagagtcaaattccagtacacagtttgaggtaaaaaagtatgtgctgcctaatttcgaagtgaagattaccccaggcaaaccctacatactgacagtgcccggacacctggatgagatgcaactggacatacaggccagatatatatacggaaagcccgttcagggtgttgcatacgtcagatttggattgctggacgaagatggtaagaagacctttttcaggggactggaatcacagactaaactcgtgaacggtcaaagtcatatctccttgagcaaggcagagttccaagatgcactggagaagctgaatatgggcatcacagatttacagggactcagactctacgttgctgcagccattatcgagtacccaggcggagaaatggaggaggctgaactcacatcttggtactttgttagcagtccattctcactggatctgagtaaaactaagcggcatctggtccctggcgcacccttcttgttacaagctctggtcagggagatgtccgggagccccgcaagtggaattcccgtgaaagtgagcgcaactgtgtcttcccctgggtccgtacccgaagtgcaggacatccagcagaatacagacggaagcgggcaggtctctatccccataatcataccccagacaatcagcgagctgcagctgtcagtatccgccggatcaccccatccggcaatcgcacgactcactgttgccgctccgccatctggagggcctgggttcctgagcattgaatggccagatagtaggccccctcgggtaggggataccctcaacctgaacctgcgagctgtcgggtcgggagccacgttttctcattattattacatgattctctctcgtgggcagatagtgttcatgaatcgcgaacccaagaggacactgacttctgtatccgttttcgtggaccaccatctggccccatctttctacttcgtcgccttctactatcatggggaccatccagtcgccaactctctcagagtggacgtacaggcaggcgcttgcgagggaaaactcgaattatccgtggatggagccaaacagtaccggaatggcgagtccgtgaagctgcatctggagaccgatagtctggccctagtggccctcggggctctagatactgccctgtacgccgcaggtagtaagtctcacaagcccctgaatatgggtaaggtgttcgaagccatgaatagctacgacttaggatgcggcccaggcggtggggactcggccctgcaggtgtttcaggccgcagggctggctttctcagacggcgatcagtggacactgtcccggaagaggctgtcctgccctaaagaaaaaaccactagaaaaaaaagaaacgtgaattttcagaaagctatcaatgaaaagcttggccagtacgcttccccaacagccaaacgctgctgccaggacggggttactaggctgcctatgatgaggtcctgcgaacaacgcgctgctagagtgcagcagcccgattgtcgcgagccttttttgtcctgttgtcagtttgcagaatctctgcgcaagaagagtcgcgacaaggggcaagctggattgcagcgcgctcttgaaatattgcaggaggaagatctcattgatgaggacgacatcccagtcaggtcattcttcccagaaaattggctctggagggtggaaaccgtcgatagattccagatcctgacactttggctgcccgattccctgaccacctgggagatccacggcctcagcctgtctaagactaaggggctttgtgtggcaacgcctgtgcagctgagggtttttagggagtttcacctccatctgcgtttgcccatgtctgtacggaggtttgagcagcttgagctgaggcctgtgctttataattacctggataagaacctcaccgtgtccgtgcacgtcagtcctgtagaaggcctctgtttagcaggtggtggcggtctggcacaacaggttctagtgcctgcaggatctgcaaggcccgtcgccttctccgtggtgcccactgctgctgctgctgtgagcctaaaagttgttgccaggggatcattcgagttccccgtgggagacgccgtgtctaaggtgctccagatagagaaagagggcgctatccatcgggaggagctggtgtatgaattgaaccctctggaccataggggcaggacactcgagatcccaggaaacagcgatccaaacatgatacccgacggcgatttcaattcctacgttagggtgacagccagtgaccctctggacactcttggatcagagggcgcactgagcccgggtggcgtggccagtcttctgagactgcctcgaggatgtggagagcagaccatgatttatctggcacctacgctggcagcctcccgctatctggacaagaccgaacagtggagtaccctgcccccagagactaaagatcatgcggtggatcttatccaaaagggttacatgaggatccagcaatttcggaaggcagatggttcatatgccgcatggctgagccgtgattcatctacatggttgactgcctttgtgctgaaagtcctctctctcgcccaagagcaggtgggcggttcacccgagaagttacaggagacatcgaactggttgctgtcccagcaacaggcagatggaagcttccaagatccttgcccagtcctcgatcggtcaatgcaaggagggctggtgggaaatgacgagaccgtggccctgacagcctttgtgaccatagctttgcaccatgggctagccgtgttccaggacgagggcgctgagccccttaagcagagggtagaggcaagcatctcaaaggcaaactcttttttgggcgagaaagcatccgctggcctgcttggagcccacgctgcagcaattactgcttatgctctgacactgacaaaagcacccgtcgatctgcttggcgtggcgcataataaccttatggccatggcacaagaaaccggagacaatttgtactggggctccgttacaggcagccagagtaacgctgttagccccactcctgctccgagaaacccaagcgatcccatgccccaggctcccgcattatggatcgagactacagcttatgctctcctccacttgcttctgcatgaggggaaagccgaaatggctgaccaggctgcagcatggctgactcggcaggggagtttccaaggaggtttccgcagcactcaagacaccgtaattgccctggacgcactctcagcctattggatagcgtctcatactacggaagagaggggactgaacgttacactgtcctcaacaggacgaaacggctttaagtcgcatgctcttcaactcaacaaccgccagatccggggactcgaggaagaattgcagttctccctcggttcaaagattaatgttaaggtaggcggtaattcaaagggtactcttaaagtcctgaggacctataacgtgttggatatgaagaatacaacatgccaagacttgcaaattgaagtgactgtgaaaggccatgtcgagtatacaatggaggctaatgaagattatgaggactatgaatacgacgaacttccagctaaagatgaccctgacgcacccctgcagcccgtcaccccgctgcagctgttcgagggccgtaggaatcgcagacgtagagaggcaccgaaactgacgtcattaagtgatcgttacgtgtcccatttcgaaaccgaaggaccccacgttctgctgtacttcgatagtgtacccactagccgcgaatgcgtcgggtttgaagcagtgcaggaggtacctgtcggccttgttcagccagcatccgctaccctgtatgattattataaccctgagaggagatgttcggttttctatggcgcaccctccaaatcccggctgctggctacgctatgttcagccgaggtgtgccagtgcgctgaaggtaaatgcccgcgacagagaagagctctggaacgtggattgcaagacgaagacggctacagaatgaaatttgcatgttactatcctcgcgtggaatacggctttcaggtaaaagttttgcgggaggacagcagagcagcttttcggctgttcgagaccaaaattacccaggtgctccacttcaccaaagacgtgaaagcagctgccaaccaaatgagaaactttctggtgcgtgcttcatgtagattgagacttgaacctggcaaagagtacctgataatgggtctggacggggctacatatgacctggagggccaccctcaatacctcctcgactctaattcttggatcgaagaaatgccatcagaacgcctgtgccgctccacacgacagcgagccgcttgtgcacagttgaatgatttcctccaggaatatggtacacaggggtgtcaagtttag

SEQ ID NO: 219065 - DNA, 1536 bp, synthetic construct
  misc_feature 1..1536: note = Description of Artificial Sequence: Synthetic coding sequence
  source 1..1536: mol_type = other DNA
atggccaagggcctgagcgttcagaatgacaaacatccaggttaccagcctgctctgctgctttccccaggagctcctttgttcgctgacggtccagcctatgctcttctccatcttctcttgcatgaaggaaaggccgagatggctgatcaggcagcggcttggttgacacgacagggcagcttccaggggggttttcggtcgacacaggacacagtaatcgcccttgacgctttgagcgcatattggatagcttctcacacgactgaggaacgtggactcaacgtaacactctcctcgacgggcagaaatgggttcaaatctcacgcgctgcagctgaataaccgacagattaggggtttagaggaggaactgcagttttcgcttggctcgaaaataaacgtgaaagtgggtgggaatagcaaggggacattgaaagtcctccgtacttacaacgtcctggacatgaaaaacacaacctgccaggacttacagatcgaggtgaccgtaaaagggcacgtcgagtataccatggaagccaacgaggattacgaagactatgaatacgatgagctgcccgctaaagacgacccggatgctcctctgcaacccgtgacacctctccagctttttgaaggcaggcggaatagaagaagaagagaagctcctaaggtggttgaagaacaggagagtcgggttcattacacggtgtgcatatggcgtaacgggaaggtgggcctttccgggatggctatcgcagatgtaactctcctgtctggctttcatgcgctgagggctgatctcgagaaactcaccagccttagtgatcgatacgtgtcgcatttcgaaactgaaggcccacatgttcttctctacttcgactccgtacctacaagtcgcgagtgtgtgggcttcgaggctgtgcaggaggttcctgtcgggctggttcaacctgccagtgccaccttgtatgattactataatccggagagacgttgttccgtgttctacggagcgcctagcaaaagtcgcttactggctacgctctgcagcgcagaagtgtgtcagtgtgccgaaggcaagtgtcccagacagagaagagccctggagcgtggcctgcaagatgaagatggctatcgaatgaagtttgcctgttattatcctcgagtcgaatacggcttccaggtcaaagtgctccgtgaagacagtagggccgcattccggttgtttgaaactaagatcacacaggtgctgcacttcacgaaagatgtcaaagcagccgctaatcagatgcgtaatttcctggttagggctagctgtcggctgagactggaaccaggaaaggagtatcttatcatggggcttgatggcgcaacctatgatcttgaagggcacccgcagtatctgctggactccaattcctggatagaggagatgccaagcgagaggctgtgcagatcaacaaggcagcgggcagcatgcgcacagctgaatgacttccttcaggagtacgggacacagggttgtcaggtgtag

SEQ ID NO: 219066 - DNA, 5097 bp, synthetic construct
  misc_feature 1..5097: note = Description of Artificial Sequence: Synthetic coding sequence
  source 1..5097: mol_type = other DNA
atgcggcttctctggggcctcatttgggcctccagctttttcaccctctcattgcagaagcccagactgttgctgttttcgcctagcgtggtccacctaggggtacccctctcagtcggggtacaactccaggacgtaccgagaggccaggtggttaaaggctctgtgttccttagaaaccccagcaggaataatgtaccgtgctctccaaaagtggattttaccctaagttctgagagagactttgcgctgttatcactacaggtgccactgaaggacgctaaaagctgcggactgcatcagcttctgcggggacctgaggttcagctagttgcccactccccttggctgaaagatagcctaagtcgaactacaaatattcagggtatcaacctgttatttagttcccgacgcggacacttgtttctgcagaccgatcagcctatatataatccaggacagcgggtgcgctaccgcgttttcgcactcgatcagaagatgaggccttccacagacactataaccgtgatggttgagaatagccacgggttgcgcgtaaggaagaaggaggtatacatgccatcctccattttccaggacgactttgtaatccctgacatttccgaacctggaacctggaagatttcagcacgctttagcgatggacttgaatctaatagttctacacaatttgaagtcaagaagtacgtgctacccaacttcgaggtgaagatcacccctggaaaaccctatattctcaccgttcccggacatctcgacgagatgcagctagacatacaggcaagatacatatacggaaagccagtacagggggtggcttacgtgcgctttggccttctggatgaggatggcaagaagacattcttccggggattggagtctcaaacgaagttagttaacgggcaatctcacattagtttgtccaaggctgaattccaggacgcactcgaaaagctcaacatgggtatcaccgatctccaagggttaagactgtatgtggcagctgcaattattgagagtccaggaggtgaaatggaagaggcggaacttacttcttggtactttgtctcatcacctttctctctggatctttcaaaaaccaagcggcatttggtgcccggagcccctttcttactgcaagctcttgtgagagagatgtcaggctctccggcaagcgggattcccgtaaaggtgtctgcaacagtctcctccccgggatccgttcctgaggttcaggacatccagcaaaatacggatggctctgggcaggtgagcattccgatcattatcccgcagaccattagcgaacttcagctgagcgtctctgcgggatctcctcatccggctattgcccgactgactgttgccgcacctcctagcggagggcctggatttctttccattgagcgcccagattccaggccccctcgggttggcgacaccctcaacttaaacctgagagcggtgggttccggcgcaaccttctcccattactattacatgattctttcccgtggtcaaattgtcttcatgaatcgggagccaaagcgaaccctgaccagtgtctctgtgtttgtggaccaccatttggctccgtcattttatttcgtggccttttactaccatggcgaccaccccgtggcgaatagcttgagagtggatgtccaggccggtgcatgtgagggcaaacttgaactgagcgtggacggcgcaaagcagtacaggaatggtgagtccgtgaagctccaccttgaaacggactccctggcccttgttgctcttggagctctggacaccgcactgtacgccgcaggttccaaaagtcacaagccactgaacatggggaaggtgttcgaagccatgaacagttacgatttgggctgtggacccggaggcggtgactccgctctgcaggtgtttcaggctgctggtctggctttttcagatggggatcaatggactttaagcagaaaacgattgagctgtccaaaggaaaagactacacgcaagaagcggaatgtaaactttcagaaagccattaacgagaaactcgggcagtacgccagccccaccgccaagcgttgctgccaggatggggtcaccagattgcctatgatgaggagctgtgagcagagggctgcaagagtgcaacagccagactgccgcgaacctttcctgtcttgctgccagtttgccgaatccctgagaaaaaagagcagggataagggacaggctggcctgcagagagccctcgaaattttgcaggaagaggaccttatagatgaagatgacattccagtccgatcctttttcccagagaactggctgtggcgggtcgaaaccgtcgaccgctttcagatcttgactttgtggctgcctgacagcctcactacctgggagatacacggattgagtctgtcgaaaacaaagggactgtgcgtcgccacaccagtccagctgagagtgttccgggagtttcatctgcacctacggctgccaatgagcgtgaggcgattcgagcagctggaacttcgtcctgtgctctataactatctggacaagaatctgacagtgtctgtccacgtttccccagttgagggtctctgcctggcagggggtggaggactggcccagcaggtgctggttcctgccggaagcgctagacctgttgcttttagcgtggtgccaaccgctgctgcggcagtctctctcaaagtagttgcaagaggatcttttgaattccccgtgggggatgcagtgtccaaggtgttacagattgagaaagaaggcgcaatccaccgcgaggaactggtgtacgaactcaatcctcttgatcaccgaggtaggacccttgaaatcccaggaaacagcgacccaaacatgattccggatggcgatttcaactcatatgtcagagttactgcttccgatccactggacaccctcggctcggagggcgctctctcccctggaggcgtcgcgtcactactgagacttccgagaggctgcggggagcaaactatgatctacctggctcccaccctggccgctagtagatatctggacaagacagagcagtggagcaccctgccacctgaaactaaggatcacgcagtagacctcattcagaaggggtacatgcgcatacagcagttccgtaaagctgatggttcatacgccgcatggctgagtagggactcctcaacttggttaaccgctttcgtccttaaggtgctatcactcgcccaagaacaggtgggtggtagccctgagaagttgcaggaaacaagtaattggctcttgtctcagcagcaggccgatggatcatttcaggacccatgccccgtgctggaccggagcatgcagggtggcctggtaggcaatgatgagacggtcgcacttactgcgtttgtcacaattgctctccaccatggcctcgctgtatttcaagacgagggcgctgagccactgaaacagcgcgttgaggccagcatctctaaagcttcgtcattcttgggcgagaaagcttccgccggattacttggggctcatgcagccgcaattactgcttacgctcttactctgaccaaggcccctgtggatctgctgggagtcgcccataataacctcatggctatggctcaggaaacgggcgataacctctactggggatccgtcaccgggagtcagagcaacgcagtttctccaacacccgcaccaaggaatccctcagatcctatgccccaggcacctgctttatggatcgagaccacagcatatgcactgcttcatctgctccttcacgagggaaaggcggaaatggccgaccaggccgcagcttggcttactcggcaggggtcatttcagggaggcttccgcagcacccaagacaccgtgatcgccctggatgctctgagcgcttattggatcgcttcccatactaccgaagagcgcggactgaatgtcaccctgagctcaacgggccgaaacggctttaaatcccatgccctgcagctcaacaaccgacagattcggggtctggaggaagagttgcagttttcactcggaagcaaaattaacgttaaggtaggcggtaacagcaaaggaactctgaaggtactgcgtacatataacgtgctggacatgaaaaataccacttgccaggacttacaaatagaggtgaccgttaagggacatgttgagtatacaatggaggccaacgaggactatgaggactatgaatatgacgaacttccagccaaagacgaccctgatgcacccctacagccggttacccctcttcagctgtttgaggggaggcgcaatagaagaaggcgcgaagcccctaaacttacctccctgtccgataggtacgtttcccacttcgagaccgaagggccacatgtcctgttatactttgacagcgtgcccaccagtagggaatgcgtgggttttgaagccgtgcaggaggtgccagtgggcttagtgcagcctgcatccgcgaccctgtacgactactataaccccgagcgtaggtgcagcgtcttctacggagcaccgtccaagtcacggctgctggctacactgtgctctgccgaggtgtgccagtgtgccgaaggaaaatgtcccaggcaaagacgggcactcgaaagaggcctccaagacgaggacgggtatagaatgaagttcgcttgttactacccccgagtggagtacggctttcaggtcaaggtcctgagggaagatagtagagcagctttccgactcttcgagactaaaattacccaggtgctgcactttacaaaggatgtcaaagccgctgcgaatcagatgcgaaattttctcgtcagggcgtcctgccgactgagacttgaaccgggaaaagaatacttaattatgggtttagacggggcaacttacgacttggaggggcatcctcagtacctgttggattcaaattcatggatcgaagagatgccctcagagcggctgtgtaggtctacccgacagagagcagcttgcgcacagctcaatgattttctccaggagtacggaacacaggggtgccaggtctag

SEQ ID NO: 219067 - DNA, 5097 bp, synthetic construct
  misc_feature 1..5097: note = Description of Artificial Sequence: Synthetic coding sequence
  source 1..5097: mol_type = other DNA
atgcggctgctgtgggggttgatctgggcaagcagtttctttaccttgtcccttcagaagccaaggctactgctcttttctccgtcagtcgtccaccttggtgtgccactgagcgtaggggtgcaacttcaggatgtgccaagggggcaggtggtcaaaggttcagtctttctcagaaacccttctcgcaacaatgtgccatgctctcccaaggtggattttaccctgtccagcgagcgcgattttgcccttctgtcattgcaggtgccactgaaagacgctaaatcttgtggcctgcatcagcttctacggggacccgaagtgcaacttgtcgcccacagcccatggcttaaagattctctatcacggacaacaaatatccagggcattaacttattgtttagctccagaagaggccatctcttcctccagacggaccagcctatttacaatcctggtcagagggtgcgctaccgcgttttcgctctggaccaaaaaatgagaccctctacggatactatcaccgtgatggttgagaactctcacggcctccgagttcgcaagaaagaggtctatatgccttctagcatattccaggacgatttcgttatacccgatatcagtgaaccaggcacttggaaaatttccgctcgtttctcagacggcttggaaagtaatagttcgactcaatttgaagtgaagaagtacgttttaccaaattttgaggtgaaaatcacgcctggcaagccctacattttaacggtgcccggtcatctggacgagatgcagctcgatatccaggcgagatacatttatggcaagccggtgcagggcgttgcgtatgttcgcttcggccttctggacgaggacggtaagaagacattctttaggggcctggaatcacagactaagctggttaacggtcaatcccacataagtttatccaaagcggagtttcaagacgctctggagaagctgaacatgggtattaccgacctccagggacttcgtttgtacgtggcagcggctattatcgagtaccccggaggtgaaatggaagaggcagagctgacaagttggtactttgtttcctcccctttttctttagacttgtctaaaacaaaaaggcatctggtccctggtgcccctttcctcctccaagcgctggtacgggaaatgtcaggttctcctgcttctggaatccctgtgaaagtgtcagcaacagtaagctcaccaggctctgtgcctgaagtgcaagatattcagcagaacacagacgggtctggccaggtatccatccctatcatcattccccaaactataagtgagttgcaactttcagttagtgccggaagccctcatccagcgatcgcacgcctcaccgtggctgcccctcctagtggcggaccagggttcctctctatagagcggccagactcccggcctcctagagtgggggatactcttaacctgaatctgcgcgctgtgggtagtggagctacgttttcccactactattatatgatcctctctcgcggtcagattgtgtttatgaatcgtgagccaaagaggacactgacatccgtctcggtgtttgtggaccatcacttggctccaagtttttattttgtggctttttactaccacggtgaccatcctgtagccaatagcctgcgggtggatgtacaggctggggcttgtgagggtaagctggagttgagcgtggatggagccaagcagtaccgaaatggggaaagcgttaagctgcatctggagacggactcactggcactggtcgctctgggcgctctggacaccgcactttacgcagctggatccaagagccataaaccccttaatatgggaaaggtcttcgaggctatgaacagttatgatttaggctgcggtcctggaggcggagattcagctctgcaggtgtttcaagccgcagggctcgccttcagcgacggagaccagtggaccttgtcacgaaagcgcttaagctgccctaaggaaaagacgacccgtaagaaacggaatgtgaattttcagaaagcaattaatgaaaaactgggacagtacgcttctcccactgcaaaacggtgctgccaagacggggtgacaaggctgccgatgatgcgctcctgcgaacaaagggccgctagggtccagcagcctgactgtagagagccattcctcagctgctgccagtttgccgaatccctgcgcaaaaagtcgagagataagggccaagcgggtctccagagagctctggagatcctccaggaggaggatcttatcgatgaagatgacattccagtgcgatctttcttccctgaaaattggctttggagagtcgagactgtcgaccggttccaaatactgaccctctggctgccagactccttaacaacctgggagatccacggcttgagcctgagcaagaccaagggactttgtgtcgccacaccagtgcagctccgggtgtttcgagaatttcacctacacctgcggctacccatgagtgtcagaaggttcgaacagctcgagctgcgacccgtcttatataactatctggacaagaatctgacggtgtccgtgcacgtttctcccgtggaagggctgtgtttagcgggtggtggcggacttgcccaacaagtccttgtgccagcgggatccgcaagacccgtcgctttttctgtggtgcctacagccgctgctgctgtatcacttaaagtagtcgccagagggtcctttgaatttccagtgggagatgcagtgagcaaagtgcttcagatagaaaaggaaggcgcaatccaccgcgaggaactagtgtatgagttaaatcccctggatcaccgtgggaggactctggaaatccccggaaattctgaccccaacatgatacctgacggtgatttcaattcctacgtacgcgtgacggccagcgatcctctggacactttaggctctgagggcgctctttcgccagggggtgtggcctcccttttaagactgccaaggggatgcggcgaacagacaatgatctatcttgcgcctaccctggcagcttcacggtacctggataaaacggagcagtggtctactctacccccagagaccaaagaccacgcagtggatttgattcaaaaggggtatatgcggatacagcagttccggaaggccgacggctcttacgctgcctggctgagccgggatagtagtacgtggcttacagcttttgttctaaaggtgctgtctctcgctcaagagcaagtcggtgggtcacctgagaaactccaggagacttctaattggttgttaagccagcagcaggctgatggcagttttcaagacccctgcccggtgctagacaggagcatgcagggcggactagttggaaacgacgagacggtcgctctgaccgcttttgtgaccatcgcacttcaccatgggctcgctgtgttccaggatgagggagccgagcccctcaagcagagagtggaggcatccattagcaaggctaacagtttcctgggggagaaggcgtcagcaggcctcctgggcgctcacgccgcagccatcactgcatatgccttgaccctgacaaaggccccagtcgatctgctgggagtggcccacaacaatctcatggccatggctcaggagactggcgataacctgtactgggggtccgtaacagggagtcaatccaatgcggtgagtcctacacctgcacctaggaacccatcagaccccatgccccaagcacctgcgctgtggatcgagacaacagcctacgcattactgcaccttctgctgcacgaaggcaaagctgaaatggctgaccaggcagccgcttggttaacccgtcagggatcttttcaaggcggtttcaggtctacacaggatacggtgatcgccctggacgccctgtcagcatactggatcgcaagccatactaccgaggaacgaggattgaatgtgacgttgtcttccaccggcaggaatggcttcaagtctcatgccttgcaactgaataaccggcagattaggggtctggaggaggaattacagttcagccttgggtctaagattaatgttaaagttgggggtaacagtaagggcaccctaaaggtgcttcgaacctacaacgtgcttgatatgaagaataccacatgtcaggatctgcagatcgaggtgacagtgaaagggcacgtggagtacacgatggaagctaatgaggactacgaagattacgagtatgatgaacttccagcaaaagacgaccccgacgccccattgcagccagtaacccccctgcagctgtttgaagggcgacgcaaccgacgcagacgcgaagctcccaagctcacatcgctgtccgaccggtatgtctctcacttcgaaaccgaaggacctcacgtgctattgtacttcgacagtgtacctacaagccgggagtgcgtgggatttgaagccgtgcaggaagtacccgttgggctagtgcagcctgcctccgccaccctgtacgactattacaatccagagcgcagatgttccgtcttctacggagcccctagtaaatctagactgcttgcgaccctgtgttcggccgaagtgtgtcagtgtgcagagggcaaatgccctcgccagcgtcgcgcattagagcgcggtctgcaggatgaagacggataccggatgaagttcgcttgttactacccacgcgtggaatatggattccaggtgaaagtgctgagagaggattcccgagcagcattcaggttattcgaaacaaaaattacacaggtgctccacttcaccaaggatgtaaaggccgcagcaaaccagatgaggaattttctggttagagcatcttgccgcttgcgactcgagcctggcaaagaatacctgatcatggggctggacggtgcgacctacgatctcgaagggcacccgcagtacctgctcgactctaacagctggatcgaggagatgccttctgaacgcctgtgccgcagcacacgacagcgagccgcatgtgcccagttaaacgactttctccaggaatacggtacccagggctgtcaggtttag

SEQ ID NO: 219068 - DNA, 1536 bp, synthetic construct
  misc_feature 1..1536: note = Description of Artificial Sequence: Synthetic coding sequence
  source 1..1536: mol_type = other DNA
atggcaaaaggactgagtgtgcagaatgataagcacccaggctatcagcccgctctcctgcttagccctggagcccctctctttgccgacggtcctgcttatgctctgttgcacctgctgttgcatgagggcaaggccgaaatggcagatcaggcggctgcttggttgacccggcaaggctcatttcagggcggatttcggtcaactcaggatacagtgattgctttagacgcgttgtcggcatactggattgcatcgcatacaaccgaggaaagagggctcaatgtgaccctatcctcaacaggtagaaacggtttcaaatctcacgcactccaacttaataaccggcagatccgtgggcttgaagaggaattgcagttctcactgggatcaaagatcaacgtcaaagtcggagggaatagcaaaggtaccctgaaggttctgaggacttataacgtcctggacatgaaaaacactacctgccaggaccttcagatagaagtaaccgtcaagggacacgtggagtacaccatggaagccaacgaagactatgaggattatgaatatgatgagctgccggcaaaggatgatccggacgccccactacagcccgtgactccgctgcagctgtttgagggtagacgaaatcgacgccgacgcgaagcccctaaagtagtggaagagcaagaatctagggtgcactatactgtctgcatttggaggaatggtaaagtgggcctgagtggcatggccatcgctgatgtgaccctgctttctggatttcatgccctccgggctgatttggaaaaactcacgtctctatccgacagatatgtgtctcatttcgagacagagggacctcacgtgctcctttatttcgacagcgtgcccacttcacgcgagtgtgttgggtttgaggctgtacaggaggtgcctgtaggcctggtgcagcccgcaagtgctactctttatgactattataaccctgaacgtagatgcagcgtgttttacggcgctccaagtaagagccgtcttctggccacactgtgcagcgccgaggtctgtcagtgtgccgaaggtaagtgccctcgccagcgcagggcccttgaaaggggattacaagatgaagacgggtaccggatgaagtttgcatgctactatcccagagtggaatacggctttcaggtcaaggtgctgagggaagactccagagccgctttccggctgttcgagacgaaaatcacacaggttcttcatttcactaaggacgttaaggccgctgcaaatcagatgagaaatttcctggttagagcctcatgccgcctgcggcttgagcctggtaaggaatatctaattatgggactggatggagccacctacgacctggaaggccatccccaatacctcctagattccaacagttggatcgaagaaatgccgagcgagagactgtgtcgttcgactcggcaaagggctgcctgcgctcaactcaatgattttcttcaagagtatgggacccaggggtgccaggtgtag

SEQ ID NO: 219069 - DNA, 813 bp, synthetic construct
  misc_feature 1..813: note = Description of Artificial Sequence: Synthetic coding sequence
  source 1..813: mol_type = other DNA
atgtgccccgaagacagccttcaagtgcctttgaaagacgcaaaatcctgcgggctgcatcagttgctgcgcggtccagaagttcagctcgtagctcatagcccctggctgaaggacagcctctcccgtacgactaacatccaaggcatcaatctcttgttttcttcaaggcgaggtcatcttttcctgcagaccgaccagcctatctataaccctgggcaacgggtgcggtatcgagtgttcgcactcgatcaaaaaatgcggccatctacagacacgatcactgtcatggtggagaactcccacggtttgcgggtcaggaaaaaggaggtgtacatgccatcatccattttccaggacgactttgtgattccagatatttcggagccagggacctggaagatcagtgccagattctcggacggcttagaatcaaattcctctacccagttcgaggttaagaaatacgtgctgccaaactttgaagtcaaaatcacgcccggtaaaccctacatacttacagttcccggacaccttgatgaaatgcagttggacatccaggccaggtatatttatgggaaaccagtgcagggggtggcatatgtgcgcttcgggcttctggacgaggacgggaaaaagaccttttttagaggtctggaatcccaaaccaagctcgtgaacggccaaagtcacatatcattatctaaggccgagtttcaggacgccctggaaaaactaaacatgggcattacagacctacagggccttcgtttatacgtggccgcagccatcatagagtaccctggcggatag

SEQ ID NO: 219070 - DNA, 5234 bp, synthetic construct
  misc_feature 1..5234: note = Description of Artificial Sequence: Synthetic coding sequence
  source 1..5234: mol_type = other DNA
atgcgcctcttgtggggcctcatctgggcttccagttttttcaccctctccctccaaaaacccagacttctcctgttttctcccagcgtggttcatctcggcgtacctctgtcagttggggtacagcttcaggacgtgccacgcggacaggtcgtcaagggcagcgtcttcctcagaaacccgtctcgtaataatgttccctgctctcccaaagtagacttcactctcagttctgaacgagatttcgccctgctgtccttacaggtgccgctgaaagatgctaagagctgtggcctgcatcagctcttacggggacccgaagtacaactcgtggcccattcaccgtggctaaaggattctctatctagaaccaccaacatccagggcataaacctgcttttctcttctaggcggggtcatctcttccttcagacagatcagcctatctataacccgggtcagcgggtcagatatcgcgtgtttgcccttgatcagaaaatgcgtcccagtaccgacaccatcactgtaatggttgagaactcacacggattgagagttcgaaaaaaagaagtgtacatgccttcatcgatctttcaggatgattttgtcattcctgacattagtgagcccggaacctggaaaatcagcgcccgattctctgatggcttagagagcaattcctccactcagtttgaggttaaaaaatacgtgctgcccaactttgaggttaagattactcccggaaaaccctacatcctgacagtccccggacacctggacgaaatgcagctggacatccaggcacgatatatctatgggaagccagtgcagggcgtcgcgtatgtgcggttcgggctgctcgacgaggatggcaaaaaaactttcttccgcggtcttgagagccagacgaaattggtcaatggtcagtcccatatctcactcagcaaggctgaattccaagacgctcttgagaaactgaatatggggataaccgacctgcagggactcagattgtatgtggccgcagctatcatagagagtcccggtggggaaatggaggaggcagaactcacatcttggtatttcgtgtcctcgccttttagcctggacttgtcgaagactaagcggcacctagtgcctggagctccttttttactacaggccctggtgagggaaatgtcaggatctcctgcttccggcatccccgttaaggtgagcgctaccgtgtccagtcctggtagcgtaccagaagtccaggacatccagcagaacaccgacggtagtggccaggttagcattccgataattatccctcagaccatcagtgaattgcagttgtctgtaagtgctggcagccctcatcccgctatcgcccgtctcactgtggcagctccaccatcaggaggccctggatttctgtctatagagaggcctgacagccgccctcctcgagtgggcgataccctgaaccttaacctgcgtgctgtggggagtggagctaccttctctcactattattatatgatactctcccgcggacaaattgtgtttatgaatagggagccaaaaagaacactgacaagcgtgagcgtttttgtggaccaccacctggcgcctagcttctactttgtggcattctactatcacggcgaccatcctgtagccaattctttgcgggtcgacgttcaggctggggcatgcgaggggaagctggaactttcagtagacggagctaagcaataccggaacggggagagcgtcaagctgcacttggaaaccgactctcttgccctggtggctctgggggctctggatacagctctgtacgcagctgggtccaaatcacacaaaccactgaacatggggaaggtgttcgaggccatgaattcatacgacctgggctgtggtccgggaggcggagactcagcactgcaggtctttcaggccgctggtctcgctttcagtgatggggaccagtggactctatccaggaaaagacttagctgccccaaggagaagaccacccggaagaagagaaatgtgaattttcagaaagccataaatgagaagttggggcaatacgccagccctactgccaaacggtgttgccaagacggcgtgacacgtctgccaatgatgcggtcctgcgagcagcgggcagctagagtgcagcagcctgactgccgggagcccttcctgtcctgctgccagttcgccgaatcgcttcggaagaagagccgcgataaaggacaagcaggtctccagcgggcacttgagatcttgcaggaagaggatctaatcgatgaagatgatattcccgtcaggtcttttttcccggaaaactggctgtggcgagtggaaaccgtcgaccgctttcagattttaaccctatggctccccgacagcttgacaacctgggaaatacacggtctctccctcagtaagacaaaaggcctgtgtgtcgcgacccctgtacagctcagagtgtttcgcgagtttcacctgcaccttcgcctgcccatgtccgtgcgtcggttcgaacagttggagttacgcccagtgctgtacaattacctggacaaaaaccttacagtgtccgtgcacgtcagccccgttgaaggcttatgtctggccggagggggaggacttgcgcagcaggtgctcgtgcccgcaggaagtgctagacctgtggccttcagcgtggtgccgaccgccgctacagcagtctcactgaaggtggtagccaggggatcctttgaattccctgtgggagatgccgtaagtaaggtgctgcagattgaaaaggagggtgctattcaccgggaggaactggtgtatgaactaaatcccttggaccacagaggccgaactctagagattccagggaactctgatcccaatatgattcccgatggggatttcaatagctacgtgcgggttaccgcctcggacccgctcgatacccttggttccgaaggggcattgagtccaggcggagtggcttcactcctgaggctgccacgcggttgtggagagcagacaatgatctacttggcgccaactttggccgcaagtcggtaccttgataaaaccgagcagtggtccaccttacctcctgagaccaaagatcatgccgtcgacctcattcagaaagggtacatgagaatccagcagttccggaaggctgacggatcatatgctgcctggctcagcagaggaagttctacctggctgacggcatttgtactcaaggtcctgagtctggcccaggaacaggttggcggttcacccgaaaagctccaagagacatccaattggcttctgtctcagcagcaggcagacgggagcttccaagacctgtcgcctgtgatccataggtctatgcaaggcggtttggtggggaacgacgagactgtcgctctgacagccttcgtgaccatcgcactacatcatggcctggctgtttttcaggatgagggcgctgagcccctcaagcagagagttgaagctagtatctccaaggcctccagcttcctaggagagaaggccagcgctgggctgctgggcgcacatgctgccgctattacagcttacgccctgacgctaactaaagcgcctgctgacttgaggggcgtcgcccataataatctgatggccatggctcaggaaaccggcgataacttgtattgggggagcgtcacaggaagccagtccaatgctgtctccccaacccctgccccacggaatccaagtgatccaatgccacaggctccagctctgtggatcgagactactgcatatgcactcctgcacctattactgcacgaggggaaagccgagatggccgaccaggccgcagcatggctcacaaggcaggggagcttccagggcggattcagatccactcaggataccgtgattgcccttgatgcattgtccgcctactggattgccagccatactacggaggaaaggggactgaatgtgaccctctcttctaccggaaggaatggattcaagtcacatgcccttcagctgaataacaggcagatcagaggtctggaggaagagctccagttctcacttggatctaaaatcaacgtaaaagtcggaggaaattcaaagggcactctcaaggtgctgcgaacctataatgtacttgacatgaaaaatacgacctgccaggatctacagatcgaagtgactgtgaaaggccatgtagagtatacaatggaagcaaatgaggattatgaggattacgaatatgacgaattaccagccaaggacgacccagatgctccactgcagccggtgacaccactgcagctgtttgagggcaggagaaacagacggcgtcgagaggcacccaaagtggtggaggaacaggagagccgcgtgcattataccgtatgtatatggcggaacggcaaggtaggtctttcaggcatggccatcgccgacgtaacgctgctctcagggtttcacgctctcagggcagacctcgagaagctgacttccctgagcgaccggtatgtgtcacattttgagaccgaaggaccccacgttctgctgtacttcgactctgttccaactagccgagagtgtgtgggcttcgaggcagtccaagaagtccctgtgggactggtgcagcccgcttcagcaaccttgtacgactattacaatccagaaagaaggtgcagcgtgttttacggcgcaccatccaaatcacgcctgcttgctaccctgtgttcagcagaggtgtgtcaatgcgctgaaggaaagtgccctcgccagcgacgagctcttgagaggggcctgcaggacgaggacgggtatagaatgaaattcgcttgctattaccctcgggtcgaatacggatttcaggtgaaggtccttcgcgaagattctcgggcagcctttcggttgttcgagacaaagatcacccaggttctgcacttcacgaaagatgtgaaagcggctgcaaatcagatgcgtaattttcttgttagggcctcttgccgcttgaggctggaacccggaaaggagtacttaataatgggacttgacggagcaacgtacgatcttgaaggccacccacagtatctcctcgactctaactcctggatagaagagatgcctagtgagcggctgtgccggtccaccagacagcgcgcagcttgcgctcagcttaacgattttcttcaagagtacggaacccagggctgtcaggtgta

SEQ ID NO: 219071 - DNA, 5097 bp, synthetic construct
  misc_feature 1..5097: note = Description of Artificial Sequence: Synthetic coding sequence
  source 1..5097: mol_type = other DNA
atgaggttgctttggggcttaatatgggctagttccttctttaccctgagcctacagaagccaagactgctgttgttttctccttccgtagtccacctgggggtcccgcttagtgtaggagtacagttacaggacgtgcctcggggacaggtggttaagggttctgtattcctcaggaacccttctagaaacaacgtgccatgcagccctaaagtggatttcacgttgtcgtcagaaagagatttcgctctgctctctctccaggttcccctgaaagatgccaagtcatgtggactgcatcagctgctgcgcggacctgaagtgcagttagttgcccacagcccatggctcaaggattccctatctaggaccacaaacatccaggggatcaatctcctgtttagctctagaagaggacaccttttcctccagaccgaccagcctatttacaatcccggacagagagtgaggtacagagtgttcgctctcgaccagaagatgagaccatcaacggataccataacagttatggtggaaaattctcacggtctgagggtgcgcaagaaggaggtttacatgcccagcagcatattccaggatgattttgttataccagacatttctgaacccggaacttggaaaattagtgctcgctttagtgatggcttggaatcaaacagctccactcagttcgaggtgaaaaaatatgtgctccccaattttgaagtgaagatcacccctggcaagccctatatattgacagtacccggacacctggatgagatgcagctcgatattcaggccagatacatctatgggaagccggttcagggtgtcgcctacgtgcggttcgggctcttggacgaagacggtaaaaagaccttctttcggggtctggagagccagactaagttggtgaatggccaatcgcacatctccctgagcaaagccgaatttcaggatgctttggagaagctcaacatgggcataacggacctgcaggggctaaggctgtacgtcgccgctgccattatcgaatctcccggaggcgaaatggaagaagccgaactgacaagttggtacttcgtgtctagtcctttttctctggacttgagtaagactaagcggcaccttgtaccaggcgcaccatttttgttgcaggctttggttagagaaatgtccggtagccctgccagcggcatacccgtgaaagtgtcggcaacagtgagcagtccaggaagcgtgccagaggtgcaagatatccagcagaacactgacggaagcggtcaggtcagcataccaatcattatacctcagaccatctccgagctgcagctctcggtgtccgccggatctccccatcctgccattgccaggctcaccgtggctgccccacctagcgggggaccaggatttctcagtatcgagcgtccagactcacggcctcctcgggttggggacactctgaatctgaatttaagggccgtggggagcggagcaaccttttcccattattactatatgatattatcccgcggtcaaatagttttcatgaatcgggagcccaagcggactctgacctccgtctcagtgttcgttgaccatcatctcgcaccttcattctacttcgttgccttttactatcacggagaccatcctgtggcaaatagtttgagagtggatgtgcaagccggagcatgtgagggtaagctggagctgtctgtggatggcgctaaacaatacagaaatggagagagcgtgaagttacacctcgaaaccgattccttagcattggttgccctgggcgcactggatacagcgctctatgccgctggttccaagtcacacaaacctcttaatatggggaaagtgtttgaggctatgaactcctatgatctaggctgtgggcctggaggcggagacagcgcgcttcaggtgtttcaggcagctggactggccttcagcgatggggatcaatggaccttgtcccgaaaaagactcagttgtccgaaggaaaagactacgaggaagaagagaaacgttaactttcaaaaggctattaatgagaagctggggcagtacgcctctcccacagctaagcgttgttgccaggatggcgttaccaggttgccaatgatgcgtagctgtgagcagagggcagccagggtccagcagcctgattgccgcgagcctttcctgtcttgctgccagtttgccgaatccctgaggaagaagagcagggacaagggccaggccggactgcagagggctctggaaatcctgcaggaagaggacttaatagatgaagacgatatccccgtgagaagctttttccccgagaactggctttggagagtagaaacggtggacaggtttcagattttaaccctctggttaccagattcccttactacttgggagatccatggtctctccttgagcaagaccaaaggcctctgtgttgctactccagtacagcttagagtctttcgggagttccatctgcacctccggttgcccatgagtgtgcggagatttgaacagctggaactgagacctgtgctatacaactatctggataagaatctcaccgtgagcgtgcatgtgtcacccgtggagggtttgtgtctcgcaggcggagggggactcgctcagcaggtcctggttcccgcaggaagtgctagaccggtcgcctttagcgtggtgcctacagctgctacagctgtgtctctcaaggtcgtcgccaggggtagcttcgaatttcccgtaggagatgcagtctccaaagtcctgcaaatcgagaaggagggcgctattcaccgggaggaactggtgtacgaacttaatcccttagatcatcgaggcagaacactagagatcccaggcaatagcgatcctaacatgatccctgatggagatttcaattcctatgtgcgagtgactgccagcgacccactggataccctgggctcagagggagctctgagtcctggcggtgttgcgtcccttttgcgcctgcccagaggctgcggagaacagaccatgatttatttggcaccaaccttagctgcgtcgcggtacctggacaagacagaacagtggtcaacccttcctccggagacgaaagaccatgcggttgacttgatccagaaaggatatatgcgcatccagcagtttcggaaagctgacggttcctatgccgcttggctctctcgcggtagttctacgtggttgacggccttcgtattaaaagtcttgtcgctcgctcaagagcaagtggggggttctccagaaaaactgcaggagacttcgaactggttgttgagtcagcaacaggctgacggctcattccaagatctatcaccggtgatccatcggagtatgcagggagggctggtaggcaatgatgagaccgtggccctcacagccttcgtcactattgccttgcatcacggcctggcagtgttccaggacgagggtgccgagccacttaagcaacgcgttgaggcttcaataagtaaggctagtagttttcttggcgagaaagcatcagccggactgctgggtgcacatgccgctgccattacggcctatgcgctcacactgacaaaggctcccgctgatttgagaggggtggctcataacaatttgatggcaatggcacaggagacgggggataatctgtactggggtagtgttacagggtctcagtctaatgcagtgtcccccaccccggctcctcgcaatccttcggatcccatgcctcaggcgccagctctttggatcgaaactacagcatatgccctgttgcacctcctgctgcatgagggtaaagcggagatggcagatcaggctgctgcctggctcacaagacagggtagttttcaaggcggatttcgatcgacccaggatacagttatcgccctggatgcgctgagcgcctattggatcgcatctcacacaactgaggaacgcggactgaatgtcaccctcagttccacagggagaaacggatttaaatctcatgctcttcagttgaataatagacagatccgcggactggaggaggagcttcagttcagcctcggatccaaaatcaatgtgaaggtggggggaaattcgaaaggcacgctcaaagtgcttcgcacctacaatgtgcttgatatgaagaacaccacgtgccaggatctacagatagaggtgacagtgaaaggccacgttgagtataccatggaggctaatgaagattacgaggactacgaatatgacgagctgcctgctaaagatgacccagacgcccctctgcaacctgtgactcctctgcagctttttgaagggagaaggaaccggaggcgcagggaggcccctaagttgacatctctttcagatcgctatgtcagtcactttgagacggagggtccccatgttctgctgtatttcgattccgtcccgacatcccgggagtgtgtgggattcgaggcggtgcaagaggttcctgtcggattggtgcagcctgcaagtgcaacactctacgactactataaccctgaacgacggtgttctgtgttttatggggctccatccaagtcacggcttctggccaccctgtgtagcgcggaagtgtgccagtgtgcagaaggaaaatgtccaagacaaagacgcgctctggagcggggactgcaggatgaagacgggtaccgaatgaaattcgcatgttattacccaagggtggaatatggtttccaggtcaaggtgttgcgtgaggattctcgggctgcgtttaggctattcgagacgaagattactcaggtgctccattttacaaaagacgttaaagccgctgccaaccagatgaggaattttctagttcgggcatcctgccgcttgcgtttagaaccaggaaaagagtatctgattatgggactggatggagccacgtacgacctggagggtcatccgcagtacctgcttgactcgaacagttggatagaggagatgccatctgagaggctctgtaggtctaccaggcagcgcgctgcctgtgcccagctgaatgacttcttgcaggaatacggaactcagggatgtcaggtatag

SEQ ID NO: 219072 - DNA, 5234 bp, synthetic construct
  misc_feature 1..5234: note = Description of Artificial Sequence: Synthetic coding sequence
  source 1..5234: mol_type = other DNA
atgagactgctgtggggactgatatgggcctcctcctttttcactttgtccctccagaagccgaggctgttgcttttttccccgtctgtggtgcacctaggcgtgccactcagcgtgggcgtccagctccaggatgtccccagaggccaggtcgtgaaaggttcggtctttcttagaaatccaagtagaaacaacgtcccgtgctcccccaaggttgacttcaccttgtcatccgaaagggacttcgctctgctgagcctgcaggttcccttgaaagatgcgaagagctgtggccttcaccagctgctccgtggccctgaagttcaactcgtggcgcattcgccatggctgaaggattcactctctcggaccacgaacattcagggcatcaacctactgttctcctcgcgcagaggacacttgtttctccagaccgaccaacccatatacaatcccggacagcgcgtacgatatcgggtgttcgcgttagaccaaaaaatgagaccgagcacagacaccataaccgtgatggtggagaatagccacgggctcagagtgcggaaaaaggaagtctacatgccttcatctatatttcaggacgatttcgtcatccccgacatatccgaaccagggacttggaagattagtgcgaggttttctgatgggctcgagtctaacagcagcactcagtttgaggtgaagaaatacgtactccccaacttcgaagtaaaaatcacaccgggaaagccatatatcctgacagtgcccggacacttagatgagatgcaactggatatccaggcaaggtacatttacggaaagccggtgcagggcgtggcttacgttaggttcggcttgttagatgaggatggcaaaaaaacgtttttccgtggcctggaatcgcagactaagctcgtcaatgggcagtctcacatttcactgtctaaagctgagttccaagacgcccttgaaaaactcaacatgggcataacagacctgcagggcctacgcctatatgtggctgcagctatcatagagagccctggcggtgagatggaggaggccgaactcacgagctggtacttcgtgagcagcccttttagtctggacctgagtaaaacaaaacgacatctggtaccaggcgcacccttccttttacaagccttagtaagggagatgagtgggtcacccgcatctggaatcccagtcaaggtctctgccactgtcagttccccagggtcggtgcccgaggttcaggacatacagcagaataccgacggctccggccaggtgtctattcccattatcatcccccagacaatttcggagttacagctgagcgtgagcgccggaagtcctcatccggcaatcgcgaggcttacagtggctgcccctccctctgggggaccgggatttcttagtatcgagcgcccagacagccgccctcccagggtgggtgacacacttaatctcaaccttcgggcagtgggttcaggtgccactttttctcattactattacatgatcttgtcccggggtcagatagtgtttatgaaccgcgagcccaaacgcactctgacctccgtttctgttttcgtggatcaccacctggccccaagcttttatttcgtggctttttactatcacggcgaccacccagtggcaaactccctacgtgtcgatgttcaggccggagcctgcgaagggaagctcgagctgtccgtggatggtgctaaacagtaccggaatggcgaaagtgtgaaactccatctcgaaaccgatagcttagccctggtcgccctgggcgcactggacaccgccctctacgccgctggttccaagtctcataaacccctgaacatgggcaaggtcttcgaagctatgaatagctatgacctcggatgcggtcctggtggcggagatagtgctttgcaggtgtttcaggcagctgggctggcattcagcgacggggaccaatggacactgtcccgaaagcgcttgtcttgcccaaaggagaaaacgacccgtaaaaaacgaaatgtcaatttccaaaaggctatcaacgaaaagctgggccaatatgcttcacctacagccaagagatgctgccaagacggcgtcactcggctccccatgatgcgctcttgtgagcaacgagctgccagggtgcagcaaccagactgtagagagccgttcctgtcatgctgccagtttgccgagagtctgaggaagaaatcaagggacaaagggcaggcgggtctacagcgcgctcttgagatcctgcaggaggaggatctgatagacgaggatgatatcccagtcagaagttttttccccgagaattggttatggagggtagagacagtggataggttccaaatcctgaccctgtggttgccagatagcctgactacctgggagatacacggtctgtcactctccaagacaaaagggctgtgtgtagccacacctgttcaacttagagtatttagagagttccatctgcacctgaggctccccatgtctgtgagaaggtttgaacaactggagctaaggcccgtcttgtacaactatctggataaaaacctgacggtctcagtccacgtgagtccagtggaaggcttgtgtttggccggaggaggcggactggcccaacaagtcctggtccccgcaggatccgccagacccgtggcgttttctgtagtcccaacggccgcaaccgctgtatcccttaaggttgtcgccagaggatccttcgaatttcctgtgggcgacgcggtgagtaaggtactgcagatcgagaaagagggggcaatccaccgtgaagaactggtgtacgagctgaatcccctcgatcatcgcggaagaaccctggagatccctggtaactccgatccaaacatgataccagatggtgactttaactcatacgtgagagttacggcttctgacccactggacaccctgggatccgagggtgcactgtcaccagggggtgtggcgtccctcctccgtctaccacgtggatgcggagagcagaccatgatctacctcgccccaaccctcgcagcctctcgctatcttgataagacagagcagtggagcactctgcctcctgagacgaaggatcatgccgtggatctgattcagaaaggttacatgagaattcagcagtttcggaaggccgatgggtcctatgcggcttggctcagtaggggtagttcaacttggctaaccgccttcgtacttaaagtcctctctttggcacaggaacaagttggcggttcgcccgaaaagctccaggagaccagtaactggctcctgagtcagcagcaggctgacggctcctttcaggatttgtcccctgtcatccacaggtccatgcagggcggactcgtgggcaatgatgaaactgtggctctaacggccttcgtgactattgccttacatcacggtctggccgtcttccaggatgagggggcagaaccacttaagcagcgcgttgaagcgtctattagcaaggcaagctccttcctgggcgaaaaagcatccgccggtcttctgggcgcacacgccgctgcgattaccgcatacgcattaactctgaccaaggcgcctgcggacctgaggggcgtcgctcataataacttgatggccatggcacaggagaccggggataatctttattgggggagtgttacaggcagccagtcaaatgccgtcagccccacgcctgcccctcgcaacccatcggatcccatgcctcaggcacctgctttgtggatcgagactaccgcctatgcgctgctccacttgcttctacatgaaggcaaggctgagatggctgatcaagccgctgcatggctcacaaggcaaggctcctttcaggggggattccgtagtacccaggacaccgttatcgccctggacgcgcttagcgcctactggattgctagtcatactactgaggaaagaggcctgaacgttacgctgagcagtacaggacgcaacggatttaaaagtcacgccctccagcttaataaccgccagatccggggactggaggaggagctacagttttctctcggcagcaaaatcaacgtgaaagtggggggaaacagcaaaggcaccctcaaggtacttaggacgtacaacgttcttgacatgaaaaacaccacatgccaggaccttcagattgaggtaaccgttaagggtcacgtggaatatacaatggaagccaatgaggattacgaagactacgagtacgacgagttgccagcgaaggacgacccagacgcaccgctgcagccagttactcctctacagctgttcgaagggaggagaaacaggcgacggagggaagcacccaaagttgtagaagaacaggagtcccgggttcactacacggtgtgtatttggcgcaacgggaaagttggactgtctggaatggccatcgccgacgtgacattgctgagcggctttcacgccctaagggctgacctggaaaaacttacgagcctgtctgatcggtacgttagccactttgaaactgaaggccctcacgtcctcttgtatttcgattctgtgcctacatcccgggaatgcgtggggttcgaagccgtccaggaggtgcctgtaggcctggtgcagccagcctcagccaccctctacgattactacaatcccgaacgccgttgtagcgtcttttacggagccccaagtaaatccaggttactggccacactgtgttctgcggaggtatgccagtgtgctgagggcaagtgcccacgccaaagaagggcgctggaacgtggattgcaagacgaagacggctaccggatgaagttcgcctgctactacccgagggtcgagtatggtttccaggtgaaggtgctccgggaagactctagagccgctttcaggctgtttgaaactaaaattacacaggtgctgcactttacaaaagacgttaaggcagcagccaaccagatgaggaattttctggtgcgggcatcttgccgcctgcgactcgagcctggtaaagagtatctcattatgggcctggatggggcaacatacgatttggaagggcacccccagtacctgctcgactctaacagctggattgaagagatgcctagtgaaaggctatgtcggagtactcgccagcgcgcagcctgcgcccagttgaacgacttcctacaggaatatggcacccagggctgtcaggttta

SEQ ID NO: 219073 - DNA, 5234 bp, synthetic construct
  misc_feature 1..5234: note = Description of Artificial Sequence: Synthetic coding sequence
  source 1..5234: mol_type = other DNA
atgcggctgctgtggggcctgatatgggcgtcctcatttttcacactcagtttgcaaaaacccaggttactgctattctcaccctctgtggttcatctgggagtgcctctctccgtgggggtccagttgcaggatgtgccacgcggacaagtggtgaaagggagcgttttcctgagaaacccttcccggaataacgtgccatgcagtcccaaggtcgactttaccctctcttccgaacgcgactttgccttattatctctacaggtcccactaaaggacgctaagtcatgtgggttgcaccagctcctgcggggtccagaggtgcagctggtagcccactccccatggttgaaggactcattgtcaagaacgacgaatattcagggaattaacctgctattttcttctcgacgcggacatctgttcctccaaacggaccagcctatctacaatcccggacagagagtccgctatagggttttcgcactcgaccaaaagatgagaccgagtaccgacacaattaccgttatggttgaaaatagccatggactgcgtgtgagaaagaaggaagtgtacatgcccagtagcatatttcaggacgactttgttattccagatatctctgaacctggaacctggaagatctctgccaggttctctgacggactcgagtccaacagtagcacacagtttgaggttaaaaaatatgtactccccaactttgaggtgaagatcactcctgggaagccttacatcctaaccgtccctgggcatctggacgaaatgcaactggatatacaggctcgatacatctatggcaaaccggtgcaaggggtcgcctacgtacgattcggactgttagacgaagacgggaagaagactttcttccggggtctggaatcccagaccaaactggtaaacggacagagtcacatttcgctctccaaggcagagtttcaggatgcactcgagaagctaaatatggggattacagacttgcagggccttagactctatgttgctgcagcgattattgagtcaccaggtggtgaaatggaggaggctgagctgacgagctggtattttgtgagcagtcccttctcactggatctgtccaagaccaaacggcatctggtgccaggagcccctttcctgctgcaggccttagtccgggagatgagcggatcccccgcatcgggcatcccggtgaaggtgtcagcaacagtttcatctccgggtagcgtgccagaggttcaagacatccagcagaacaccgatggctcaggacaggtcagcatccccattatcatccctcagaccatctctgagttacagctatcagtgtcagccggtagcccgcacccggcaatcgccaggcttacggttgcggctccaccaagtggtggacccggattcctgagcatcgaacggcctgacagtagacctccaagggtaggagacactcttaatctcaacctgcgagccgtggggagcggcgctaccttctcacactactactacatgattctatcacgaggtcagatcgtcttcatgaatcgtgaaccaaaacggactctaacatccgtcagtgtctttgtggatcaccaccttgcaccgtctttttactttgtggccttttattatcacggggatcaccctgtggctaactcactgagagtggatgtgcaggctggcgcttgtgaaggaaaacttgaactgtccgttgacggcgcaaaacagtatcgcaacggcgaatccgttaaacttcatctcgaaacagatagcttagccttggtagccctgggcgctctggataccgctctctacgctgctggttcgaaaagtcataagccactcaatatgggaaaagtgttcgaagctatgaattcctacgaccttgggtgcggacctggaggtggggactcagcattacaagtttttcaggctgctggactcgccttttccgatggcgaccagtggacactatccagaaaacggttgtcttgtcctaaagaaaaaactacccgtaaaaaacgcaacgtcaattttcaaaaagcaatcaacgagaagctcggtcagtatgcatcaccgactgccaaaagatgctgtcaagacggtgtcacccgcctcccaatgatgaggagctgtgagcaaagagctgcccgtgtccagcagccagactgtagagagccatttctgagttgctgccagtttgccgagagcctacgaaaaaagtcaagggataaaggccaggcaggcctgcagcgggctcttgagattcttcaggaagaagacctcattgatgaggacgatatcccggtgcggtctttttttcccgagaactggctgtggagagtggagaccgtggatcgtttccaaattcttactttatggctgcctgacagcctaaccacatgggagatccatggactgtctttaagcaagaccaaggggctttgcgtggcgactccggtccaactccgagtgtttcgggagttccatctgcatctgcgtctgcccatgtcagtaagaagattcgaacaactagagttaaggcccgtcctgtacaactatctcgacaaaaacctcaccgtgtctgtccatgtgtccccggtggaaggactatgtctggcaggcggaggtgggctggctcaacaagtcttggtgcccgctggctcagccagacccgtggccttcagtgtggtgccgacagcggctgccgctgtgagcctcaaggttgtggcacgcggaagtttcgaatttcctgttggggatgcagtgtccaaggtcctacagattgagaaagaaggagctattcaccgggaagagctggtctatgaattgaatccactcgaccataggggaaggactctggagatccccggtaactccgaccctaatatgatcccagacggcgacttcaattcatatgtgcgggttaccgcatctgaccccctagacacgttagggtcggagggcgcactgagccctggcggagtggctagcctcctgagattgccacggggatgcggagagcaaacgatgatatatttagcccctacactggccgcaagccggtacctggacaaaaccgagcagtggtccacactgcctcccgaaaccaaagaccatgccgtcgacctgatccaaaagggctatatgcgcattcagcaattccgcaaggccgacgggagctacgcagcctggctgtcacgcggttctagtacctggctgaccgccttcgtgctaaaggtcttgtcactggcccaagagcaggttgggggatctcccgaaaagcttcaggagacttcaaattggttgctttcccagcagcaagctgacggctcattccaggaccttagtcctgtgattcaccgatctatgcagggcggtctggtggggaacgacgaaactgttgcgttaacagcatttgttacaattgcactccaccacggcttagccgtgttccaggatgaaggggctgaacccttgaagcagcgcgtcgaagcttctatttccaaggcaaacagctttcttggtgaaaaagcatcggctgggctcctaggggctcacgcagccgctattacagcctacgctttaactctgaccaaagccccagcggatctgagaggggtggcacacaataacctgatggcgatggcccaggaaaccggcgataatctgtattggggcagcgtgaccggctctcagagtaatgccgtctcccccacgcccgctcctaggaaccctagcgaccctatgccccaggctccagcactgtggatcgaaacaacagcatatgcactgctccatctactgctgcatgagggcaaagctgagatggccgaccaggctgcagcgtggctgacccgacagggctcttttcagggcggattcagatccacccaggatacagtgatagcgttggacgcattgtctgcttactggatagcatcacacaccacagaggagagggggcttaatgtgacactgagtagcactgggcgtaatggatttaagagtcacgccctccagctgaacaaccggcaaatcagggggctcgaggaggaattacagtttagtctgggaagcaaaatcaatgttaaggtggggggtaattcaaaagggaccctgaaggttctaagaacgtacaatgtcttggatatgaagaacactacttgtcaggatcttcagattgaggtaaccgtgaaaggccatgtggagtacactatggaggcgaacgaagactacgaagattacgagtatgacgagctccccgctaaggatgatccggacgcccctctgcagccggtgactcctctgcagctttttgagggaaggcggaacaggagacggagggaggcccctaaggtcgtggaagaacaggagagccgcgtgcattacacagtgtgtatctggaggaatggaaaagtggggctgtccggtatggctatcgccgatgtgacactcctgtctggattccatgctctgcgcgctgacctggagaaattgacatccctgtccgacaggtacgtgtctcatttcgagacagaaggccctcacgtcctcctgtatttcgacagtgttcccaccagcagggaatgcgtgggttttgaggctgtgcaagaggtgcctgtcggactcgttcagccagccagcgcaaccctgtatgactactacaacccggaaagaaggtgcagcgtgttttacggcgcaccatctaagagccgcctcctggcaactttgtgttccgcagaagtctgccaatgcgccgagggcaagtgtccacgccagcgcagagcactggaacgaggactgcaggacgaggacgggtaccggatgaagtttgcatgttactatccaagagttgagtatggcttccaggtcaaggttctccgcgaggattcaagggccgcattccgccttttcgaaactaagatcactcaggttctccattttactaaggacgtgaaagctgcagcgaaccaaatgaggaacttcttggtaagagctagctgtaggctcaggctagagcctggcaaggaatacttaattatgggcctggacggcgctacttacgaccttgagggccacccacagtatctcctcgactctaattcgtggattgaggagatgccatcagagcgactttgtagaagtactcgacaacgggctgcttgcgcacagctgaatgacttcctgcaggagtacgggacccagggatgccaggtgta

SEQ ID NO: 219074 - DNA, 807 bp, synthetic construct
  misc_feature 1..807: note = Description of Artificial Sequence: Synthetic coding sequence
  source 1..807: mol_type = other DNA
atgtgtccggaagactcgctccaggttcctctaaaggacgccaagtcttgcggattgcatcagctgctgcgaggccctgaggtacagttagtggcccattctccttggctgaaagattcactttcgcgcactactaatattcaaggcatcaacctgctgttctcctcacgccgaggacacctctttctccaaactgaccagcctatttataaccccggacagagagtgaggtacagggtgtttgcattggaccagaaaatgcgcccttcaaccgatactattacagtgatggtcgaaaacagtcatggactgagagtgagaaagaaagaggtctatatgccatcgtctatttttcaggatgatttcgtgatcccagatatctccgaaccaggtacatggaaaatctctgcccgttttagcgacggcttggaatccaacagcagtactcagtttgaggtcaaaaaatacgtcctgcccaactttgaggtcaaaattacaccgggaaaaccctatattcttacagtgcccggacacttggacgagatgcagctggatattcaggcccgatacatttacgggaagccggtccaaggcgtggcgtacgtgcggttcggactgctggatgaagatggcaaaaaaactttctttaggggactcgagtcccagaccaaacttgtcaatggacagtcacatatctcactatctaaggctgaattccaggatgccttggagaaactgaacatgggaatcaccgaccttcagggactgcgcctgtacgttgccgctgccataattgagtctccctag

SEQ ID NO: 219075 - DNA, 5097 bp, synthetic construct
  misc_feature 1..5097: note = Description of Artificial Sequence: Synthetic coding sequence
  source 1..5097: mol_type = other DNA
atgcgactgctctggggactgatatgggcatctagtttctttacactcagcctgcaaaagccccgactgctgcttttctccccaagcgtggtgcacctgggtgttcccctgagtgtgggggtccaactgcaagatgtccccagaggccaggtggtgaaggggtctgttttcttgaggaaccccagtagaaacaacgtcccttgctcccctaaggtggattttactctgagttcagagcgtgatttcgcacttctttccctgcaggttcccctaaaggacgccaagtcatgtggtcttcatcagttgttgagggggcctgaggtgcagctggtcgcacattccccatggctgaaagactcactatcccgtaccacaaacatccagggaatcaaccttctctttagctctcgcagaggacacctctttctccagaccgatcagcctatctataacccaggacagcgagtgcgctaccgtgtattcgctctggaccagaaaatgcggcctagcacagataccataaccgtgatggtggaaaattcccacggcctacgcgtgcgtaagaaggaagtttacatgccctcctcaatatttcaagatgacttcgtgatccctgacatttctgaaccaggcacgtggaaaatttcagccagattcagtgatggtctggagagcaattcttccacccagttcgaggtgaaaaagtatgtactgcccaactttgaggttaagattaccccaggcaaaccctacattctgaccgtcccaggacaccttgatgagatgcagctcgacattcaggccagatacatttatgggaagcctgttcagggcgtggcctacgtccgatttggcctcctggatgaagacggaaaaaaaacgttttttcggggtctggagagccagaccaagctcgttaacggacagtcacacatctccctgtctaaggctgagttccaagacgcactagaaaaacttaatatgggaataactgacctccagggcttgaggctttacgtggctgccgctattatcgagagcccaggtggtgagatggaggaagccgagctgacctcctggtattttgtgagctctccgttctcattggatctgagcaagactaaacgacacctggtaccaggtgcccctttcctcctgcaagcccttgtccgcgaaatgagtggctcacccgcatcgggtatccccgtgaaagtctccgcgaccgtgtcatcccctggaagtgtcccagaagtgcaggacattcaacagaacactgacgggtcgggccaggtgagcattccaattatcatcccccagaccatcagtgagctgcagctgagcgtctcggcaggcagtcctcatcccgctatcgccaggctgaccgttgccgctcccccttctggagggcctgggttcttgagcatagagcgacccgactcaaggccaccaagagtcggggatacactgaatctgaacctcagggcagtcggatctggggcaacctttagccactattactacatgatcctttccagagggcagattgtattcatgaatcgcgagcctaaacgcacactgacctctgtgagtgttttcgtggatcatcacctcgccccaagtttctattttgtggcattctactaccacggagatcaccctgtagcaaactctctaagagtggatgtccaggcaggggcttgtgagggaaagctggagctgagcgtggacggcgctaagcagtatagaaacggggagagtgtcaaactgcatctggagacagacagcttggctttagtggccctgggcgctctcgacactgccctttatgctgccggatcaaagagtcacaaaccactgaacatggggaaggtctttgaggccatgaatagttatgacctggggtgtggtccaggcggaggagattctgcgctgcaggtgttccaggctgcaggtctagcgttttcagatggggatcagtggacattgtcgcgcaaacggctttcctgccctaaagagaaaacgacgcgcaagaagaggaacgtaaacttccagaaagcaattaatgaaaagctgggacaatacgcatcacccactgcaaaaagatgctgccaagacggcgtgacacgcttaccaatgatgcggtcctgtgagcaacgcgctgcccgtgtccagcagcctgattgtagagagcccttcctctcttgttgtcagttcgccgaaagcctgaggaagaagagccgcgataaggggcaagcagggctgcagagagctttagagatcctgcaggaggaggatcttattgatgaagacgacatccctgtgcgctctttcttcccagagaattggttgtggagagtcgagaccgtagatcgcttccaaattctgaccctgtggctaccagattccctgaccacttgggaaattcacggactatcattgtcgaagacaaaaggactctgtgtggcaacacccgtccagttgagagtttttagagaatttcacctccatctgcgcctgccaatgagcgtgaggagattcgagcagctggaactaaggccagtgctgtacaattatctcgacaagaatctgacagtcagcgtgcatgtgtcccctgtcgaaggattgtgcctggcaggcggagggggactggctcagcaggtgctcgtacccgcaggctccgccagacctgtagcatttagcgtcgtccctaccgctgcggctgcagtctctcttaaggtggttgcaaggggttcctttgagtttcccgtgggggatgctgtatctaaagtacttcaaattgagaaagagggcgctattcacagggaggagttggtgtatgagttgaaccccctcgaccatcggggaagaaccctggagatcccagggaattccgaccctaatatgatcccggatggcgactttaatagttacgtgagagttactgcttctgaccctctggacactttaggaagtgaaggtgctttatcccctggcggtgtggccagtctcttgcgactgcctagggggtgtggtgaacagaccatgatctatctggcccctaccttagccgctagtcggtatctcgacaagaccgaacaatggagtaccctgccccctgagaccaaagaccacgccgtagacctgattcagaaagggtacatgaggatccaacaatttaggaaggctgacgggagctatgccgcatggttaagtcggggttcgagtacatggctgactgccttcgtattaaaagtcctgagtttggcccaggaacaagtcggagggtcgccagaaaagctgcaggagacatccaactggctgctgagccagcagcaggctgacggctcttttcaagacctgtcacccgttatacaccgctcaatgcagggaggattggtagggaatgacgagactgttgcattgactgcgttcgtgacaatagccctccaccatggtcttgccgtgtttcaggacgagggcgcagaacccctgaaacagcgcgttgaggcctcaattagcaaggcaaattcgttcctcggggagaaggcctcagctggactgctgggtgcgcacgcagctgccattaccgcttacgccctgaccctgaccaaagcccctgcggatctccgcggtgtggcccacaacaacctaatggctatggcgcaggagaccggcgataatctttactggggcagcgttaccggatcgcagagcaatgctgtttcccccacccctgcccctcgcaatccttcagacccgatgccacaggctcctgctttgtggatcgagaccacggcttacgccctactgcaccttctactccacgaagggaaggctgaaatggctgaccaggcggcagcctggctgacaaggcagggatcattccagggaggtttccgctcaacccaagataccgtgattgctctcgacgctctcagcgcatactggattgcatcccatactactgaggagcgagggctaaacgtaacactaagctcgacagggcgaaatggatttaagtcgcatgctttacagctgaataacagacaaatccgaggtcttgaggaagagttgcagttcagtctgggtagcaagatcaatgttaaagttggtggaaacagcaaaggaacccttaaggtcctgagaacttacaacgtcctggacatgaagaacacaacttgccaggacctgcagatcgaagtcaccgtcaagggtcacgtcgaatatacaatggaagctaatgaagattacgaagactacgagtacgatgaattgcccgcaaaagatgatcctgatgccccactacagcctgttaccccactacagctgttcgaggggaggagaaaccgcagaagaagggaggcgcctaaactcacttctctgtccgaccggtatgtgtcacactttgaaacagaaggaccccacgtgctgctatatttcgattcagtcccgaccagtagggaatgtgttgggttcgaagctgttcaggaggtacctgttggactcgttcagcccgcttccgcgacgttatacgactactacaatcccgagaggaggtgctctgtgttctacggcgctcctagcaagtcccgtctcttggccaccttatgctccgcagaggtgtgtcagtgcgctgaagggaagtgtccacggcaacgcagagctctcgagcgcggactgcaggacgaggatggataccgtatgaaatttgcttgttactaccctcgtgtagagtacggtttccaggtcaaagtgctccgggaagattcacgggctgcgtttcgactcttcgagaccaaaatcacccaggtgctccattttaccaaggatgtaaaagcagccgctaaccaaatgagaaactttctcgtgcgggcatcatgtcgtctgcggttagagccaggaaaagagtacttgataatggggctggatggagcaacgtatgatctggaaggccatccccagtatttgctcgactccaactcttggatcgaagaaatgccatcagagagattgtgtcggagtaccaggcaacgcgcagcatgcgcacagttgaatgactttctccaggagtatggtactcagggatgccaggtgtag

SEQ ID NO: 219076 - DNA, 813 bp, synthetic construct
  misc_feature 1..813: note = Description of Artificial Sequence: Synthetic coding sequence
  source 1..813: mol_type = other DNA
atgtgccctgaagattcactgcaggttcctttaaaggatgccaagagctgcggactccatcagttgttgcgaggccctgaagtgcagctggtcgcccatagtccttggctgaaggacagcctctctcgtactaccaatatccaaggaattaatctcctgttttccagcaggagaggccacctttttctgcaaaccgatcagcccatttacaatcccggacagcgagtgcgatacagagtgttcgccctcgatcagaaaatgagaccctcaacagacactattactgtaatggttgagaatagtcacgggttgcgggtaagaaaaaaggaggtctacatgccttcctccatcttccaggatgatttcgtgattccagatatcagcgaaccaggcacctggaaaatatctgctagattttctgacgggctggaatcaaactccagtactcagttcgaggtgaagaagtatgtgctgcctaattttgaggtgaagatcacccctgggaagccctacatcttgacagtccccggacacctagacgagatgcaactagacattcaggccagatatatttatggtaagccagtgcagggagtcgcctacgttagatttggccttctcgatgaagatggtaaaaagacttttttcagagggctcgagtcacagaccaaacttgtcaacgggcagtcccatatttctcttagcaaagctgaatttcaggatgcacttgagaagcttaacatgggaataacagacctgcaggggctgagactgtacgtggctgccgctatcatcgaaagtcctggagggtag

SEQ ID NO: 219077 - DNA, 5097 bp, synthetic construct
  misc_feature 1..5097: note = Description of Artificial Sequence: Synthetic coding sequence
  source 1..5097: mol_type = other DNA
atgagactgctctggggtttgatctgggcgagcagtttttttaccctctcacttcaaaagccccgattgctgctattctcgccatctgtcgtgcacctcggtgtgccactctccgtgggggtccagttacaggacgtgccacgcggtcaggtggttaaaggatccgtcttcttgaggaatccatcaaggaataacgtcccctgttcaccaaaggttgatttcacactgagctctgaacgggacttcgccctgctctccttacaagtgccgctcaaggacgccaaatcctgcggcctgcaccaactgctgcgcggacctgaagtgcagctcgtcgcgcattcaccctggctcaaagatagcctcagcagaacaaccaatatccagggcattaacctgctgttctctagtaggcggggacatctgtttctgcaaaccgaccagccaatttacaaccccggacagagggtgaggtacagagtgttcgcacttgatcagaaaatgcgcccatctacagacaccattacagtgatggtcgaaaatagtcacggactcagggtgcgtaagaaggaggtgtacatgccaagctcaatatttcaggatgactttgtgatccccgacatttccgaaccgggtacctggaagatcagtgcgaggtttagcgacggactcgagtcgaacagcagtacacaattcgaagttaaaaagtacgtcttgcccaactttgaggtgaaaatcacacctggcaaaccatatatcttgactgtgcctggacacctcgatgaaatgcagttagatatccaggctcgctacatctatggaaagcccgttcagggggtagcctatgttcggtttggattgctcgacgaggacggtaagaagacattcttccgcggacttgaaagtcaaaccaagctggtcaatggacagagccacataagtctgagcaaggcggagttccaggacgccttggagaaactgaacatgggaattacggatcttcagggcttacgactgtatgtggcagcagctatcatcgaaagcccgggtggtgaaatggaagaagcggagcttacttcttggtacttcgtatcctctccttttagcctggatctcagcaagacaaagaggcacctcgtgccaggggctccatttctgctgcaggcactagttagagaaatgagtggttctcccgcttcaggaataccagtgaaggtttccgctaccgtctcctctcccggatcagtgcctgaggttcaggatatacaacagaacacggacggatctggtcaggtgtctataccaatcatcatcccacaaactatcagtgagctccagctctccgtctctgccggtagcccacatcccgcaatcgcacgtctgacagtcgccgctccaccttccgggggtcctggatttttgagtattgagaggcccgactcccggccacctcgcgtcggcgatacactcaatctaaatctgagggcggtgggatccggagctacgttctcccactactactacatgatcctctcaagaggacagatcgttttcatgaatagagaacccaaacgcaccctgacaagtgtttcagtgttcgttgaccaccatttagctccgtcattttactttgttgccttttattaccacggtgatcacccagtggctaatagtctccgagtggacgtacaggccggagcatgcgaaggaaaacttgagttatctgtggatggcgctaagcagtacaggaatggagaatccgtcaaactacacctcgaaacggattcgctcgcactcgtcgctctgggcgctctggacacagccctgtatgctgccggatctaaatctcacaaacccctgaacatgggcaaggtattcgaggcaatgaactcttatgatctggggtgcgggccagggggtggagatagcgccctgcaagtcttccaggccgctgggttggccttctcagacggtgatcagtggaccttaagccgcaaacgcttgagctgcccaaaggagaagactacaaggaagaagagaaacgtcaactttcagaaagccattaatgaaaaactcggacagtatgcctccccaactgcgaaacgctgttgtcaagacggggttaccagactgccaatgatgcgtagttgcgaacaaagggcagctagagtccagcaacctgattgcagagagcctttcctttcatgctgtcagttcgccgagagcctgcgaaagaagtcgagggataaggggcaggcaggtctgcagcgtgccttggaaatcttgcaggaagaagacctcattgacgaagatgatatccccgtccggtcattctttcccgagaactggctgtggcgagtggaaacagtggataggttccagattctgactctttggcttcctgatagccttaccacctgggagatccatggcctgtccctgtctaagaccaagggcttgtgcgtggcaacacctgtacagttgcgtgtttttcgcgagttccacttgcatcttcgattaccgatgtctgtacgcagattcgagcagctggagctgcggcctgtgttatacaattaccttgataagaacttgacggtttcagttcatgtatcccccgtggaaggtctctgcctggccggagggggtggcctggcccagcaggtactggtccctgcgggatccgctcgcccagtcgccttcagcgtggtacccacagccgctacagccgtgtccttgaaggtggtggcgagaggctctttcgagtttccagtgggtgatgcggtgtctaaggtactccagatagagaaggagggggctattcatcgggaagagctcgtgtacgagctgaatccattggatcaccgcggtagaactctagagatccccggaaacagcgaccctaacatgattcccgacggagattttaactcatacgtccgagttacagcttcagatccgttggatacactgggcagcgagggggctctgagccccggaggagtggcgagcctgctcagattaccaaggggttgcggtgagcagacaatgatctatcttgccccaaccctcgcagcctcccgttatctagataagacagaacaatggtcaactcttccccctgagacaaaggaccatgccgtggatttaattcagaagggctatatgagaattcagcagttcaggaaagcagacgggagctacgccgcatggctgtccagaggtagttcaacatggctgacagcattcgtcctgaaggtcctgtccctcgcacaggaacaggtagggggatccccagagaagcttcaggagacaagcaattggttgttgtctcagcaacaagccgatggtagtttccaagatttgtcacctgttattcataggagtatgcaaggcggactggtgggcaatgacgagaccgtagctctcaccgcgttcgttacgattgccctgcaccacggcttggccgtatttcaagacgaaggtgccgagccgctgaagcagcgtgttgaggcctccatcagtaaagccagctcatttcttggggagaaagcttcagccggattattgggagcccatgctgcagccattactgcctacgccttgaccctgaccaaggctccagccgacctgcggggagtggctcataacaatctaatggccatggcccaggagacaggagacaacttatattggggctccgtgaccggaagccagagcaatgcagtgtcccccacacccgcacctcggaacccctcagatcctatgccgcaggctcctgccctgtggatcgaaacaaccgcctacgccctgttacacctcctgctgcatgaaggaaaggctgaaatggcagaccaggccgcagcatggctgacccggcaaggtagctttcagggtggattccgctcaacccaagacactgtcatcgcattggacgccctatctgcgtattggatcgcaagccacaccacagaagagcgtgggctcaatgtgacgctgtctagcaccggcaggaacggcttcaagtcccatgctctgcagctaaacaatagacagataagagggctggaagaggagctgcagttttccctcggctcaaaaattaatgtgaaagtggggggaaattcaaaagggactctcaaggtgcttagaacatataacgtgctggacatgaagaataccacatgccaagaccttcagattgaagtcaccgtgaaaggccacgttgaatacaccatggaggccaacgaggattatgaggactacgagtacgatgagctcccagccaaggacgatccagatgcccctctgcagccagtcacccctctgcagctttttgaaggaaggagaaacagaagaaggcgggaggccccaaaattgacgagcctgtccgatcgttacgtttctcactttgaaactgagggtccccacgtcttgctttacttcgatagcgtcccaacctctagagaatgcgtgggcttcgaggctgtgcaagaagtaccagtgggtctggtacaacctgcatcagcaaccttatacgattactacaacccagagagacgctgtagtgtgttctacggagcgccttccaaatcccggctgctggccacgttgtgtagtgcggaagtatgtcagtgcgctgaggggaagtgtcctaggcagagaagggctttagaacggggtcttcaggatgaggacggatatcgcatgaagttcgcttgttattatcccagagtcgaatatggatttcaggtgaaggttctccgagaggacagtagagccgcttttcgactgttcgagaccaaaattacacaagtgctccatttcaccaaggacgtgaaagcagccgcaaaccagatgcggaacttccttgtgagggcttcatgccggctacgactggaacccggtaaagagtatctaattatgggcttggatggggcaacatatgacctggaaggccatccccaatacttactggatagtaactcttggatcgaggaaatgcctagtgagcgtctctgcagaagcacccgccaaagagccgcttgtgctcaactgaacgactttctgcaggagtatggaacacaggggtgtcaagtttag

SEQ ID NO: 219078 - DNA, 1536 bp, synthetic construct
  misc_feature 1..1536: note = Description of Artificial Sequence: Synthetic coding sequence
  source 1..1536: mol_type = other DNA
atggccaagggtctgtccgtgcagaacgataagcatccgggataccagccagctctgctgcttagccccggtgcaccacttttcgccgacgggccagcctacgctctgttgcacctgcttctgcacgaaggaaaggctgaaatggccgatcaagcagcagcctggctgacccgccagggaagtttccaaggcggatttcgatcgacccaggataccgtcatcgccctggacgctctgtcagcttattggatcgctagccacacgactgaggagaggggactgaatgtgacgttgtcgtctaccggccgaaatggattcaagagccacgccctgcagctgaataacagacaaatacgaggcttggaggaggagctgcagttttcgctcggaagcaaaatcaatgttaaggttggcggaaacagtaagggaacactgaaagttctaagaacttataatgtgctcgacatgaaaaacacgacatgccaggacctccaaatagaagtgacagtgaagggacatgtggaatacaccatggaagccaatgaggactacgaggactatgaatatgatgagttgcccgctaaagacgacccagacgccccactgcaacctgtgacaccattgcagctcttcgagggccgacggaatagacggagaagagaggcacctaaagttgttgaagagcaggaatctcgcgtgcactatactgtatgtatatggagaaacggtaaggtgggattaagtggcatggcaattgctgatgtgacactgttgtctggcttccatgccctgcgagcggacctggaaaaactcacgtccctttctgacagatacgtaagccactttgagaccgaaggaccccacgtgctgctttattttgattcggtccccacgagcagagagtgcgtgggcttcgaagcagtgcaggaggttcccgtcggtctggtccagccggcatcagccaccctctatgactattataaccccgaaagacgctgtagcgtgttctatggcgcaccatccaagtccagactacttgctactctgtgcagcgccgaagtatgccagtgtgccgaaggcaagtgccctcgccagaggagggccctggaacgaggcttacaggacgaagatggttataggatgaaatttgcctgctactacccacgcgtagagtatggttttcaagtgaaagtgttgagggaggactcacgcgctgccttccgcctgttcgaaacaaagataacacaagtcctccatttcactaaagacgttaaggccgctgctaaccagatgcggaactttctcgtgcgcgcaagttgcaggctccggcttgagcctggcaaggaatacttaattatgggcctcgacggagccacgtacgacctggaaggacatcctcagtacctccttgattcaaatagttggatcgaagagatgccaagtgagagattgtgtcgcagcactcgccaacgagctgcctgtgctcagctgaatgatttcctgcaggagtacggcactcagggatgccaggtctag

SEQ ID NO: 219079 - DNA, 1953 bp, synthetic construct
  misc_feature 1..1953: note = Description of Artificial Sequence: Synthetic coding sequence
  source 1..1953: mol_type = other DNA
atgggtagtcagtgtcgcggttggcatatgtgcgccctcggctcgcagcagcaagcagatggctcctttcaggacctatctcccgttatccatcggtctatgcagggtggtctggtggggaacgacgagactgtggccctgaccgcattcgtaaccatcgctctccaccacggtctcgcagtgttccaggacgagggagctgaacctcttaaacagagggtggaagcatcaatatccaaagcctctagcttcttaggagagaaagcatcagccggactgctgggagctcacgccgcagcgataaccgcatacgcgctcacacttaccaaggctcccgcagaccttcgcggagttgctcacaataacttaatggcaatggcacaagagacgggcgataatctctactggggaagcgtaacaggttcccagtctaacgcggtttcccctactccggcacctcggaatccatcagatccgatgccccaggccccagcactctggattgagacaacagcctatgctctcctgcatctgctgttgcatgaaggaaaagctgagatggccgatcaagccgcagcctggctcacaaggcaaggcagtttccagggtggctttcgctctacccaagatactgtcatcgccctcgatgccctgagcgcctactggatcgccagccatactaccgaagagcgcggtctcaatgttacactcagttctacaggacgcaacgggttcaagagccatgccctccagctgaataataggcaaatccgtgggctcgaagaggaactccagttctccctcggctctaaaatcaatgtgaaggtgggcggtaattcgaaaggcaccctaaaagtcttgcggacttacaacgtccttgacatgaaaaataccacttgccaggacctccaaatagaagtgaccgtgaaaggacacgtagaatacaccatggaggctaatgaagattacgaggattacgagtacgacgagctacccgctaaggacgatcccgatgcccctctgcagcccgttaccccgttgcagctgttcgagggacggagaaatcgcagacggagggaggcgccaaaggtcgtggaagaacaagaatctcgggtgcactacaccgtgtgcatctggaggaacggtaaggtcgggttgtcggggatggccattgccgacgtgaccttactgagcgggttccatgctcttcgggcagatttggagaagctgacctccctcagcgacagatacgtgagccacttcgagacggagggtccgcacgtcctgttgtatttcgactcagttcctactagtagagagtgtgtgggatttgaggccgtgcaggaggtgccggtgggcctggtgcagcccgctagcgctacactgtacgattattataacccagagcggcgatgcagtgtcttttatggagccccatcaaagtcacgccttctcgccacgctgtgcagcgccgaagtttgtcaatgtgccgagggcaaatgccccaggcagcggagggcccttgagcggggactgcaggacgaagatggataccggatgaagtttgcgtgctactatcctagggtggagtacggctttcaggtgaaagttctgagggaggattctagggcagcatttcgcctctttgagacaaagatcacccaggtgttgcatttcaccaaggacgtgaaagccgctgctaatcagatgcggaactttctagtgcgcgcttcatgtcgattacggttggagccaggaaaagagtatctcattatgggcctggacggagcaacgtatgacctcgaaggtcatccacagtacttactggatagcaatagctggattgaggaaatgccatccgaacgcctgtgccgctctactcgtcaaagggctgcgtgcgcccagctgaatgacttcttacaggagtacgggacccagggttgccaggtgtag

SEQ ID NO: 219080 - DNA, 291 bp, synthetic construct
  misc_feature 1..291: note = Description of Artificial Sequence: Synthetic coding sequence
  source 1..291: mol_type = other DNA
atgcccggtccaacaccctccgggactaatgtcgggagcagcggaagatctcctagtaaggccgttgctgcaagggccgcaggctcaactgtgcgccagcgcaagaatgcatcttgtggtacccggagcgcaggtaggaccacatctgcagggaccgggggaatgtggcgcttttataccgaggattcccctggccttaaagttggtcccgttcccgttctggttatgtccctgttattcatagcaagcgtctttatgctgcacatttgggggaagtatacaagatcatag

SEQ ID NO: 219081 - DNA, 3318 bp, synthetic construct
  misc_feature 1..3318: note = Description of Artificial Sequence: Synthetic coding sequence
  source 1..3318: mol_type = other DNA
ggtcgcgcaggtgaagtgcgagctctgtcctccggggcacagcgtagaggctcacacttcgttgtgctgtgccggttgccacgaggcagagccagagtcgtgggcgcatccctgtcacatgctcctctgcccctgagatattgctggaaaggacggggtggcgtaagcagacttttctgtagtcagagagctaggatgccgggtagtctgggacgagaagcatcaggcagagcaggaccaacagggtgtggcgctttcgccttcgggttgaggtgtaggtacgttatctccgccccaaaaatcttcagggtcggggcaagtgaaaatatcgtgattcaggtgtatgggtatactgaggcctttgacgctaccatatccataaagtcgtacccagataagaagttctcctatagctctggtcacgtacacctatcttctgagaacaagtttcaaaacagcgccatcctgacaattcagcctaaacagttgcctggaggccagaacccggtatcctatgtctatcttgaagtggtctcaaaacacttcagcaaaagtaaacggatgcctataacctacgacaacggttttctctttatacataccgacaagcctgtttatacacctgaccaatcagtcaaggtgcgggtgtattccctgaatgacgatctgaagccagccaaaagggaaactgttctaaccttcatcgatcccgaaggatccgaagtcgatatggttgaggagattgaccatattggtatcatcagctttccagactttaagatcccgtcgaaccctcgatacggcatgtggacaattaaagccaaatataaggaagacttttctacaaccggcactgcctatttcgaagttaaggaatatgttctgccccattttagtgtcagcattgaacccgaatataatttcattggttacaagaacttcaaaaacttcgagattacaattaaggcaaggtatttctataataaagtagtgacagaggctgacgtttacatcactttcggcattcgtgaggacctcaaagatgaccagaaggaaatgatgcagacggccatgcaaaataccatgctcatcaacggcatcgcccaagtcactttcgactccgagaccgccgtcaaggaattgagctactactctcttgaagacctgaataacaagtacctgtatatcgcggtcactgttatagagtccactggtgggttctcagaggaggcagaaatccccggaattaagtacgtgctgagcccctacaaactgaatttggtcgcaaccccactgttcctgaagcccggaataccctaccctatcaaggtgcaggtgaaagattccctggatcagctggttggtggcgtcccagtgaccctgaatgctcagaccatcgacgtgaatcaagagacttcagatctggatccctctaagtctgtgacccgagtcgatgacggcgtagcctcattcgttcttaacctgccctcgggggtcactgtgctggagttcaatgttaaaactgacgcgccagacttgcctgaagagaatcaggcacgagagggctatagagccattgcgtactcctctttatcacagagctacctatatatcgactggaccgacaatcacaaagcccttttggtcggcgaacatctcaatatcattgtcacccctaagtcaccttatatcgataaaattacacattacaattatcttattttgtccaaaggaaagattatacattttgggacacgcgaaaagttcagcgacgcatcgtaccagtccattaacatccccgtaacacagaatatggtgccaagtagccgattactggtatactatattgtgaccggtgagcagaccgcggagctggtaagtgacagcgtgtggctcaatatcgaagagaagtgcggcaatcagctacaagtccacctgagcccggatgccgatgcctattcacccggtcagaccgtgtctctaaatatggcaactggcatggacagctgggtagcgctggccgctgtggattcagccgtttatggcgtccagcgaggggcaaagaaaccccttgagagggtattccagttccttgagaaaagcgatctgggctgtggagcagggggaggtttaaataacgcaaacgttttccatcttgcaggactgacattcctgacaaatgccaatgctgatgatagtcaggaaaacgatgaaccctgtaaggagatcctgcggccaagacgcactctccagaaaaaaatcgaagaaatcgcggctaagtataaacactccgttgtcaaaaagtgctgctatgatggcgcttgcgtcaataacgatgagacctgcgaacagcgcgctgccagaatatccctcggacccaggtgtatcaaagccttcactgagtgttgcgtggtggcatcacaactcagagccaacattagccataaagatatgcagcttgggaggctccatatgaaaaccctcctcccagtgtccaagcccgaaatcagatcttactttccagagagttggttgtgggaggttcacctcgtgcccagaagaaagcagctacagttcgcccttcccgatagtctaacgacgtgggagatacaaggtgtgggaataagtaatacagggatctgcgtggccgacacggttaaggcaaaggtgtttaaggatgttttcttagaaatgaacatcccgtactcggttgtgaggggtgaacagattcagctgaaaggcactgtgtataactacaggacctcaggtatgcagttttgtgtgaaaatgtccgctgtcgagggcatttgcacctcagagtcgcccgtgatcgaccaccagggaactaaatccagcaaatgcgttaggcagaaggtcgaaggcagcagcagccacctagtgacatttaccgttttgccgttggagattgggctgcataacatcaacttctctttggagacctggttcggtaaagagatactcgtaaagacactccgtgtggtaccagaaggggtcaagcgcgagagctattcaggtgtgaccttggaccctaggggtatctacggtactattagtaggcggaaggagttcccatacagaatccccttagacctcgtcccgaagaccgagattaaacgaatcttgagtgttaagggccttctggtcggcgaaatattgtccgctgtgctcagtcaagaaggaataaatattctgacccacctgcctaaaggctctgcagaggcagagctgatgtctgtagtgccagtcttttacgtattccctggcaaccgcaaatctctcgaacatttctccttttag

SEQ ID NO: 219082 - DNA, 2805 bp, synthetic construct
  misc_feature 1..2805: note = Description of Artificial Sequence: Synthetic coding sequence
  source 1..2805: mol_type = other DNA
atggctcgacgtagcgtgctgtatttcatcctgctcaatgctcttattaacaaggggcaggcttgcttttgtgatcactacgcctggacacagtggacctcatgcagcaagacatgcaattctggcacacagagtcgacatagacagattgtggttgataaatattaccaggagaatttttgcgagcagatctgttccaaacaggaaacccgtgaatgtaactggcagcgctgcccaataaattgtctactcggcgattttgggccttggtctgactgtgacccttgtatcgaaaaacaatccaaggtcagaagcgtcctcaggccgtcgcagttcgggggacaaccgtgcaccgcgccactcgttgcctttcagccgtgcatcccctccaaactgtgcaaaatagaagaggccgactgcaagaacaaatttaggtgcgactcaggcaggtgcattgctcgcaaacttgaatgcaatggcgaaaacgactgcggtgataattcggacgaacgtgactgcgggaggaccaaagcagtgtgcacacggaagtacaaccccatcccgtctgttcagctcatgggtaacggttttcacttcctagccggtgagcccagaggcgaagttctggacaactccttcaccggcggtatatgcaagactgtgaagtcttcccgtacctcaaacccatatcgcgttcctgccaatctggagaacgtgggctttgaggtccaaactgccgaagacgatctgaagactgacttctacaaggaccttaccagtctgggccacaacgaaaaccagcagggctccttttccagtcagggaggttctagcttctctgtgccaatcttttacagcagcaagagaagcgagaatatcaaccataatagcgcattcaagcaagcaatccaagctagccacaaaaaggattccagtttcatccggatacataaagtcatgaaggtgctcaattttacaaccaaagccaaagatttacacctcagtgatgtgtttctcaaagctctgaatcatctgccattggagtataacagcgctctgtattcgcgaatcttcgacgacttcggcacgcattatttcacttccggctccttgggtggcgtgtatgacttgctctaccaattctcctcagaggaattaaagaatagtggcctgactgaagaggaggccaagcactgcgtcagaatcgaaacaaagaagagggtgttgtttgcgaagaaaactaaagtcgagcatcgctgcaccacaaacaagctaagcgagaagcatgagggctcctttattcagggggctgagaagagcatcagcctaattagaggagggcgttccgagtacggagcagcactcgcctgggaaaaaggttcctccggcctggaagagaaaaccttctccgaatggctggagtccgtcaaagaaaaccctgctgtcatcgatttcgaactggcacccattgtcgatctcgttaggaacataccatgcgccgtgactaagagaaacaacttgaggaaggctctccaagagtacgccgcaaagtttgatccatgtcaatgtgcaccatgtccaaataatgggcgacccaccttgagcggaacagagtgtctgtgcgtctgccagagcggtacctatggtgagaattgtgagaaacagtcaccggactataagagcaatgctgttgacggccaatgggggtgttggagctcctggtcaacatgcgacgcaacgtataaacggtcccggacgcgggagtgtaataaccctgccccacagagaggaggtaagcggtgcgagggcgagaaacgccaagaggaagattgcacgttttccatcatggaaaataacgggcagccctgcatcaatgatgacgaagagatgaaagaggtagatctgcctgagatcgaagcagactcaggctgtcctcagcccgtccctccagagaacgggtttatcaggaacgagaaacagctctacctcgtgggcgaagatgtggaaatcagttgcttgacagggttcgaaacagtcggataccagtattttaggtgcctccccgacggcacttggaggcagggagatgtagagtgccaacgcactgagtgcatcaagccagtagtgcaggaggtcctgacaattacaccgttccagaggttatatcgaatcggcgaaagtattgaattaacatgtccgaaagggttcgttgtcgcaggcccaagccggtacacgtgtcaaggcaactcctggacgcctccgatctctaatagcttgacctgtgagaaggatactcttacaaaacttaagggccactgccagttagggcagaaacagagtggctctgaatgcatctgtatgtctccggaagaagactgcagccatcactctgaggatctctgtgtgttcgacaccgacagcaacgactactttacatccccggcttgcaaattcctcgccgagaaatgcttgaacaatcagcaactgcactttctgcacattgggtcttgtcaggatgggcgacaactcgagtgggggctggaacgcacgcgcttgtccagcaactctactaaaaaagaatcatgtgggtatgacacctgctatgattgggaaaagtgctccgcctccacatctaagtgtgtgtgtctgttaccaccacagtgttttaaaggcggaaatcagctatactgtgtcaaaatggggagcagtacctcagagaagacccttaatatctgtgaagtaggaacaatcagatgtgcgaaccgaaagatggagatccttcaccccggaaagtgtctcgcatag

SEQ ID NO: 219083 - DNA, 2805 bp, synthetic construct
  misc_feature 1..2805: note = Description of Artificial Sequence: Synthetic coding sequence
  source 1..2805: mol_type = other DNA
atggcacgtcgctctgtgctgtactttatcctgcttaacgccctgatcaacaaaggacaggcctgtttctgcgaccactatgcctggacacaatggacttcctgctccaagacgtgcaatagcgggacacagagccgccataggcagatcgtggtcgataaatattatcaagaaaacttctgcgagcagatttgcagtaaacaagaaacgcgtgaatgtaactggcagcgttgccccataaactgcctgcttggtgacttcggcccatggtcagattgcgatccatgtatcgaaaagcagagcaaagtgcggtctgtccttaggccaagccagttcggaggacagccgtgtaccgccccacttgttgcatttcagccttgcatccccagcaaactgtgcaaaatcgaagaagccgactgtaaaaataaattccgatgcgactctggccgttgcatagcgcgtaagctggagtgtaacggagagaatgattgcggagataatagtgacgaaagagactgcggaaggactaaggcagtctgtaccaggaagtataatcctataccgtctgtccagctgatgggtaacggcttccactttctcgcaggggagcctagaggcgaagtccttgacaactcattcacgggtgggatctgcaagaccgtgaagagcagtcgaaccagcaacccatatcgggtacctgctaatctggagaatgtaggtttcgaggtccagacagcggaggatgacctcaagaccgacttttacaaagatctgacgagtttaggtcacaacgagaaccagcagggatcgttctctagtcaaggaggtagcagtttctccgtgcctatcttttatagtagcaagaggtctgaaaacattaaccacaacagtgccttcaaacaggctatccaagcctctcacaagaaagacagtagctttatccgcattcataaggtcatgaaagtattaaacttcacgacgaaggctaaggacctccatctcagtgacgtattcttaaaggctctgaatcatctgccgcttgagtataactctgctctttattcgagaattttcgacgacttcggcactcactactttacaagcggatctctcggtggtgtgtatgatctgttgtatcagtttagcagcgaggagctgaaaaattcaggattgacagaggaagaggctaaacactgtgtccgcatagagaccaaaaaacgtgttctgttcgccaaaaagacaaaggtggaacacagatgtacaactaacaagctcagcgagaagcacgagggttctttcattcagggagctgagaaaagtatcagcctgatccgcggtggaaggagcgagtacggggctgcactggcatgggagaaggggagctccgggcttgaggagaagacgttctcggagtggctggagtccgtaaaggagaaccctgccgtgattgatttcgagctggccccaatcgtggacctggttagaaacatcccttgtgcagtgacgaagcgcaataatctccgcaaagccctgcaagaatacgcagccaagtttgacccttgtcagtgtgccccatgtccaaataatggccgtccaacactgtcaggcacagagtgtctgtgcgtctgccagtccgggacctacggggaaaactgtgagaagcagagccctgactataagtccaacgctgttgacggccagtggggctgttggtcatcatggagcacgtgcgacgctacttacaagcgtagccgtacccgggagtgtaacaaccctgcaccacagaggggaggaaaacggtgcgagggtgagaagcgtcaggaggaagactgcacattttcaatcatggagaataacggccaaccctgtataaacgacgacgaagaaatgaaagaggtggatctcccagagattgaggcagactccgggtgtccgcagcccgtcccaccggaaaacggcttcattcgcaatgaaaagcagttatatttggtgggagaggacgtcgaaatctcttgtctgaccggttttgagactgtggggtaccagtactttcgatgcctgccagatggtacctggcgccaaggtgatgtcgaatgtcagcgtacggaatgcataaagccagtcgtgcaggaagtgctgaccatcacccccttccagaggctgtaccgtatcggcgagagcatcgagctgacttgtccaaaagggttcgtggtagctggcccttctcgatacacatgccaaggcaactcctggaccccgcctattagtaactccctgacctgcgagaaagacacactcactaagctcaaaggccactgtcagttgggccagaaacagagtggctccgagtgtatctgcatgtcacctgaagaggactgctctcaccatagtgaagacctctgtgtctttgacacagattccaatgactacttcaccagtccagcttgtaagtttttagcagagaaatgcctgaacaatcaacagttgcatttccttcatatcggttcctgtcaggatggaagacagctcgaatggggtctggagaggacccggctctcctcaaactcaaccaagaaggaatcttgcggttacgatacatgctacgactgggagaaatgcagcgcttcaacgagcaaatgcgtgtgcctgctgccccctcaatgctttaagggagggaaccaactgtactgcgtgaaaatgggttcttctacatcagagaaaactttgaacatctgcgaagttggtaccatccggtgcgccaataggaagatggaaatcctgcatcctgggaagtgtctggcgtag

SEQ ID NO: 219084 - DNA, 2532 bp, synthetic construct
  misc_feature 1..2532: note = Description of Artificial Sequence: Synthetic coding sequence
  source 1..2532: mol_type = other DNA
atgaaagtcatcagcctgtttatcttggtcggcttcataggcgaattccagtctttttctagtgccagctccccagtgaactgtcaatgggacttctacgctccttggtcggagtgcaacggctgcacgaagacccagactcgtcgaaggagcgtggctgtttatggtcaatacggcggtcaaccatgtgttggtaatgctttcgagacacagagttgtgagcctacccgcggatgccctaccgaggagggttgcggggagaggtttcgctgtttctccggacagtgcatttccaagagcctggtgtgtaatggagacagtgactgcgacgaggattccgcggatgaggaccgctgtgaggactccgagcgacgaccaagttgcgacatagacaagcctccacctaatattgagctgaccggcaacggctacaatgagctgaccggccagttcagaaatcgcgtgatcaatacaaagtccttcggcggtcagtgtcggaaggtgttttcaggtgatggcaaagatttttatcggttgagtggaaacgtcctcagctatactttccaggtgaaaatcaacaatgacttcaattacgaattctacaactccacttggtcgtacgtgaaacacacaagcacagaacacacaagcagctcacggaagaggagcttcttccgaagcagcagtagtagttcaaggagctataccagccacaccaacgaaattcacaaaggaaagtcataccaattgctcgtcgttgagaacacagtggaagtcgcccaattcatcaataacaacccggagtttctccagctcgccgaaccattttggaaagagttgtctcatctcccttctttgtacgactactctgcttacaggcgtctgatcgatcaatatggaacccactatctccagtcagggagcctgggaggggagtatagagtcctattctatgtggactctgaaaaacttaagcaaaatgattttaacagcgttgaggagaagaagtgcaaatcgtcaggttggcacttcgtagtgaaatttagtagccacggttgcaaggagctagaaaatgctctgaaggctgcgagtggtacgcagaataatgtgctgaggggtgaacctttcatcaggggaggcggtgccggatttatttcaggtttgtcctacctggagctggataatccagcgggaaacaagcgacgttactctgcatgggcagagtctgttaccaacttgccacaggtcatcaagcaaaaactcacgcccctttacgagcttgtcaaggaggtgccctgcgcatcagtcaagaaactctatctgaaatgggcactggaagaatatctggacgaattcgacccctgccactgtcgaccttgtcaaaacgggggactcgcgacagtggagggcacccactgcttatgccattgtaagccctatacgttcggtgctgcgtgtgaacagggcgtgcttgtgggcaatcaggctggaggggtggatggtgggtggtcttgctggagttcatggagcccttgcgtccaggggaaaaagacccggtccagagagtgcaacaatcctcccccatcaggcggaggtcgttcctgcgtgggagaaactactgagagcactcagtgcgaggacgaagaactggaacatctgcgactgctcgaacctcactgttttccactctccctcgtgccaactgaattttgtccttccccccctgcactgaaagacggattcgtacaggacgaaggaactatgtttcctgtgggcaaaaatgtagtgtacacatgcaacgagggttattccctgataggtaatcccgtagcacgctgcggagaggatcttagatggctagtgggtgagatgcactgtcagaaaattgcctgcgtgttaccagtgcttatggacggaatccagtcccaccctcaaaaacccttctatactgtcggggagaaggttacagtaagctgcagcgggggaatgagcttggaggggcctagcgcctttctgtgtgggtccagcctgaagtggtcacctgaaatgaaaaacgctaggtgcgtccagaaggagaatccactcacacaagccgtaccgaagtgccagaggtgggagaaattacagaacagcagatgcgtgtgcaagatgccttatgagtgcggcccatcattagacgtttgtgctcaagatgaaagatcaaagaggattctgccactcaccgtgtgcaaaatgcacgtcctgcactgccagggtcggaactatactctgactgggagggactcatgcaccttgccagcaagcgccgagaaagcctgcggggcatgccccctgtggggcaagtgtgatgccgagtcatccaagtgtgtgtgtcgagaagccagtgagtgtgaagaagagggtttctcgatatgtgtggaagtaaacggcaaggagcagactatgtccgaatgcgaagccggagccctgcgatgtaggggccagtcaattagcgtcacatctattcgcccttgtgcggctgagacacagtag

SEQ ID NO: 219085 - DNA, 1461 bp, synthetic construct
  misc_feature 1..1461: note = Description of Artificial Sequence: Synthetic coding sequence
  source 1..1461: mol_type = other DNA
atgaaggtcatttcgctgtttatcctggtaggcttcatcggcgaatttcaatccttttcaagcgcttcctctcccgtgaactgccaatgggacttctatgcaccttggagcgagtgcaatggctgcacaaaaacccagaccaggcgcaggtccgtagcggtgtacggccagtacgggggacaaccctgtgtgggcaatgccttcgaaacccagagttgtgaacccaccagaggttgtcctaccgaggaaggctgcggggaacgctttagatgtttttccggccagtgcatctctaaatctttggtgtgtaatggagactctgactgtgatgaggacagcgcggatgaagatagatgtgaggatagcgagagacgcccatcctgtgatatcgataagccaccgcctaacattgagcttactgggaacggttacaacgagctcacggggcagttcaggaaccgggtgctgttttacgttgattcagagaagctcaagcaaaatgacttcaactcagtcgaagaaaaaaaatgcaagtctagcggatggcacttcgtcgtcaagttctcatcacatggctgtaaggaactggagaacgccctcaaggcagccagcggtacgcaaaataacgtgctgcggggtgaaccattcatccgaggaggtggcgctggctttatttctggcctttcctatctggagctggacaatcctgccggaaataaacgtcgatactccgcctgggccgaatccgtgaccaaccttccccaggtcatcaagcagaaactgacccctctgtacgaacttgtgaaggaggtgccctgcgccagcgtgaaaaaactctacctgaaatgggcccttgaagagtacctggatgagttcgatccgtgccattgtaggccgtgccagaatggcggtctggctactgttgagggcactcactgtttgtgccattgcaagccttacaccttcggcgctgcttgcgaacagggagtcttagtcggaaaccaagccggaggggttgacggcggatggtcttgttggagctcttggtccccctgcgtccaggggaagaagacccgctctagagagtgcaacaatccccctccaagcggaggaggacgctcttgcgtcggagagacaactgaatcgacacagtgtgaagacgaggaactggagcacctccggttgctagagccgcattgttttccactgagccttgtgcccacagagttttgtccctccccacccgctcttaaggacgggttcgtccaggacgaggggactatgtttcctgtgggcaaaaacgtcgtctatacatgtaatgaggggtattctcttattggcaacccagtggcacgatgcggggaagatctgcgttggctggtgggggagatgcactgtcagaacgggaagatctcaaactggatgaaggtaaacgagaccttacttgtggagcaccactag

SEQ ID NO: 219086 - DNA, 1032 bp, synthetic construct
  misc_feature 1..1032: note = Description of Artificial Sequence: Synthetic coding sequence
  source 1..1032: mol_type = other DNA
atgaaggtgatatcgctcttcatcctagtgggttttattggcgagtttcagagcttctcatctgctagctcacccgtgaattgccagtgggatttttacgctccatggagcgagtgtaacggctgcactaaaacacagacacgccgaagaagcgtggctgtttatggccaatatggcggacagccttgcgttggaaatgcgttcgagacccaatcctgtgaacccacccgtggttgccctactgaggagggttgcggagaacgattcagatgtttcagcggtcagtgcattagtaagtccttagtgtgcaatggtgactcagattgcgacgaggactccgccgacgaggataggtgcgaggactctgaacgtcgcccaagttgtgacatagataagcctcctcctaatattgagcttactgggaacggctacaacgaattgactgggcaattccgaaatcgcgtgatcaacacaaaaagcttcggaggacagtgtcggaaagtgttcagtggcgacggcaaagacttctaccggttatcaggtaacgttctgagttataccttccaggtgaagattaacaatgattttaactacgaattttataactctacatggagctacgtcaaacatacatccacagaacatacgtcttcatctcggaaacggtccttctttaggagctcctcatcctcttcacgcagttatactagccataccaacgagatccataagggaaagagttaccagcttctcgtggttgaaaatacagtcgaggtggcccagttcatcaataataatccagaattcctccagctggccgaacccttttggaaggagctctctcacctgccatctctttacgattactcagcttaccggagattaatagaccagtatggcacacactatctgcagagcggttcattagggggagagtatcgagtgctgttttatgtggactccgagaagctgaagcagaacgacttcaattctgtcgaaaaaaagaaaaagaagaaaaaaaagaaaaaatag

SEQ ID NO: 219087 - DNA, 1755 bp, synthetic construct
  misc_feature 1..1755: note = Description of Artificial Sequence: Synthetic coding sequence
  source 1..1755: mol_type = other DNA
atgttcgccgttgtgtttttcatactgagcctgatgacttgccagcccggagtcacggcccaggagaaggtgaatcagcgcgttcgacgtgcagcaacacctgctgccgtgacatgtcagctatccaattggtcagaatggacagactgtttcccttgccaagacaagaagtaccgacacagatctctgttgcagccgaacaaattcgggggaaccatatgttcgggggacatatgggaccaagcttcgtgcagctcctcaactacctgcgtacggcaagcgcagtgtggacaagacttccagtgtaaggagaccggcaggtgcctaaagcgccatctcgtgtgcaacggagatcaagattgccttgacggttcagatgaggatgactgtgaagatgttagagcgatagatgaagattgtagccaatatgagccaatcccaggctcccagaaggccgcactgggttataacatcctcacgcaggaagatgcccagtccgtgtatgacgcgtcgtactatggcggacagtgtgaaactgtctacaatggggagtggcgagagttgcggtatgatagtacgtgcgaaagactgtattatggggatgacgagaaatatttcaggaagccttacaatttcctcaaataccactttgaagctttggctgacactggaatttcaagtgagttctacgataatgcgaatgatttactgtccaaggtgaaaaaagacaaatccgatagctttggggtcacaattggcatcggaccagccggatctccattgctcgtgggtgttggcgtaagtcactcacaagatacatcgttcctgaacgagctaaataagtataatgaaaagaaatttatctttacccgcatctttaccaaagttcaaacagctcattttaaaatgaggaaggatgacatcatgctagatgaaggtatgctgcagtccttaatggagctcccagatcagtacaattacggcatgtacgcaaaattcataaacgattatggcacccactacattaccagtggttctatgggtggaatttatgagtatattcttgttattgataaagccaagatggaatcgctggggattacaagcagggacattaccacatgcttcgggggttctctcggaatccagtacgaagacaagatcaatgtgggaggcggactgagcggagaccactgcaagaagttcggaggtggaaagacagaacgcgcaagaaaggctatggccgtcgaagatattattagcagagtgcggggaggctcatccggctggtctgggggactcgcccaaaaccgctctaccatcacgtacaggagctggggccgatccctaaagtacaaccctgtcgtgatcgatttcgagatgcagcctatccatgaagtgcttcggcatacaagtttgggccctttggaggcgaaacgtcagaatctaaggcgggcattggatcagtacctgatggaattcaacgcttgccggtgcggtccatgctttaacaatggcgtgccgatattagaaggaacatcctgtagatgccagtgtcgcctgggctctttgggtgctgcctgcgagcagacgcagaccgagggtgccaaggccgatggttcttggtcatgttggtcctcatggtcagtgtgcagggccggaattcaagagcgaagacgggagtgcgataatcccgcaccccaaaatgggggtgcgtcgtgcccgggtcggaaagtgcagacccaggcatgctag

SEQ ID NO: 219088 - DNA, 1776 bp, synthetic construct
  misc_feature 1..1776: note = Description of Artificial Sequence: Synthetic coding sequence
  source 1..1776: mol_type = other DNA
atgaagaatagccgcacctgggcttggagagccccagtcgagctgtttttgctgtgtgctgcactaggctgcctgtcacttccgggttcccgcggagagagacctcactcattcgggagcaatgccgtgaataagtcctttgcaaaaagtcgtcagatgagatcagtggacgtgacactcatgcctattgactgtgaactcagcagttggtcaagctggaccacgtgtgatccctgccaaaagaaaaggtatcgctatgcgtatttgctgcaaccttcccagtttcatggagaaccgtgcaatttctccgacaaagaagtggaggactgcgtcaccaaccgtccatgtggctcacaggtccggtgtgaggggttcgtgtgcgcccaaacagggaggtgtgtgaatagaagactcttgtgtaatggcgacaacgactgtggcgaccaaagcgacgaggctaattgccgcagaatttataaaaagtgccagcatgaaatggatcagtactggggcattggcagtctggccagtggtattaatctcttcacaaactcctttgagggtccagtgcttgatcatcggtactatgctgggggatgttccccacattacattctgaacacccgtttccgaaagccttacaacgtcgaatcgtacacgcctcagacacagggaaagtacgaattcatacttaaggagtatgaaagctatagtgacttcgaacgcaatgtcaccgagaagatggcctcaaagtcaggcttttctttcggcttcaaaatccctgggatcttcgaactgggcatatcttcgcagtccgacaggggaaagcactatattcggcgaacgaagaggttctctcatacaaagagtgtgtttctccatgctcgttctgatttggaagtggcccattacaaactgaagcccagaagcctcatgctccattatgaattcttgcaacgggtcaagcgcctcccactagagtactcatacggtgagtatcgggacctcttccgggatttcggtacccattatattaccgaagcagtgctcggaggcatttacgagtatacgctggtgatgaataaggaggcgatggaaaggggggactatacactgaataacgtgcatgcgtgcgcgaagaatgactttaagattggcggtgctattgaggaggtttacgtgtccctgggggtatccgttgggaaatgtcgcggaatccttaacgagatcaaagacagaaataagagggatacaatggtggaagatctggtcgttctggtgcgcggtggtgctagtgaacatattactacgttagcttaccaagagctgcccacagccgatcttatgcaagaatggggcgacgcagtgcaatacaatccagccatcatcaaagtgaaagtcgaacccttgtacgaactggtgactgccacggacttcgcatactcttctacagtgcgccagaacatgaaacaggccttggaggagtttcagaaagaagtatcaagctgtcactgcgccccatgtcagggtaatggggtaccagtgctgaaaggcagtaggtgcgactgcatctgcccagtgggaagccaggggttggcatgtgaggttagttatagaaaaaatacccccattgacgggaagtggaactgctggagcaattggtcatcctgctctggtcgccgaaagactaggcaaagacagtgcaacaatccaccaccacaaaatggcggaagcccatgctctgggccagcgtccgagactctggactgctcctag

SEQ ID NO: 219089 - DNA, 1590 bp, synthetic construct
  misc_feature 1..1590: note = Description of Artificial Sequence: Synthetic coding sequence
  source 1..1590: mol_type = other DNA
atggatacatgcatgaccctggccttcacactcagcgggaggttcttcatgctactgagtcaatacagatacgcctacctgctgcagccctcccagtttcacggcgagccgtgcaatttctcagataaggaggtggaagactgcgtcacaaatcgcccttgtggaagtcaggttagatgcgaaggattcgtttgtgcccagactggaagatgcgtcaatcggcgtctgttgtgtaatggcgataatgattgtggagatcagtctgatgaggctaattgccgcagaatttacaagaaatgtcagcacgagatggatcagtattggggcattggtagcctcgcttcgggtattaatctgttcaccaactcttttgagggtccggtcctcgatcacagatactacgcagggggatgctcgccacactacatcctcaacacacgcttccggaaaccctacaatgttgagagctacacaccccagacccagggcaaatacgagtttatcctgaaagagtatgaaagttactccgactttgagagaaacgtgacagaaaaaatggcatctaagtcaggattttcattcgggttcaagatccctgggattttcgagctgggcattagttcacagtcagacagggggaagcattacatccgacgaactaaacgattttcccacacaaaatctgtgtttctgcatgccaggagcgacctggaggtggcccactacaagttaaagccaaggagcctcatgctgcattacgaatttctccaaagagtcaagagactgccgctcgagtatagttatggagagtatcgagatctgttccgggacttcggcacacattatatcaccgaagccgtgttgggcggtatttacgagtacacgctcgtgatgaacaaggaggcaatggaacggggagactacacactcaacaacgtgcacgcctgtgcaaagaatgatttcaaaatcggcggagcaatcgaagaggtttacgtctccctgggagtgagtgttggaaaatgtcggggaattctgaacgagatcaaggaccggaataaacgcgacacaatggttgaagatcttgtagtgctcgtacgtgggggagcctccgagcacataacgactctcgcctaccaggagctaccaaccgccgacctcatgcaggagtggggagacgcggtccagtacaatccagcaattatcaaggtaaaggtggagccactttatgagttggtgaccgcgacggatttcgcctactcatctacagtacgtcaaaatatgaagcaggctcttgaagagtttcaaaaagaagtatcatcctgtcactgtgccccatgtcagggtaacggggttcccgtacttaagggcagccgatgcgactgtatctgtcccgttggaagtcaaggtctcgcctgtgaagtgtcgtaccgcaagaatacaccgatagatggaaagtggaattgttggtctaattggtcatcctgctcaggacgtcgcaagaccagacagcgacagtgcaataacccccctccccagaatgggggaagtccatgtagcggtccagctagcgagacgctcgattgttcctag

SEQ ID NO: 219090 - DNA, 1620 bp, synthetic construct
  misc_feature 1..1620: note = Description of Artificial Sequence: Synthetic coding sequence
  source 1..1620: mol_type = other DNA
atgagatcagtggatgtgacactcatgccgatcgactgcgagctcagcagctggagttcatggaccacctgtgacccctgccagaagaaacgatatcgctacgcatacctgctgcagccttcccagtttcatggggagccctgtaacttctcagataaggaagtcgaggattgcgttacaaatcggccttgtgggtcccaggtgcgatgcgaggggttcgtttgcgcccagacaggtagatgtgtgaatcgacggctgttgtgtaatggagacaacgattgcggtgatcagtccgacgaggctaattgtaggcgcatatacaaaaagtgccagcacgaaatggaccagtattggggcataggcagtcttgctagtggaattaatctctttacaaacagttttgagggccctgtgctggaccatcgttactacgcaggagggtgttcccctcattacattctgaacaccagatttaggaagccatacaacgtggaatcatatacacctcaaacacaggggaaatatgaattcatactcaaggaatacgaatcctattcagatttcgaaagaaatgtcaccgaaaaaatggcctccaaatccggttttagtttcgggtttaaaatcccgggaatctttgagttgggaatttcatcgcagtccgatagagggaagcattacatcagacgaacaaagcgatttagccacaccaagtccgtgttccttcatgcaagatcagacttagaggtggcacactacaagttgaagccacggagtctcatgcttcactacgaatttttgcagcgagtcaagcgtctcccactggaatacagctacggtgagtacagggacctctttagggatttcgggacacactatataactgaagcagtgcttgggggaatatacgagtacaccttggtgatgaataaggaggctatggagagaggcgattacaccctgaataacgttcacgcctgcgccaagaatgactttaaaattgggggagccatcgaggaggtttacgtgagcttgggagtgagcgtgggcaaatgccgtggaatcctgaacgagatcaaagaccgaaataagcgcgatactatggtggaggaccttgtggtgctggtgaggggtggcgcatctgagcacattaccactttggcctaccaggagttacctactgccgatcttatgcaggaatggggagacgccgtacaatacaatcccgctattatcaaggtcaaggtggaacccctctacgaactggtcacggccacagattttgcttactcaagcaccgttaggcaaaacatgaaacaggcactggaagaatttcagaaagaagttagttcatgccattgcgccccttgccagggaaatggtgtccccgtgctcaagggaagccggtgcgactgcatatgcccagtcgggagccaggggcttgcctgtgaggtgtcataccgtaagaacaccccgattgacggcaagtggaattgttggagcaattggtcctcatgttccggtaggaggaagaccaggcaacgccagtgtaacaatccccctccgcagaatggtggaagcccgtgttctggtcccgcttctgaaacgctggactgctcttag

SEQ ID NO: 219091 - DNA, 675 bp, synthetic construct
  misc_feature 1..675: note = Description of Artificial Sequence: Synthetic coding sequence
  source 1..675: mol_type = other DNA
atggccacacatcacaccttgtggatgggactggcgctcctaggtgtcctgggggacctgcaggccgcacccgaagctcaggtctctgttcagcccaactttcagcaagacaagttcctgggacgctggttctcagctgggctcgcctctaatagctcctggcttagagagaagaaggctgccctctctatgtgcaaaagtgtggtcgcaccagccacggatggaggcctaaatctaacatccacatttctcaggaaaaatcaatgcgagactcggaccatgctgctgcagcccgctggtagcctcggctcatactcgtaccgctctccacgagagtggggccttcaccggcctccaggtccctcactgggagccacactggcaggaacaacactgggccagcccccagccgctgagatacacggagtcggggactggggaagcacctatagcgtttccgttgttgaaacggactacgatcagtacgcgctgctctactcccaaggatcaaaaggtccaggggaggatttccgtatggccaccttatattccaggacgcaaacacccagggccgaactcaaagagaagtttaccgctttttgtaaggcccaggggttcaccgaggacacgatcgtcttcttaccacagacagacaagtgtatgaccgaacaatag

SEQ ID NO: 219092 - DNA, 495 bp, synthetic construct
  misc_feature 1..495: note = Description of Artificial Sequence: Synthetic coding sequence
  source 1..495: mol_type = other DNA
atgcttccgcctggaaccgcaactttgctgaccttgctactagccgctggttctttaggacaaaagcctcagagacctagacgtcccgcaagccctatcagtacaatccagccaaaggccaatttcgatgcccaacagttcgcagggacatggctcttggttgccgtgggcagcgcgtgccggttccttcaagagcagggacacagagctgaggcaacaactctccatgtcgctcctcaggggaccgcaatggccgttagtaccttcaggaaactcgatgggatttgttggcaggtacggcaattgtacggcgacaccggcgtgctgggtagatttttactgcaggcgagagatgcaaggggtgcagtgcatgttgtggtcgctgagacggactaccagagttttgcggttctgtatcttgagagagctggtcagttatctgtgaagctctacggtgcgcagggtgtggtcactgatagacccggagtgggatag

SEQ ID NO: 219093 - DNA, 1680 bp, synthetic construct
  misc_feature 1..1680: note = Description of Artificial Sequence: Synthetic coding sequence
  source 1..1680: mol_type = other DNA
atgagcgcctgtagaagcttcgctgtcgcgatttgtatactcgagattagcattctgactgcccagtacacaacgtcttacgaccctgaactgaccgaatcttcaggatccgcctctcacatcgactgcaggatgagcccatggagcgagtggtctcagtgtgatccatgcctccgccaaatgttccggtctaggtcaatcgaggtcttcggccagtttaacggaaagagatgcacagatgccgtcggagatcggcgacaatgcgtccctactgagccttgcgaggacgccgaggacgactgcggaaatgacttccagtgtagcacgggacgctgcattaagatgagactgcgctgtaacggggacaacgactgcggggatttctctgatgaagatgattgtgaaagcgagcccagacccccttgtcgagatagagtcgtcgaggagagtgaactggcgagaacagccggttatggcataaacatccttgggatggacccacttagtactccctttgataacgagttttacaatgggctttgtaatcgagacagagatggcaacactcttacttactacagaaggccttggaatgtcgcgagcctcatttacgagactaagggcgagaagaattttagaaccgagcactatgaggagcagattgaggctttcaagtcaatcatacaggagaaaacgtccaactttaatgctgctatctctttaaagttcactccaaccgagactaacaaggccgaacagtgttgcgaggagactgcgtcctccattagtcttcacgggaaaggaagtttcaggttcagttatagcaagaacgaaacttatcagctgttcctgagttactcatcaaagaaggagaaaatgtttctgcatgtgaagggcgagatccacctggggaggtttgtgatgcgcaatcgagatgtggtgcttacaaccaccttcgtggacgatatcaaagctctgcccactacctatgaaaaaggggagtactttgcatttctggagacctatggaacccattactcttcatccggatcactcggtggcctgtacgaactgatctatgttttggacaaggcctccatgaaacggaaaggagttgagctgaaagatataaaacgctgcctgggataccacttagacgtcagtctagccttctccgagattagcgttggtgctgaattcaacaaagatgactgtgtgaagcggggagagggacgagccgtaaacataacctccgagaacctgatagacgacgtggtgtcactgattagaggaggcacgagaaagtatgccttcgaactgaaggagaagttacttagaggcactgtcatcgacgttaccgattttgttaactgggcttcgagtattaatgatgcgccagtcctgatctctcagaaattgtcaccgatctacaatttagtacctgtgaagatgaaaaatgctcacctgaaaaaacagaatctggagcgtgccatcgaagactacatcaacgagttcagcgtgcgcaaatgtcatacatgccaaaatggcggtaccgtcattctcatggatgggaaatgcctgtgcgcatgcccctttaagtttgaggggatagcatgcgagattagtaaacagaagattagtgaaggccttcccgctcttgaatttcctaacgagaaatag

SEQ ID NO: 219094 - DNA, 1770 bp, synthetic construct
  misc_feature 1..1770: note = Description of Artificial Sequence: Synthetic coding sequence
  source 1..1770: mol_type = other DNA
atgggatcgaatctgtctccgcaactgtgcctcatgcccttcatactgggactactttccggcggagtgactaccacaccgtggtctctcgctcaacctcaaggttcgtgttccctggagggcgtagaaattaagggaggttcttttcgcctgctccaagagggacaggcgctggagtatgtgtgtcccagtggattttatccttaccccgtgcagactcgcacatgtaggagcactggaagttggtcgacactgaagacacaggaccaaaagacagtccgaaaggccgagtgccgggctatacattgcccacgcccacacgacttcgaaaatggcgagtactggcctcgaagtccctattataatgtcagcgatgagatatctttccattgttacgacggctacactctgaggggctccgccaaccgaacctgtcaggtaaatgggagatggagcggacaaactgctatctgtgataatggcgctggctactgttccaatcctggcataccgattggaaccagaaaggttggttctcagtatcggctggaagacagtgtgacttatcactgtagccgcggactcactctgcgcggaagccagcggcgtacctgtcaggaaggcggaagttggagtgggaccgaaccctcctgtcaagactcttttatgtacgataccccacaagaagtcgccgaggccttcttgtctagcctgaccgagactattgaaggcgtagatgcggaggacggacacggccctggcgaacagcagaagagaaagatagtgctagacccgagtggaagcatgaacatctatctcgtgctggacggctctgacagtatcggagcatctaacttcaccggggcaaaaaagtgtctagtgaatctcatagagaaggtggcatcgtacggcgtcaagcccaggtatgggcttgtcacctacgccacttacccgaaaatatgggtaaaggtatcggaggccgacagttcgaatgcagattgggtaaccaagcagttgaatgaaattaattacgaggatcataaactcaaatccggtactaacaccaagaaggcccttcaggcagtgtatagcatgatgtcttggccggacgatgtgcccccagaagggtggaatcgaacgagacacgtgatcatcctgatgaccgatggactgcacaacatgggcggagaccccatcacggttattgatgagattcgcgacttgctctatatcgggaaggatcgtaagaaccccagggaggattatctggatgtctacgtgttcggggtcggcccactggtcaaccaggtgaatattaatgctttggcatcaaagaaagataacgaacagcacgtctttaaggtgaaggatatggaaaacctggaggacgtgttctaccaaatgatcgatgagtctcagagccttagcttatgtggcatggtctgggagcaccgaaagggcacagactatcacaagcagccatggcaggcaaaaatttcagtcattcgcccaagcaaagggcacgagtcatgtatgggcgctgtggtaagtgaatatttcgtgctgacagccgcacattgctttaccgtggacgataaggaacactcgatcaaggtgtctgttggcggtgagaagcgggatctggaaatcgaggtggtgctgtttcaccccaactacaacatcaatggtaaaaaagaagctggaatcccagaattctacgactacgatgtggctcttatcaaactcaagaataaactgaaatatggttag

SEQ ID NO: 219095 - DNA, 1770 bp, synthetic construct
  misc_feature 1..1770: note = Description of Artificial Sequence: Synthetic coding sequence
  source 1..1770: mol_type = other DNA
atgggatctaacctcagcccccaactttgcctgatgccctttatcctgggcctgttgagcggcggagtaaccacgactccctggtcgcttgcccaaccacaagggagctgctctctcgagggtgtcgaaattaaaggaggctccttccgacttttacaggaaggtcaagcactagagtacgtgtgtccttctggattttacccataccccgtgcagaccagaacatgcagaagtacgggcagctggtctaccctcaaaacacaagatcagaaaaccgtgcggaaggccgaatgccgggcaatccattgccctcgtccacacgacttcgagaacggcgagtattggcctagatcaccttactacaacgtgtccgacgagatcagctttcactgttatgatgggtataccttacggggatcagctaacagaacctgtcaggtcaatggcagatggtctgggcaaacagccatctgcgataatggagcgggttattgttccaacccgggaattcccatcggaacccggaaggtcgggtcacagtacaggctggaagattctgtcacctaccactgcagtaggggcctgaccctccggggatcccaaaggaggacctgccaggaaggagggagctggagtggaaccgaaccgagctgtcaggattcatttatgtacgacaccccccaggaggtagctgaggctttcttaagctctctgacagaaaccatagaaggcgtagatgccgaagatggacacggcccaggagaacagcagaaacggaaaatcgtgttggacccctctggaagcatgaatatttacctcgtattggatggatccgatagcatcggggcatctaattttacgggggctaagaaatgcctggttaacctgatcgagaaagtcgcgtcatatggggtaaagccccgttatggtctggtcacctatgccacatatccgaagatctgggtcaaggtcagcgaggcggactcatccaacgctgactgggtaacgaagcagctgaatgagataaattatgaggatcacaagcttaagtccggcactaataccaagaaggctcttcaagcggtatactccatgatgtcctggcccgacgatgtacctcccgagggttggaacagaacccgtcatgtcatcatccttatgactgatggtttgcacaacatgggcggagacccaatcacagtcatcgatgaaattcgcgaccttttgtatataggcaaggatcgcaaaaatcctcgtgaggattacctggatgtatacgtgtttggagtcggtcctctggttaatcaggtgaatattaatgccctcgcatctaagaaagataacgagcagcacgtttttaaggtgaaagatatggagaacttagaggatgtgttttatcagatgatcgacgagagtcagagcttaagcctctgcggcatggtgtgggagcatcgcaagggaacagattaccacaagcagccatggcaggcaaagatctctgtgatccgtccttctaagggtcatgaatcttgcatgggtgccgtcgtaagcgaatactttgtgcttaccgcagcacattgttttaccgtggacgacaaggagcacagtattaaggtatcagttgggggtgagaaacgcgatctggagatcgaggtggtgctgtttcatcccaactacaacattaacggcaagaaagaagctggtatccccgagttttatgattacgacgttgctctgatcaaactgaagaataagctgaagtatggatag

SEQ ID NO: 219096 - DNA, 2295 bp, synthetic construct
  misc_feature 1..2295: note = Description of Artificial Sequence: Synthetic coding sequence
  source 1..2295: mol_type = other DNA
atgggtagcaatttatcaccacagttgtgcctgatgcccttcatcctgggcctgctgtcaggcggagttacgacgactccctggtccttggctagaccccaggggtcgtgcagtctggaaggagttgaaatcaagggtggctcatttcggcttttgcaggagggacaggcccttgagtacgtttgtcctagtgggttttatccgtatccagtgcagactcgtacatgtcgctctacaggatcgtggtcaaccctgaagactcaagatcaaaaaacagttcgaaaggccgagtgtagggccatccattgccccagaccgcatgatttcgaaaacggggagtactggcctaggagtccctactataatgttagtgatgagatctccttccattgctacgacggctacacactgcgtggcagcgcgaatcgaacatgccaagtcaacgggagatggagcggccagacagcgatatgtgacaatggagcaggctactgtagcaatcctggaatccctattggtactcgaaaggtgggcagccagtatcggctcgaagattctgtgacatatcattgctcccgcggacttactctccggggttcccagaggaggacctgtcaggaaggaggctcttggtcaggaacggagccatcgtgccaggacagctttatgtatgatacgcctcaggaggtggctgaagctttcctatcttctctgaccgagacaattgagggggttgatgccgaagacggacacgggcctggagagcaacagaaacggaagatagtgctcgacccaagtgggagcatgaacatttatcttgtccttgacggcagcgatagcatcggggctagtaatttcacgggggcaaagaaatgcctcgtgaatctcattgagaaggtggcatcctacggtgtaaagccgaggtatgggctcgtcacctatgccacatatccaaagatctgggtgaaagtatccgaggccgatagctccaacgccgactgggtcaccaaacaactcaacgagatcaactatgaagatcacaagctaaagtccggcacaaacactaaaaaggctctccaggctgtgtatagcatgatgtcttggcccgatgacgtccctcctgaaggatggaatagaacccggcatgtgatcatcttaatgacagacggacttcacaacatgggtggcgaccccattacagtgattgatgaaattcgtgatctgctgtatataggcaaggatagaaagaaccctagagaggattacctggatgtatacgtgttcggggtggggcctctcgtgaatcaggtaaatattaacgctctggcgtctaagaaggacaacgaacaacacgtgttcaaggtaaaggatatggagaatctggaagatgtattctaccagatgattgatgagagtcaaagcctttccctgtgcggtatggtctgggagcaccgcaaaggcacagattatcacaaacagccttggcaggccaagatatccgtgatccgcccttctaaaggccatgaatcttgtatgggagctgtggtttccgagtactttgtgctgacggctgcacactgttttaccgtggatgataaagagcattcgatcaaggtgtccgtgggaggtgagaagagggatttggagattgaggtcgtacttttccaccctaattataatattaacggaaaagaagaggctgggatacctgagttttatgactatgacgttgccctcattaaactcaagaataagcttaagtatgggcagaccatccgcccaatatgtttgccatgcactgaaggtaccacgcgtgccttgcgattaccgcctaccactacctgccagcaacagaaagaagagttgctgcccgctcaggacatcaaggctcttttcgtgagcgaagaggaaaaaaaactgacccgcaaggaggtgtatatcaaaaacggcgacaagaaagggtcatgcgagagagacgctcagtacgctcccggatatgacaaagtaaaagacatttcagaggtcgtaacgcctcggttcctttgcacaggaggtgtctcaccatatgccgatccaaatacctgcagaggtgactctggcggaccactcatagttcacaagcgctctaggttcatccaagtaggcgtgatttcctggggcgtggtggacgtctgtaagaaccaaaaacggcaaaagcaagtgccagctcacgccagggacttccacatcaatttattccaggtactaccctggctgaaagaaaagttacaggatgaggatctgggcttcctttag

SEQ ID NO: 219097 - DNA, 2295 bp, synthetic construct
  misc_feature 1..2295: note = Description of Artificial Sequence: Synthetic coding sequence
  source 1..2295: mol_type = other DNA
atgggaagcaacctctcaccccaactgtgtttgatgcccttcatactgggcctactttctggcggtgtcaccactaccccatggtccctggcaagaccccagggaagctgtagtctggaaggcgtcgaaatcaaggggggaagtttccgtctgctgcaggagggacaagcgcttgagtacgtgtgccccagtggtttttacccctaccccgtccagaccagaacatgccgctctaccgggtcttggtctaccctgaagactcaagaccagaaaacagtgagaaaggctgaatgccgtgcaatccactgccccaggcctcatgattttgaaaatggcgagtactggccgaggtctccctattataatgtgagcgacgagatatcttttcactgctacgacggatacaccttgcgaggatccgcaaaccgcacctgtcaagtaaatggcaggtggtccggtcagacagctatatgtgacaatggtgctgggtactgttccaaccccggtatcccaattggaacaagaaaggtggggtcacaataccggctagaagacagtgtgacataccactgctcccgcggactgactctgcggggttcccaacggagaacctgtcaagagggcggtagctggagtggaacagaaccgtcctgtcaggattcattcatgtacgacacgcctcaagaggtggctgaggccttcctgagcagcctgacagaaacaatcgaaggtgtggacgctgaagatggacatggtcctggagagcagcagaagagaaaaattgttctggacccctcaggttcaatgaacatttatctggtgctcgatggctctgattcgattggcgcatccaactttacgggagctaaaaagtgcctggttaacttaatcgagaaagtcgcctcatatggcgtcaaaccacgctatggcctggtgacatacgccacttacccaaaaatttgggtgaaggtgagcgaggccgattcttcaaatgccgactgggtaacaaagcagcttaatgagatcaactatgaggaccataagctgaagagcggcacgaacaccaagaaggcactgcaggcggtatattccatgatgtcatggcctgatgacgtgccgccagagggctggaataggactcgccacgtaataatcttgatgaccgatgggctgcacaatatgggaggagaccccatcacggttatcgacgaaataagggatttactttatatcgggaaagataggaaaaatccgagagaagattacctcgacgtgtatgtgttcggagtaggccctctagtaaatcaggttaacatcaatgcattggctagtaaaaaagacaacgagcagcatgtctttaaggtaaaggacatggagaatctggaagacgttttctaccagatgatagacgagagccaatccctcagcctgtgcggcatggtatgggagcacaggaaaggaaccgactatcacaaacagccctggcaagcaaagatatcggtgattcgcccttcgaagggtcacgagagctgtatgggggctgtggtatctgagtactttgtgctaacggccgcacactgtttcacggtggacgacaaagagcacagcatcaaagtgtcagttggcggagagaagagagacctggaaatcgaagtggtgctgttccatccaaactataacataaatgggaaaaaggaagctggcattccggagttctatgactatgatgttgcactgatcaaactgaagaataaacttaagtacggacagacgatcagacccatatgcttgccctgtaccgaggggaccacacgagctctgaggctacctcccactactacatgccaacagcagaaggaggagcttttgcctgcccaggatattaaggcattgttcgtctccgaagaggagaagaagcttaccagaaaagaggtgtatattaaaaacggggacaagaaaggttcttgcgagagagatgcacagtatgcccctgggtacgacaaggtgaaagatatcagtgaagtggttacgcctaggtttctttgcacaggcggagtgtccccctacgcagaccccaatacttgtagaggagacagcgggggtcccctgatcgtccacaaacggagccgttttatccaggtcggcgtgatcagttggggagtggtagacgtctgtaagaaccagaaaagacaaaagcaagtcccagcccacgcccgagacttccacattaacttgttccaggtgttgccttggctgaaggaaaaactacaggatgaggatctgggatttctgtag

SEQ ID NO: 219098 - DNA, 2295 bp, synthetic construct
  misc_feature 1..2295: note = Description of Artificial Sequence: Synthetic coding sequence
  source 1..2295: mol_type = other DNA
atgggatccaatctctcccctcagctctgcctcatgccttttattttgggcctcctgtccggaggtgtaaccactaccccgtggagcctcgcaaggccccagggttcctgctctctggaaggggtcgaaatcaaaggcggaagctttagactgttacaggagggtcaagctttagagtacgtatgcccgagtgggttttatccataccctgtgcaaacacgcacttgccgctccacgggttcatggtccactttgaagactcaggatcaaaaaaccgtccgaaaggccgaatgccgcgctatccactgcccacggcctcacgatttcgagaacggagaatattggccaagatctccgtattacaacgtgtctgacgaaatttcttttcactgttatgatggatatactctgcggggatcggcgaaccggacatgccaggtcaacgggagatggagtggccagactgcgatttgtgacaacggcgctgggtactgcagcaaccccggtattcccattggaacccgcaaggtaggctctcagtatcgtctggaagatagcgtgacttatcactgctctcgcggtttgacacttcgcggtagccagagacgaacctgccaggaaggaggcagctggtcaggtactgagcccagctgtcaagacagttttatgtacgacactccccaggaagtcgccgaggcatttctgtctagcctcacggagactatcgaaggtgtggatgctgaggacggtcacggccctggagaacaacagaagcgaaagatcgtactcgacccaagcggaagcatgaacatttatcttgtgttagatggctctgactccataggagcgagcaatttcactggagcgaaaaagtgtctcgtgaatctcatcgaaaaagtggcgtcttacggcgtcaagcccaggtacgggttagtgacatacgctacctatccaaaaatttgggtgaaggtcagtgaggcagattcaagcaacgcagactgggtcacgaaacagcttaatgaaatcaattatgaggatcataagctgaagtctggcactaatactaagaaagctctgcaagcagtgtatagcatgatgtcttggcctgacgacgtaccacccgaggggtggaaccggaccaggcacgtcatcatactcatgacagatggcctccacaacatggggggtgaccccattactgtcatcgatgagatcagggatctgttgtacatcgggaaagatagaaaaaaccctcgagaagattacctggatgtgtatgtgttcggggtcggccctctggtgaaccaggtgaacattaatgctctcgcctcaaagaaggacaatgaacagcacgtatttaaagtgaaggatatggaaaatctagaagacgtgttttatcaaatgatcgacgagtctcagagtctctccctttgtgggatggtgtgggagcatcgtaagggtactgattaccacaaacagccctggcaggcaaaaatctctgtgattagaccctctaagggccacgagtcctgtatgggcgcagtggtaagcgaatatttcgtcctgacagccgcacattgcttcaccgtggatgataaagagcattcaataaaagtgtcggtcggcggtgagaagcgcgatctggaaattgaagtagtcttgtttcaccccaactacaacattaacgggaagaaagaggctggtatccctgagttctatgattatgatgttgcccttatcaaactgaaaaataagctcaagtacggccaaacaattcgtcctatatgtcttccctgcaccgagggaacaactcgggctctgcgcctgcccccaacaactacatgccagcaacaaaaggaagaactcctgcccgcacaagacatcaaagcactcttcgttagtgaggaagaaaaaaaactgactaggaaagaggtgtacattaagaatggtgataagaagggctcctgtgagcgcgacgcccagtatgcgcctggttatgataaggtgaaggatatttcagaggtggtgacacccaggttcctgtgtaccggaggtgtttctccttacgcagatcctaacacgtgtcgcggagattcagggggacccctaatcgtccacaaaaggtctcgatttatccaagtcggagtcatatcctggggggtggtcgatgtttgtaagaaccagaaacgtcagaagcaagtgccagcccatgctcgcgactttcacataaatctcttccaggtcctaccatggcttaaggagaaactgcaagatgaggatcttggattcctgtag

SEQ ID NO: 219099 - DNA, 2295 bp, synthetic construct
  misc_feature 1..2295: note = Description of Artificial Sequence: Synthetic coding sequence
  source 1..2295: mol_type = other DNA
atgggatccaatctatccccccagctctgtttgatgccctttatcctgggtctcctgtccggcggtgttaccaccacaccttggagtcttgcacggccacagggaagttgctccctggaaggggtggagattaaaggtgggagtttccggctcttgcaggaaggtcaggccctcgaatatgtgtgcccgagcggattctatccttatcctgtgcagactagaacttgtcgaagcactggtagctggtcaaccctgaagacccaggatcagaagaccgttaggaaagctgaatgccgcgcaatccattgtcccaggccccatgacttcgaaaatggcgagtactggcctcgttcaccttactataatgttagtgacgagatttcttttcactgttatgatggttacacccttaggggaagcgcaaaccgcacttgccaggtaaacggcaggtggtccggccagaccgcgatttgcgacaacggcgctgggtactgttctaatccaggcattcccatcgggacacgcaaggtaggaagccagtatcgcctggaagatagcgtcacttaccattgcagccgcggtctgaccctcagagggtctcagcgcaggacctgtcaagaggggggatcatggtcgggcactgagccctcttgtcaggacagttttatgtacgatacaccccaggaagtcgctgaggcttttcttagctctttaactgagaccatcgagggagtcgacgcagaggatggacatggccctggcgagcagcagaagcgaaaaatcgtcctggaccccagcggcagtatgaacatctatctggttttggacggctccgactccatcggggctagtaatttcactggcgcaaaaaagtgtttagtcaatctgatcgagaaggtggctagctacggtgttaagccccgatatgggctggttacctatgcgacctaccccaagatttgggtgaaggttagtgaagccgattcttccaacgccgattgggtgacgaagcagctgaatgaaataaattatgaggatcataaactgaagtccggcacaaacacaaagaaagcactccaggcagtgtactcgatgatgagctggcccgacgacgtcccaccggaggggtggaacagaacgaggcacgtgattatcctgatgacagacggccttcacaacatggggggtgacccgattaccgtgatcgacgaaattagagatctcctctatatcggaaaggaccggaaaaatccacgtgaagactatcttgatgtttatgttttcggcgtgggtcccctggtgaatcaagtaaacatcaatgcgctggcgagtaaaaaggacaacgagcagcacgtgtttaaggtgaaggacatggagaacctggaggacgtcttttaccagatgatagacgaatcccaatcactgtcactgtgtggaatggtctgggaacacaggaagggtactgactaccataagcagccatggcaggccaagatctctgtgattcgcccatctaagggccatgagtcctgcatgggagccgtggtctcagagtatttcgtgctcaccgcggcacattgtttcaccgttgatgataaagagcacagcatcaaggtgtctgtgggtggcgaaaagagagacttggagatcgaggtcgtgttatttcaccctaattacaacataaacgggaaagaagaggctggcatccctgagttctacgattacgatgtggccctcatcaaactgaaaaataagttgaaatacggccagacaattcggccaatatgccttccatgcacagagggcactaccagggctctgcggttgccccctaccacaacatgtcagcaacagaaggaggagctgctgccagcacaggacatcaaagccttgttcgtctcagaagaggagaagaagttaacccgcaaggaagtatacattaaaaatggtgacaaaaaaggatcatgtgaaagagacgctcagtacgctcccggatatgataaagtgaaggatatatctgaggtcgtgacacccaggtttctgtgcaccggaggtgtctcaccctatgccgaccctaacacctgtcggggagacagtggcggaccactcatcgttcacaagcggtctcgcttcattcaggtgggcgtcatcagttggggggtggttgatgtatgcaaaaatcaaaagcgtcagaagcaggtcccagcacacgctcgagatttccacatcaatctgttccaggtactgccctggcttaaggaaaaactgcaggatgaggatctgggatttctttag

SEQ ID NO: 219100 - DNA, 2295 bp, synthetic construct
  misc_feature 1..2295: note = Description of Artificial Sequence: Synthetic coding sequence
  source 1..2295: mol_type = other DNA
atgggctccaatctgagcccacagttatgcctgatgcccttcattctgggcctcctttcaggaggcgtgactaccactccatggtcgctggcacggcctcaagggtcttgctcgctggaaggggtcgagatcaagggaggctcatttagactcctacaggaaggacaggctctggagtatgtctgtccatccggtttttatccgtaccccgttcaaacccgaacctgcagatccacaggttcctggagcacactaaaaacccaggaccagaagactgtccgcaaggctgagtgtcgggctatccactgccctaggcctcatgatttcgagaatggtgaatattggccacgatccccatactataatgtgtctgatgaaatttcgttccactgctatgacggctacacactgcgcggttcggccaaccggacttgtcaagtgaatggccgatggtccggacaaactgcgatctgtgacaatggggctggctactgctcaaacccaggaatccccataggcacccgcaaagtgggctcccagtaccgcttggaggatagtgtgacttatcattgctcgaggggcttaacactccggggttctcagagaaggacctgtcaagaaggcggatcatggtcaggaaccgaaccttcctgtcaagactcattcatgtatgacactcctcaggaggtagcggaggcgtttctctcctctctaactgagaccattgagggcgtcgacgctgaggatgggcatggccctggtgagcagcagaagcggaagatcgttctagacccaagtggctctatgaatatttatctggtgctggatgggtccgactcaattggagcgagtaatttcacaggggcaaaaaaatgcttggtcaacttgattgagaaagtagcttcttacggtgtgaagccgcgatacgggcttgtaacttacgcaacttatcctaagatctgggttaaggtttctgaagccgactcctccaacgcagactgggttaccaaacagcttaatgagattaattacgaagaccacaaactcaaatctgggaccaataccaagaaagccctacaggctgtgtacagtatgatgagctggcctgacgacgtccctcccgaagggtggaaccgtacccgccatgtgatcatcctgatgaccgacgggcttcacaacatgggtggggatcctatcactgttattgatgagattcgggaccttctgtatatcgggaaagacagaaagaaccccagggaagactatctggacgtgtacgtatttggggtgggcccacttgttaatcaagtgaatattaatgccttggccagcaagaaagataacgaacagcacgttttcaaggttaaggatatggaaaacttagaagatgtgttttatcaaatgatcgatgaaagccagtctttatcactgtgtgggatggtgtgggagcatcgcaaaggcactgattatcataagcagccttggcaggcaaagatctctgttatccgcccatcaaaagggcatgagagttgcatgggggctgtggtatcagagtatttcgttctgactgccgctcattgctttacggttgacgataaggaacattctatcaaggttagtgttggcggagaaaaacgggacctcgagatagaggttgtccttttccaccctaactataacatcaacggcaagaaagaagcaggaatccccgagttttacgattacgacgttgcgcttataaaattaaagaataaactgaagtacgggcaaactatccgcccaatttgccttccgtgcaccgagggcaccaccagagctctccgactgccgccaacgactacctgtcagcagcagaaagaggagctactcccagcgcaggatatcaaggccctcttcgtgtcggaagaggagaagaaactaacgcggaaagaggtgtacataaagaatggtgataagaaagggtcctgtgagagagatgcgcaatatgctccaggctatgacaaggtcaaagacattagcgaggtcgtgaccccgagattcctgtgcactgggggtgtctccccgtatgctgatcctaatacctgcaggggggattctggcggtccgctgatcgtgcataagcgaagtcgttttatccaggtcggcgtgatctcctggggggtggttgacgtctgtaagaaccagaagcgccaaaagcaagtgcctgctcacgctcgcgatttccatattaacttgtttcaggtgctcccatggctgaaagagaagctgcaggatgaggatctcggcttcctttag

SEQ ID NO: 219101 - DNA, 2295 bp, synthetic construct
  misc_feature 1..2295: note = Description of Artificial Sequence: Synthetic coding sequence
  source 1..2295: mol_type = other DNA
atgggtagcaacctcagtccccagctatgccttatgccatttatactgggactgctttctggaggggtcaccactactccctggagccttgcacgccctcagggcagctgtagcctcgaaggtgtggaaatcaaaggaggctcttttcggctactgcaggagggacaggcactcgaatatgtttgcccgtcgggattctatccttatccggtgcaaacccgtacgtgccggagcacaggctcctggagtacactcaagacgcaggaccagaagaccgttcgcaaggccgaatgccgcgctatccattgccctaggcctcacgattttgagaacggagagtattggccgcgtagcccatactacaatgtctccgacgaaatcagcttccattgctacgatgggtacactttaaggggcagcgcgaacaggacttgtcaggtcaacggtaggtggtcaggacaaacagctatctgcgataacggtgctgggtactgcagcaatccaggcattccaatcggaacgcgaaaagtggggtcccagtacagattagaggatagcgtcacttaccactgtagcagggggctgaccttgcgtggttcccagcgtagaacttgccaggaggggggtagttggtcaggaaccgagccatcgtgccaggacagcttcatgtatgatacccctcaggaggtcgctgaagcttttcttagctcactgaccgaaaccatagaaggggtggacgcagaagacggtcacggccctggcgagcaacagaagcgtaaaattgtgcttgaccctagcggctccatgaacatttaccttgtacttgatggttcggactcaattggtgcatccaacttcactggcgcaaagaagtgtctagtgaaccttattgagaaagtggcgagttacggggtcaagcccaggtacggcttggtgacgtacgcaacctatcccaagatttgggtgaaagtttcagaggcggacagttccaatgcggactgggtgaccaagcagctcaacgaaattaattatgaggaccacaaactcaaaagtggcacaaacacaaagaaagctcttcaggccgtttactcaatgatgtcctggcccgacgatgttcctcccgagggttggaatcggactaggcacgtgatcatcttgatgaccgacggccttcataacatgggaggtgatcccatcacagtgattgatgagattcgggaccttctctatattggcaaggatagaaagaaccccagggaggactaccttgacgtgtatgtctttggagtaggacccctggttaaccaggtgaacattaatgctctggcctccaaaaaggacaacgagcaacacgtcttcaaggtgaaggacatggaaaatctggaggacgtgttctatcagatgattgatgaatctcagtccctgtccctgtgtggtatggtttgggagcatcgaaaaggcacggattaccataagcagccctggcaggcaaaaatctcggtaattcggccttctaaaggccatgagtcttgcatgggtgccgtcgtcagcgagtacttcgttctcacggccgctcattgctttacagtagatgataaggagcacagcatcaaggtctcagtcggtggcgaaaagagagatctggagattgaggtggttctattccatccgaactataacatcaacggtaagaaagaagcgggaattcccgaattttatgactacgatgtggcactgatcaaattaaagaacaaactcaaatacggccaaacaatacggcctatctgtttgccttgtaccgaaggcacaaccagagctctaagactgcctcctacaactacttgtcagcagcagaaagaggagctactgcctgcacaggacattaaagcactgttcgtgtccgaggaggaaaagaaactgacaaggaaagaggtatatatcaagaatggggataagaaagggtcctgcgaacgagacgcacagtacgcaccaggttacgataaagtaaaagacatctcggaggttgtaacacctagattcctgtgtacggggggagtcagtccgtatgcagatcctaacacctgcagaggggacagtggcggacctcttattgtgcataagcgcagtcgctttattcaggttggcgtgatcagctggggagtggtggacgtatgcaagaatcaaaaaagacaaaagcaggtacccgctcacgctcgagacttccacatcaatttgttccaggttcttccttggttaaaagaaaaactccaggatgaggatcttggattcttgtag

SEQ ID NO: 219102 - DNA, 2295 bp, synthetic construct
  misc_feature 1..2295: note = Description of Artificial Sequence: Synthetic coding sequence
  source 1..2295: mol_type = other DNA
atgggatctaacctcagcccacagttatgtctgatgcccttcattctgggcctgctcagtgggggagtgaccacaaccccctggtccctggccagaccccagggctcttgttccctcgagggggttgaaattaagggtggctccttccggctcctacaggaaggacaggccctggaatatgtctgtccaagcggtttttacccgtacccagtgcagacccgcacatgcagaagcacaggaagctggtccacactgaagactcaggaccagaaaaccgtaaggaaggccgagtgccgcgcaatccattgcccccgaccccatgatttcgagaacggcgagtactggcctaggtccccctattacaatgtcagtgacgaaatttcattccactgttatgacgggtacaccctcaggggatccgccaaccggacctgtcaggttaatggcagatggagtggacagaccgcaatttgtgacaacggcgcagggtactgttccaatccaggaattccaatagggactcgcaaggtaggctcccagtatcgacttgaggatagtgtaacataccactgcagtcgcggactgaccttacgcggaagccaaagacgcacttgccaggaagggggatcatggagcgggactgagccaagctgtcaggactcattcatgtacgacacgccacaggaggtggcggaggcctttttaagctctttaacagagactatcgagggtgtcgacgccgaggacggacacgggccaggcgagcagcagaagaggaagatcgtcctcgatccctccggcagcatgaatatctacttggtcctggatggctcggatagcataggggcaagtaatttcaccggcgcaaaaaagtgcctggtgaacctgatcgagaaggttgcgtcgtatggggtgaagccccgttacggccttgtaacgtacgctacctaccctaagatttgggtcaaagtttcagaagcagattcctcgaatgctgattgggttacaaagcagttgaacgaaataaactatgaagaccataaactgaaaagtggaacaaacactaagaaggctctccaggctgtttactctatgatgtcctggcctgatgacgtgccccctgagggttggaatcggacgaggcatgtgatcattctgatgacagacggactgcataacatggggggtgacccaatcacagtcatcgacgaaattcgcgacctgctatacatcggcaaagaccgcaagaatccccgtgaggactatttggacgtctatgtgtttggcgtgggccctctggtgaaccaggtaaatatcaacgcgcttgcttccaagaaagataacgagcagcatgtgttcaaggttaaggacatggagaatctcgaggacgtcttttatcagatgattgacgaatctcagtcactctccctgtgcggcatggtgtgggagcacaggaagggtacagattatcacaagcagccatggcaggccaagatctcggtgattcgcccatcgaaagggcatgagtcctgcatgggcgctgtggtctccgaatactttgtgcttaccgccgcacactgctttactgtggacgataaggagcatagcatcaaagtttccgtgggcggagagaaacgagaccttgaaattgaagtggtcctgtttcaccccaactataatattaacggaaagaaggaggccggtattcctgaattttacgactacgatgtagcactgataaagttgaagaacaaactcaaatacgggcagacaataagacccatatgtctcccttgtactgaaggcaccacacgggctctgaggctgccccctactactacgtgccagcagcagaaagaagagttgctaccagctcaagatattaaggcactgtttgtctctgaggaggagaagaagctcactaggaaagaggtgtatattaagaacggggacaagaaaggcagctgtgagagggacgctcaatacgcccctggctatgataaagtaaaggacatctccgaggtggtcacccccaggttcttgtgcaccggcggagtctccccatacgctgaccccaatacttgtcggggtgatagcgggggtcccttaatcgttcacaaacgttctagattcatccaggtgggcgtcatctcctggggcgtggtggatgtctgcaagaaccaaaaacgccagaaacaggtacctgcgcacgcaagggactttcatatcaatctcttccaggtactcccttggctgaaagaaaagctgcaggatgaggacctgggtttcttgtag

SEQ ID NO: 219103 - DNA, 2295 bp, synthetic construct
  misc_feature 1..2295: note = Description of Artificial Sequence: Synthetic coding sequence
  source 1..2295: mol_type = other DNA
atgggatctaatctgtcccctcagctgtgcttaatgcctttcatcctgggcctgctgtccggaggagtgacgactacaccatggagtcttgccagaccacagggatcctgcagcctagagggagttgagataaaggggggatcttttagacttttacaagaaggccaggctcttgagtatgtatgccctagcgggttctacccataccctgtgcagacgaggacatgcaggtccacaggaagctggtctacactgaaaacccaggaccagaagacagtgcgcaaagccgagtgccgagccatccactgcccgaggccccacgactttgagaatggtgagtactggccacgttccccatattacaacgtgagcgacgaaatctcttttcactgttatgatggctacaccctgaggggcagtgccaataggacatgccaggtgaacggtagatggtcaggccagactgcaatttgtgacaatggagccggttactgctctaaccctggcatcccaattgggacaaggaaagtgggctcccagtatcggttggaagattccgtgacatatcactgttccagggggctgactctccgtgggagccagcgtagaacatgtcaggaaggcggatcatggtccggtaccgagccgagctgccaagactcttttatgtacgacaccccacaggaagtggccgaagcatttctgagttctctcactgagactatcgagggcgtcgacgcggaggatggccatggccctggagaacagcaaaagagaaaaatcgtgttagatccatctgggagcatgaacatttaccttgtcctggacgggagtgattctatcggtgcttccaacttcaccggagccaagaagtgcctcgtgaatttgatcgaaaaagttgcctcttacggagtgaaaccgaggtatgggctggtgacatacgccacctacccaaaaatttgggtaaaggttagtgaggccgattccagtaacgctgattgggtgactaagcagctcaatgaaatcaactatgaagatcataaactcaagagcggtactaacaccaagaaagccctgcaggccgtgtactctatgatgtcctggcccgacgacgtcccacccgaaggttggaatcgcacgaggcacgtgatcatcctgatgactgacgggcttcataatatggggggagaccccatcacagtaattgatgagattagagatctgctttatatcggcaaggaccggaagaacccacgtgaagattacttggacgtgtatgtttttggtgttggtcccctggtaaaccaggtgaacattaacgcattggccagcaaaaaggacaacgaacaacatgtctttaaagtgaaagacatggagaacctcgaggatgtgttctaccagatgattgacgaaagtcagagcttatctctgtgtggcatggtgtgggaacatagaaaggggacagattaccataagcagccgtggcaggcaaagatctccgtgatccgtccttccaaaggccatgaatcatgcatgggcgctgtggtctctgaatacttcgtattgacggctgcacactgcttcaccgtggatgacaaggagcatagcataaaggtgagtgtgggcggtgaaaaaagagacctggaaatcgaggtggtgctgtttcaccctaactacaacattaatgggaaaaaggaagctggaattcccgaattctacgactatgatgtagccctgattaagttgaagaacaagctgaagtacggacagactatccgccctatatgccttccttgtacagaggggacaacgagagccctgcgtctcccgcctaccaccacgtgtcagcagcagaaggaagaacttctccccgcacaggatattaaagcgctcttcgtgagcgaggaggagaagaaactaacccggaaagaggtatacattaagaatggagataaaaagggctcatgtgagagggatgcacagtatgcccctgggtacgacaaagttaaggacatctctgaagttgtgaccccccgattcctctgtactggaggagtgtccccttacgctgaccctaatacatgtagaggtgacagcggcggtcctctgatcgtccataaacgcagcaggtttattcaggtcggtgtgatatcttggggcgtggtggatgtatgcaaaaaccaaaagagacagaagcaggtccccgctcacgccagagattttcacatcaatctgtttcaggtcctgccttggttgaaagagaagctgcaggatgaggatctgggattcttgtag

SEQ ID NO: 219104 - DNA, 2295 bp, synthetic construct
  misc_feature 1..2295: note = Description of Artificial Sequence: Synthetic coding sequence
  source 1..2295: mol_type = other DNA
atggggtctaacctctcccctcaattgtgcttgatgcctttcatcttggggctgctctcaggtggcgtgactaccacaccatggtctctggcaagaccacagggcagttgtagtctggagggcgtggaaattaagggaggtagctttaggttactgcaggagggacaagcccttgagtacgtgtgtccatcggggttttatccataccctgtccagacaagaacttgtcgtagcactggctcttggtctacgctgaagacccaggaccagaagaccgtgcggaaagccgaatgcagggccatccattgtccaagaccacatgactttgagaatggggaatactggccacgttccccctattacaacgtgtcagacgagattagctttcactgttacgacgggtacaccctgaggggatccgctaacaggacctgtcaagtgaacggcagatggtcaggccagaccgctatttgcgacaatggggctgggtactgttccaaccctggaattcctatcggcacccgcaaagtgggatcacagtatagattagaggacagtgttacttatcactgttcccgcggactgacattaaggggtagccagcgtcggacatgtcaggaggggggatcatggagcggcacggaaccttcgtgccaggactcattcatgtacgatacaccccaggaggtcgcggaggcctttctgagttctctaaccgagacgatcgaaggcgtcgatgccgaagatggacatggcccaggtgaacaacagaagcggaaaatcgtgctcgatccctcagggtccatgaacatttaccttgtgcttgatggaagtgactccatcggagcctcgaacttcacaggagccaagaaatgtctcgtgaacttgatcgaaaaggttgcctcttacggcgtgaaacccaggtacggtctggtcacttatgccacttatccaaaaatctgggtgaaggtcagtgaagcagacagtagcaatgctgattgggtgactaagcagctgaacgaaatcaactatgaggaccataagctaaaatccggcacaaacactaagaaagctttgcaggccgtctactctatgatgtcctggcccgatgacgtacctcctgagggttggaatcgaaccagacacgttatcatcctcatgaccgatggtctccataatatgggaggggaccctatcaccgtaatcgacgagattcgggatctgttatacattggcaaagacaggaagaatccacgagaagactacctcgatgtatacgtgttcggtgtcggcccactggtgaatcaggttaacattaatgctcttgcttctaaaaaggacaacgagcagcatgtcttcaaggtgaaggacatggagaatctagaagatgtgttctaccagatgatcgatgaatctcagtctctgtctctctgcggcatggtctgggagcaccgaaagggcacagattaccataaacaaccctggcaggctaagatttcggtcatccgtccttccaagggccacgaaagctgtatgggggctgtggtctctgagtattttgttcttacggccgctcactgcttcactgtcgacgataaagagcacagcattaaggtcagtgtcgggggagagaaacgcgacctcgaaatcgaagtcgtgctgtttcatccgaactataacatcaatggcaaaaaagaagcgggaattccagagttttacgattacgacgtggcattgatcaaattaaagaacaagctgaaatacggtcagactattagacccatttgtctgccttgcacagagggaacgactagagccctgagactgccaccaaccactacttgtcaacaacagaaagaggagctcctccctgctcaggatatcaaggctctcttcgtcagcgaagaagagaaaaagctaactcgtaaggaggtgtacatcaagaacggagacaaaaagggaagctgtgagcgtgacgctcagtacgccccaggctacgataaagtcaaagatatctccgaagtggtcactcccaggttcctttgtactggaggcgtgagtccatacgcagacccgaatacctgtcggggtgactccggtggcccactgatcgtccacaagcggagtcgattcattcaggtcggcgtgatcagctggggtgttgtggacgtgtgtaagaatcagaagcggcagaaacaagtaccagcacatgcacgcgattttcacatcaatctattccaggtcctcccctggctgaaagaaaaactccaggacgaggacctgggctttttatag

SEQ ID NO: 219105 - DNA, 2295 bp, synthetic construct
  misc_feature 1..2295: note = Description of Artificial Sequence: Synthetic coding sequence
  source 1..2295: mol_type = other DNA
atgggttcaaatctgagtccccagctgtgcttaatgccattcatcctaggtcttctctctgggggagtcactactactccatggtcactggcacgtccccagggatcttgctcactcgaaggggtcgaaataaagggcggttcctttcggctgctgcaagagggtcaggccctggaatacgtctgtccatccggattttatccatatcccgtgcagaccaggacatgcaggtcaacagggagttggagcaccctgaaaacccaggaccagaagaccgtgagaaaggctgaatgtcgggctatacactgcccaaggccacatgatttcgagaatggtgaatactggcccaggtcaccttactataacgtgtccgatgaaatttcctttcactgttacgatggctacaccctgaggggctctgcaaaccggacatgccaggttaacggaagatggtcagggcaaacagccatatgcgacaacggagcagggtattgcagcaatccgggtatcccaatcgggacacgcaaggtgggaagccaataccgcctggaagactccgttacataccactgcagtcggggactgaccctgagagggagccaaaggaggacgtgccaggagggcggaagttggtcaggcactgaaccttcatgccaggattcatttatgtatgatactccgcaagaagtggcagaagccttcctctcgtcccttactgaaaccatagagggggtggacgctgaggacggccacggccctggcgagcaacagaagcggaagattgtgctagacccctccggaagcatgaacatttatttggttttagatggaagcgacagcatcggcgctagtaacttcactggcgctaagaagtgtctggtgaacctgatcgagaaagtcgcaagctacggcgtgaaacctagatatgggctggtgacctatgctacttatccaaaaatctgggtgaaggtcagtgaagcggactcatcgaatgctgactgggtaactaaacagctgaatgagatcaattacgaagatcataaactaaaaagcgggacgaatacaaagaaagctttgcaagccgtttacagcatgatgtcttggcctgacgatgttcctccagagggctggaataggacacggcatgttattatcctgatgacggacggccttcataatatgggaggagaccctattacagtgatcgatgagatcagggacctgctctatataggtaaggacagaaagaatccacgcgaggactacttggacgtgtacgttttcggtgtcggccctctggtgaaccaggtgaatattaatgcgttggccagcaagaaagacaacgaacagcacgttttcaaggtcaaggatatggaaaacctcgaggatgtgttctatcaaatgattgacgagtcacaatcactttctttgtgtggcatggtctgggagcacagaaaagggaccgactaccataagcagccctggcaggctaaaatatctgtgatacggccttccaaggggcatgaaagctgtatgggagccgtcgtgtctgagtacttcgtcctgaccgctgcacattgtttcaccgttgacgataaagagcattctattaaagtttcagtaggaggggagaaaagggatctcgagattgaagtggtgctgttccatccaaactacaacattaacggcaaaaaagaggccggaataccagagttttatgattacgatgttgcgctaatcaagctgaagaacaaactcaaatatggtcagactattagaccaatttgccttccttgtaccgaaggaactaccagggcgctgagactaccaccgaccacaacctgtcagcagcagaaggaagagctactacctgcccaagatatcaaagcactgttcgtgtcagaggaagaaaaaaagctgacgcgaaaagaggtgtacatcaagaatggggataagaagggctcatgtgaacgggatgctcagtatgctccaggctatgacaaggtcaaggacattagcgaggtagtgacaccaaggttcctgtgcaccggaggcgtatccccctatgcagacccaaatacatgcaggggcgacagtggaggccctctaatcgtgcacaagcgatcaagatttatacaggtaggcgtaatctcttggggagtggtcgatgtttgtaaaaaccagaagcgtcaaaaacaggttcccgctcacgcccgtgactttcatattaacctgttccaggttttaccctggttgaaagagaagttgcaagacgaggatttaggttttttatag

SEQ ID NO: 219106 - DNA, 2295 bp, synthetic construct
  misc_feature 1..2295: note = Description of Artificial Sequence: Synthetic coding sequence
  source 1..2295: mol_type = other DNA
atgggctctaacctctccccacaactgtgcctgatgcccttcattctcgggctgttgagtggcggagtcaccactactccgtggtcccttgcaaggccccagggtagctgctctctggagggtgttgaaatcaagggcggatcctttcggctcctccaggagggtcaggcactagaatatgtgtgtcccagtggattctacccgtacccggtgcaaacacggacatgtcgctctaccgggtcttggtctacccttaagacacaggaccagaaaaccgtcaggaaagcagaatgcagggcaattcattgccccaggcctcacgacttcgaaaatggagagtactggcctcggtccccttactataatgtctccgatgagatctctttccattgttacgacggctacacactgcggggaagcgcaaacaggacatgccaggtgaacggacgctggtccggccagactgctatttgcgataatggggctggctactgttctaaccccggtatacccattggaactcgaaaggtggggtctcagtatagactcgaggactccgtcacatatcactgtagccgagggctgaccctacggggttcacagcggaggacctgtcaggagggcggatcctggagcggcacagaaccatcttgtcaggattcttttatgtatgacacgcctcaggaagtcgcagaggctttcctttcaagcctgacggaaactattgagggggtggatgccgaagacggtcacgggcctggagagcagcaaaagaggaagatcgttctggatcctagcggatcgatgaatatctatctggtgctagacggttccgactctatcggggcatccaatttcacaggcgctaagaagtgtctggtgaacttaattgagaaggtggcatcttacggcgtgaagcctcgttatggtctggtcacttacgctacctatcctaaaatttgggtgaaagtcagtgaggccgattcaagcaatgcagactgggttaccaagcagctaaacgaaatcaattacgaggaccacaagctgaaatctggcaccaacactaagaaggccttgcaggctgtgtacagcatgatgtcctggcccgatgatgtgccacccgagggttggaatcgcacccggcacgttatcatccttatgaccgatggacttcataacatgggaggcgatccaatcaccgtgatcgatgaaatacgggacctgttgtacattggcaaggataggaagaacccacgagaggactatttggacgtgtacgtattcggtgtggggccactcgtaaaccaagttaacattaatgcactggccagcaagaaggataatgagcagcatgtctttaaagtgaaggacatggagaaccttgaggacgtgttctaccagatgatagacgagtcacaaagtctgagcctgtgcggaatggtgtgggagcatagaaaggggactgactatcataagcagccatggcaggcgaaaatcagtgtcatacgcccttcaaaaggccatgaaagttgtatgggggcagttgtcagcgagtacttcgtgctcaccgcagcgcattgttttactgtggacgacaaggagcacagtattaaggtgtcggtgggaggagaaaagagagatctggaaattgaagtggtattgttccacccaaactataacattaacgggaagaaagaagccggaattcccgaattctacgactacgatgtcgccttgatcaaactgaagaataaattgaagtacggccagacaataaggcccatatgtttgccctgtactgaaggcacaactagggcactgaggcttccacccacaacaacgtgccagcagcaaaaggaagagctgttgcccgctcaggatatcaaggccctctttgtgtccgaagaagagaaaaagctgaccagaaaggaggtgtacatcaagaatggcgataagaagggttcctgtgaacgtgacgcccaatacgccccagggtacgacaaagtgaaggacatttctgaggtcgttacaccccgatttctttgcaccggcggagtttcaccatacgcagaccccaatacctgtaggggcgattctgggggtccactcatagtccataaaagaagccgcttcatacaagtcggggtcatatcttggggggtcgtggacgtttgcaagaatcagaagcggcagaagcaagtgcccgcacacgcgagagactttcacatcaatctcttccaggtgctgccgtggctgaaggaaaagctccaggacgaagatttgggctttttgtag

SEQ ID NO: 219107 - DNA, 435 bp, synthetic construct
  misc_feature 1..435: note = Description of Artificial Sequence: Synthetic coding sequence
  source 1..435: mol_type = other DNA
atggggtcaaacttgtcaccacagctgtgtctgatgcccttcatattggggctgctctccggaggcgtcacaacgacgccctggtccctggcgagaccacagggctcttgttccctcgagggtgttgagattaagggaggcagtttcaggttgcttcaagagggacaggccctggagtatgtgtgcccatccggcttttacccctacccggtgcagacacgtacctgccggtctaccggcagctggtccacgctcaaaactcaggatcagaagacggttagaaaggccgaatgcagagccatacactgtccaaggccacacgacttcgaaaacggagagtactggccacgttctccctattacaatgtgtccgacgagatctccttccactgctatgatggctacacactcagaggcagcgctaatcgtacctag

SEQ ID NO: 219108 - DNA, 3801 bp, synthetic construct
  misc_feature 1..3801: note = Description of Artificial Sequence: Synthetic coding sequence
  source 1..3801: mol_type = other DNA
atgggaccattgatggtgctgttttgcttgctgttcctttaccccggtctcgcagattccgcaccctcttgccctcaaaatgtcaatatttcaggcggtaccttcacgctcagtcacggctgggcacccggaagtcttctgacttattcgtgtccccagggcctgtacccctccccagccagcaggctctgcaagtcgtccggtcaatggcagactccaggtgccaccaggagcctgtctaaagctgtctgtaagccaggtcattgccccaaccctgggatttctctcggagccgtccggacaggcttcaggtttggtcatggcgacaaagtccgatataggtgctcctccaacctggtgctgacgggctcatccgagcgggagtgccagggcaacggagtgtggagcggaacagagccaatctgcaggcagccatactcgtacgatttccccgaggacgtcgcaccagccttaggcaccagctttagccatatgctgggtgccaccaacccaacgcagaaaaccaaagatcatgaaaatgggaccggaactaatacctatgccgcactcaattccgtgtacctgatgatgaacaatcagatgcggctactgggcatggagacaatggcctggcaggagattcggcacgccataatcttgcttactgacggcaaatctaatatgggaggttctcctaagacggctgtagatcacatccgagagatactgaacatcaaccagaaacggaatgattatctcgacatctacgccatcggggtgggtaaactcgatgtggactggcgtgaattaaatgagctaggatcgaagaaagacggcgagcggcatgctttcatcctgcaggacacaaaggcccttcaccaggtgtttgaacacatgctggacgtgagcaaactaactgataccatatgcggagtaggcaacatgtcagcaaacgcaagtgaccaggaaagaactccatggcatgtcactattaagcccaagtcccaggaaacgtgtagaggggcactcatatctgatcagtgggtgcttacggctgcccactgttttagggatggcaatgaccactccctttggcgcgtgaacgtcggcgatcccaaaagccagtggggcaaggagtttttgatcgagaaggcagtcatctctcccggttttgatgtctttgccaagaagaaccagggcatccttgaattctatggtgatgatattgcccttctcaaactagcgcaaaaagttaagatgagtactcatgctaggcccatctgtttaccatgtacgatggaggccaatctcgccctccggcgtcctcagggatccacctgcagggatcacgaaaacgagcttctcaataagcagagcgtgccggctcactttgtagccttgaatgggagtaagcttaacatcaatctgaagatgggagtcgagtggacttcttgtgccgaggttgtctctcaggaaaaaacaatgtttccaaatttgaccgacgtgagggaagtggtgacggaccagttcctctgcagcgggactcaggaggacgagagcccttgtaaaggggtaaccacaacaccgtggagtcttgctaggccccagggatcatgtagtctcgaaggggtagaaatcaagggagggagttttcgactcctccaggagggacaggcgcttgaatacgtctgtccgagtggcttctacccctacccagtccaaacaagaacctgccgctctactgggtcctggtccactttgaagacccaggaccagaagaccgtccgtaaggctgagtgccgggctatccactgccctcgaccccacgacttcgagaacggtgagtattggcccaggtccccatactacaacgtgtccgatgagattagcttccactgttatgatggatacacgctgagaggatctgctaaccgcacctgccaagtgaatggtagatggagcggccagactgccatatgtgacaacggtgcaggctactgcagtaacccaggcattccaatcggcactagaaaagtgggcagccaatatcgcctcgaggacagcgttacctaccactgttcacggggtttgacattaaggggcagccagaggcgcacatgtcaggaaggaggatcgtggagcggaacagagccctcatgtcaggactcatttatgtatgacactccgcaagaagtagctgaagcgttcttgtcttcactcactgaaactattgaaggcgtggatgccgaggatggacacgggccaggagagcaacagaaaaggaagatcgtgttggacccctccggaagtatgaatatctacttagtactcgacggttccgactccatcggagcctctaacttcaccggcgcaaagaagtgtctcgtaaatctgatcgagaaggtcgcctcctatggagtgaagccgagatacggattggtcacatacgcaacttacccaaagatttgggtgaaagtgtctgaggcagactcctctaacgcagattgggtcaccaaacaacttaacgaaataaactacgaagaccacaagttaaagagcggaacaaacacgaagaaggcccttcaggcagtgtattctatgatgagctggcctgacgatgtgccacctgagggatggaatcggacaagacatgtgattatcctgatgactgacgggctgcacaatatgggaggcgatccaattaccgtaatcgatgagatcagggatttattgtacatcggcaaagatagaaagaatccaagggaggattatctggacgtatacgtgttcggggtgggccctctcgtcaaccaggtaaatattaatgctctggcctctaaaaaagacaatgaacagcatgtgttcaaggtcaaggatatggaaaacttggaagatgtgttctatcaaatgatagacgagtcccagtccctgtctctgtgcggcatggtttgggaacatcgcaagggtactgactaccacaagcaaccttggcaagccaaaattagcgtcattcgacctagcaagggacacgagagctgtatgggagccgtcgtgagcgagtacttcgtgctaacagcggcacattgtttcacagtggatgataaagagcacagcataaaggttagcgttggaggcgaaaaacgtgaccttgagatcgaagtcgtcctctttcatcctaattacaacataaacggcaaaaaggaggcaggtatccccgaattctatgactacgatgttgctctgattaagctgaagaataagttgaaatatgggcagaccattcgccctatatgtcttccatgcactgagggcaccactagggcactgcgactgccccctaccaccacttgccaacagcagaaggaagaattactcccagctcaggacattaaagccctctttgtatctgaggaagagaaaaaactgacacgtaaggaggtctacatcaagaacggcgacaagaagggctcttgtgaacgggatgcacagtacgcacctggatatgacaaagtcaaggacatcagcgaagtggtcacccctagatttctgtgtaccggtggagtgtcaccatatgcagatcccaatacttgtagaggggactcaggcggacctttaatcgtccacaaacgcagtcggttcatccaagtgggcgtcatttcttggggcgtcgtggatgtgtgcaagaatcagaagagacaaaaacaagtccctgcccatgccagagacttccatatcaatctatttcaggtgttgccttggcttaaggaaaagttacaggacgaggacctggggtttctctag

SEQ ID NO: 219109 - DNA, 3801 bp, synthetic construct
  misc_feature 1..3801: note = Description of Artificial Sequence: Synthetic coding sequence
  source 1..3801: mol_type = other DNA
atgggcccactgatggtcctcttctgcttgctgttcctctatcctggcctggccgacagcgcacctagctgccctcagaatgtaaatatctctgggggtaccttcacgctctcccacggctgggcccctgggtccctgcttacttactcttgccctcagggtctgtacccatctcccgctagcagactgtgcaagtccagcggacagtggcagacccctggcgcaacccgaagcctgtcaaaagctgtgtgtaaacccggtcattgtcctaaccccggtatctctctgggcgctgtgaggacaggcttcaggttcggacacggtgacaaggttcgctacagatgttccagtaatttggtgctcactggctcgagtgaaagagaatgccaagggaatggtgtgtggtcagggacggaacccatctgtcgccaaccttacagctacgatttcccagaggacgtcgcaccggcactcgggacatctttctcccacatgcttggcgcaacaaatcctacacagaagactaaggaccacgagaatggcaccgggaccaacacttatgccgcactgaattccgtttatcttatgatgaataaccagatgagacttctgggcatggaaaccatggcgtggcaggagatacgtcacgccattattctgctgactgacgggaaatctaacatggggggttcacctaagacagccgtggaccacataagagaaatccttaacatcaatcagaaaagaaacgactacctggatatctacgccatcggagtcggaaaactcgacgttgactggcgagagctgaacgaactcggcagtaagaaggatggggaaagacacgcgttcatactccaagacactaaggccctacaccaagtttttgagcatatgctggacgtctccaagctgaccgacactatttgtggagtgggtaacatgagcgcgaacgcctctgaccaggagcgaacaccctggcatgtgactataaaacctaaaagtcaagaaacatgcagaggggctctcatttcggatcagtgggttttaacagccgctcactgcttccgcgatgggaatgatcactccttatggagggtgaacgtgggtgatcccaaatctcaatggggaaaggagttcctcatcgagaaagcggtaatcagccctggattcgatgtgttcgccaagaagaatcagggcattctggagttttacggggacgatatcgcgctcctgaagctcgctcagaaagttaaaatgtcaactcatgccaggccgatctgcctcccttgtactatggaggccaatctggctctgcgtaggcctcaggggagcacttgccgggaccatgagaatgaactcctgaacaagcagtctgtgcccgcacatttcgtcgccctcaatgggagcaaactgaacattaacttgaagatgggagtcgagtggaccagctgtgctgaggtcgtatctcaggagaaaaccatgttcccaaacctcacagacgttagggaggtagtgaccgaccagttcctgtgcagcggtactcaagaggacgagagcccttgcaaaggcgtcaccacgacaccttggtctctggcccgaccccagggatcgtgtagtctggagggcgtcgaaattaaggggggaagcttcagacttctccaagaaggtcaagcactggagtatgtctgcccgagcggcttttacccttaccccgtgcagacaagaacttgccgtagcaccggctcgtggtccaccctcaagacacaggatcagaagaccgtccggaaagccgaatgcagagccatccattgtccaaggcctcacgacttcgaaaatggcgaatactggccaagaagcccttattacaatgtatcagatgaaataagcttccattgctatgatgggtacaccctacgcggttccgccaatcggacatgccaagttaatgggaggtggagtggccagacagccatttgtgacaatggtgcgggatactgctctaacccgggtatccccatcgggactcgtaaagtgggctcccaatatcgactcgaagatagtgtgacttatcactgttctagaggcttgacattgagaggctcgcagcggcgtacttgtcaagagggagggtcatggtccggcactgagcctagttgtcaggattcttttatgtatgatacgcctcaggaggtggctgaggcattccttagctccctgacagagactatcgagggtgtcgatgctgaagatggacacggccctggcgagcagcagaagcggaaaattgttctcgacccaagcgggagcatgaacatctacctcgttctggatgggtctgatagcatcggtgccagtaacttcactggcgctaaaaagtgtcttgtgaacctaatagagaaagtggcttcctacggcgttaagcctcggtacgggctggtcacctacgctacttatccaaaaatttgggtgaaggtgagtgaggcggattcttcaaacgcagactgggtaacaaaacagcttaatgaaattaattacgaagatcataagttaaaatctgggaccaacaccaagaaagcgctccaggctgtgtactccatgatgtcttggccagatgacgtgccccctgagggatggaaccgcacaaggcacgtgattatcttgatgacggatggtcttcacaacatgggtggagatccaattacggtgatcgatgagataagggatctgctctacattggtaaggacaggaaaaatccacgggaggattacctggacgtgtacgtttttggtgtgggtcctctggtcaatcaggtgaacatcaatgccctcgcttctaagaaggacaatgaacagcatgttttcaaggtgaaagacatggaaaatctggaagacgttttctaccagatgattgacgagtcccagtccctaagtctgtgcggaatggtttgggaacacaggaaagggacggactaccataagcagccctggcaggctaagatctctgtgattaggcccagcaaaggccatgaaagctgcatgggagcagttgtctcagagtactttgtcctgaccgcggctcactgttttacagttgatgataaagaacactccattaaggtgagcgtcgggggtgagaagagggatctggagatcgaggtggtgttattccaccctaactacaatattaacggaaaggaagaggctggcatccccgagttctacgattatgatgtggcactgataaagctcaagaataagcttaaatatgggcagacaatccggccaatctgtttgccctgcaccgaaggcacgacacgtgcccttcggctcccgcctaccaccacatgccagcaacaaaaggaagaacttctgccagcccaggacatcaaggcactgttcgtgagcgaggaggagaagaagcttactaggaaagaggtgtacattaagaatggtgataagaagggtagttgtgagcgtgacgcccagtatgcgccaggctacgataaggtaaaggacatttcggaggttgtgacgcctcggttcttgtgtactggaggggttagtccatacgcggatccaaacacatgtcggggagattctggaggcccattaattgtccataagaggagcagattcatccaggtgggtgtcatctcatggggggtcgtcgacgtgtgtaagaaccaaaagcgccagaaacaggtcccagcccacgccagggattttcacattaacctcttccaggtgctgccctggcttaaggagaagctgcaagacgaagatctgggatttctgtag

SEQ ID NO: 219110 - DNA, 3801 bp, synthetic construct
  misc_feature 1..3801: note = Description of Artificial Sequence: Synthetic coding sequence
  source 1..3801: mol_type = other DNA
atggggcctctgatggtcttgttctgtcttctcttcctttacccgggattggccgactccgcccctagttgtccacagaacgtgaatatcagcggcggtacatttactctgagtcatgggtgggctccgggtagtttactgacttatagttgccctcaaggcttatatccatccccggctagcaggctctgcaagtccagtggccagtggcagacgcctggggctactagatccttgtcaaaggccgtgtgcaagcccggacattgcccaaatcccggtatctctctgggcgctgtgcggactggcttcaggtttggccatggagataaagtgcgctacagatgttccagcaacctggtgctgacaggatctagcgagcgtgagtgccagggcaatggagtgtggtccggcacagaacccatttgcagacagccttattcatacgatttccctgaagacgtggcaccagctctcgggacaagtttttctcatatgcttggcgctactaaccccacacagaaaactaaggatcatgagaatggcactggtactaatacctacgcagccttaaactcggtctatttgatgatgaataatcagatgcgcctgttgggaatggaaacaatggcgtggcaggaaatcagacacgctataatccttctgacagacggcaaatccaacatggggggaagccccaagactgccgtagatcacatccgcgagatcctgaatatcaatcagaagcggaacgactatttggatatctacgcaatcggtgtcggcaagctcgacgttgattggcgggaactgaatgagctcgggtcaaagaaggacggcgaacggcatgccttcatattgcaggacacaaaggccttgcaccaagtgtttgagcacatgttagatgtatccaagttgactgacacgatctgtggggtgggcaacatgtccgccaatgcgagcgatcaggagcggaccccctggcatgtgactatcaaaccgaaaagccaggaaacttgccgtggcgcactgatctctgatcaatgggtgctgaccgctgctcactgctttcgggatggtaatgaccactccctgtggagagtcaatgtgggcgacccaaagtctcaatgggggaaggagtttctcattgaaaaagctgtgatttcaccaggctttgatgtgtttgccaaaaaaaaccaggggatcctggagttctacggcgacgacatcgccctactcaaactggcgcagaaagtaaagatgagtacacacgcacgcccaatttgtctgccctgcaccatggaggccaacctggccctccgtcgccctcagggcagtacttgccgcgaccatgagaatgagttattgaacaagcaaagtgtacctgctcactttgttgccttgaatggatccaaactgaatataaatttgaaaatgggtgtagagtggacatcttgtgcagaggtcgtcagccaggagaagaccatgtttcctaatctgaccgacgtgagagaagtggttactgaccagttcctctgctccgggacccaagaagacgaaagcccttgcaaaggggtcactaccacaccatggagtctggccagaccacagggttcttgcagtctcgaaggtgttgaaattaagggaggatcattcagactgttgcaggaaggccaggctctggaatacgtgtgcccttctgggttttatccttacccagtgcagactcggacctgtaggagcaccggatcttggtccactttaaagacccaggatcagaagaccgtccgtaaggccgaatgccgagccatacactgtcctaggcctcacgattttgagaatggcgagtattggccaagaagcccgtattacaatgtttccgacgagatctccttccattgctatgatgggtataccctaaggggatccgccaaccgcacctgtcaagtgaatggtaggtggtctggtcagaccgccatatgtgacaatggcgctgggtactgcagtaacccgggaattccaattggaactagaaaggttggcagtcagtacaggctggaagatagcgtgacttatcattgcagtagagggctgaccctgcgaggctcacagagaagaacctgtcaagaagggggttcgtggagcggaactgaaccttcttgccaggactcattcatgtatgacacacctcaggaggttgctgaggcatttttatcgagcctgaccgagacaattgagggtgtggacgcagaggacggacacggtcccggtgaacagcagaaaaggaagatcgtgctggacccctccggcagcatgaacatttacctggtactcgatgggagcgactcaattggagcctccaacttcacgggcgcaaagaagtgcctggtgaatctcattgagaaagtggcatcttacggcgtgaagcctagatacgggctggtgacatatgcgacataccctaagatatgggtgaaagtctctgaagctgattcgtccaacgccgactgggtgacaaaacagctcaatgaaatcaattatgaagaccacaagctcaagagcggcaccaacacaaagaaggccctccaggctgtgtacagcatgatgtcttggccggacgatgtcccacccgagggttggaataggacccgccacgttatcattctaatgactgacggtctgcataatatgggaggagaccctatcacagtcattgatgaaataagagatctcctctacattggaaaagataggaaaaatcctcgcgaagattacctcgatgtctatgtctttggcgttgggccattagtcaaccaggtcaatataaacgcccttgcatccaagaaagacaatgaacaacacgtgttcaaggttaaagacatggaaaaccttgaagacgtattttatcagatgattgatgagtcacaaagtctaagtctttgtggcatggtttgggagcataggaaagggacagactatcataagcagccctggcaggccaaaatttccgtgatccgcccttctaagggtcatgagagctgcatgggggcagtggtgtcggagtactttgtgctgaccgctgcacactgctttaccgttgacgacaaggagcatagcatcaaggtgtccgtgggtggggaaaaacgggacctcgagatagaggtcgtgcttttccatcccaattacaacatcaacgggaagaaggaggctggtattcccgagttttatgactatgatgtagccctgattaagttaaagaacaaactgaagtatggtcaaaccatccgccctatttgccttccatgcactgaagggactacacgggctttgcgacttcccccaactaccacatgccagcagcaaaaggaggagctcttgccagcacaagacataaaggcgctgttcgtgtcagaagaagagaagaaactgactcgaaaagaggtgtacatcaagaatggcgacaaaaagggctcctgcgagagagacgcccagtatgccccaggttacgacaaggttaaggatatatctgaggtcgtgacccctaggttcctctgcacaggaggcgtgtcgccctacgctgaccccaacacgtgtcgcggagattccggtggcccattgatcgtgcacaaaagatctcgattcattcaggttggagtgatctcctggggggtcgtcgatgtgtgcaaaaaccaaaagcgccagaagcaggtcccggctcacgcacgcgacttccatatcaatctgtttcaggttctgccttggctgaaggagaaactgcaagacgaggaccttggattcctgtag

SEQ ID NO: 219111 - DNA, 3801 bp, synthetic construct
  misc_feature 1..3801: note = Description of Artificial Sequence: Synthetic coding sequence
  source 1..3801: mol_type = other DNA
atggggcctctgatggtgcttttttgcctactgtttttgtaccccggtctggccgacagcgccccttcctgccctcagaacgtgaatatcagtggtgggacgttcacactgtcccatggatgggcccctggctcactgctgacttacagctgtccacagggtctgtatccctcacccgctagtcgcctgtgcaaaagttctggccagtggcaaactcccggagccacaagaagcctgagcaaagccgtgtgcaagccaggccattgtcccaatcccggtataagcctgggggctgttagaactggttttaggtttggacacggtgacaaagtgaggtatcgctgttcctccaatctggtgctgacgggctcatcagaaagagagtgtcaaggcaatggggtctggtcaggaacagagcccatctgtcgccaaccttattcttacgactttcccgaggatgtcgctcccgctctcggcacttcatttagccatatgttaggagcaacaaatcccacacagaaaacaaaggaccacgaaaacggtacaggaaccaacacctacgccgctcttaactcagtttatctgatgatgaataatcaaatgagacttttgggtatggaaacgatggcctggcaggagatacggcacgctataattcttttgactgatgggaaatccaacatgggcggttcccccaagacagctgtggaccacatacgagagatcctcaatattaatcaaaaacgcaacgactatctggatatctacgccatcggagtgggaaagctcgacgtcgattggagagaactgaatgaactgggctcgaagaaggatggagagaggcatgcattcattctccaagacaccaaagcacttcaccaggtgtttgaacacatgctggacgtttcaaagctcactgacaccatatgcggagtgggcaacatgagcgctaatgcatcagaccaggagcgcacaccctggcacgtgaccatcaagcccaaaagtcaggagacttgcagaggagctctgatttcagatcagtgggtcttgacagcggctcattgttttcgggatggcaacgaccatagtttatggagggtcaatgtgggcgaccctaaatcccagtggggaaaggaatttctgattgagaaagctgtcattagtccaggcttcgacgtcttcgccaagaaaaaccagggaattttagagttctacggagatgatattgcactgctgaagcttgctcagaaggtaaagatgagtactcatgccagacctatatgcttgccctgcacgatggaggcgaaccttgctctgcgacgaccgcagggcagcacttgcagagaccacgaaaatgagctcctcaacaagcagtcagttcccgcacacttcgttgcattgaatggctccaagctgaatatcaacctgaagatgggggtggaatggaccagctgcgctgaggtggttagccaggagaaaacaatgtttcctaacctgaccgatgtgcgagaagtagtaactgaccagttcctctgctctgggacacaagaagatgagtcaccctgtaagggggtcacaaccacaccctggtccctcgccaggccacagggatcgtgttccctagaaggtgttgaaattaaggggggaagttttcggctgcttcaagagggccaggctctggaatacgtctgtccttctggattttatccctaccccgtgcagacccgaacctgcagatccacaggttcctggtctaccctgaagacgcaggatcaaaaaactgtccgaaaagccgaatgtcgagccatacattgcccaaggccacatgatttcgagaacggagaatattggccgcgatctccctactacaacgtaagcgacgagataagcttccactgctatgatgggtatacactgagaggctccgcgaacaggacatgccaggtgaacgggagatggagcggacaaacagctatctgtgacaacggtgctggatactgttccaatcccggaattccaattggcacgagaaaagtgggtagccagtatcgactcgaagacagcgtgacataccattgcagtagaggattgacactgcgcggatcacagcggaggacctgccaggagggcggatcttggtcagggaccgaacctagctgtcaagatagtttcatgtacgatacgccccaggaggtcgctgaagccttcctgtcatcccttactgaaaccattgagggtgtcgatgcagaagacggccacgggccaggcgagcagcagaaaagaaaaattgtattggatccatctggcagcatgaacatctacctagtactcgatgggagcgatagtattggtgcttctaactttactggagctaagaagtgtctggtgaatctgatagagaaagtggccagctacggggtgaaaccacggtatggtctggtgacatacgctacctatccgaagatctgggtgaaagtctcagaagccgattcatcaaacgcagattgggttacgaagcagctgaacgagataaactatgaggaccacaagcttaagagcgggaccaacactaaaaaggcactgcaggcggtatatagtatgatgtcttggccggacgacgttccacccgagggttggaatcggacaagacatgtaattattctcatgactgacggactgcacaacatgggcggagatccgatcacggtgatcgatgagattcgggatttgctgtatattgggaaagataggaagaacccaagggaagattacctggacgtgtatgtgtttggggtcggtcctctggtgaatcaggtgaacattaatgcgctcgccagtaaaaaagataatgaacagcatgtgtttaaagttaaggatatggagaatctggaggacgtcttttaccagatgatcgacgagtcacaatctctcagcttgtgcggaatggtttgggagcatcggaagggtactgattatcataaacagccctggcaagccaagatctctgtcattcggccttccaagggtcacgaaagctgtatgggagcagttgtcagcgaatactttgtattgactgctgcccactgtttcaccgtggatgacaaagaacactctattaaggttagcgtgggaggagagaagcgagacctcgaaatagaagtggtactttttcatccgaattataatataaacgggaaaaaagaagctggtatccccgagttctacgattacgacgtggccctcataaaactgaagaataagttgaagtacggccagaccatccggcctatatgtctcccttgtacagagggtaccactcgggctttaagactacccccaacaacgacatgtcagcagcagaaggaagaattgttgcccgctcaggacattaaggcccttttcgtttcagaggaggaaaaaaagctgacacggaaagaggtctacataaaaaatggggacaagaaggggagttgcgaacgggatgcacagtacgctcccggatatgacaaggtcaaagatatttctgaggtggtgacccccaggtttctttgcacagggggagtttcaccttatgcagatcctaacacttgcagaggagactctggcggaccgctgattgtgcataagcggagtcgtttcatccaggtgggggtcatctcttggggcgtggtcgatgtgtgcaagaaccagaagcgccagaagcaggtgccagcgcatgcccgagactttcacattaacctcttccaagtcctgccctggctcaaggaaaaactgcaagacgaggatctgggtttcttgtag

SEQ ID NO: 219112 - DNA, 3801 bp, synthetic construct
  misc_feature 1..3801: note = Description of Artificial Sequence: Synthetic coding sequence
  source 1..3801: mol_type = other DNA
atgggccctcttatggtgcttttctgtctgctgtttttgtatcccggactagccgactctgccccaagttgcccccagaacgtgaatatctctggagggacatttaccctctcacatggctgggctcccggatccttgctgacttacagctgtccgcaaggactatatccaagtcctgcctcgcgcctttgcaaatctagtggacaatggcaaacacctggcgctacaaggtccctgtccaaggccgtctgcaaacccggacattgtcctaatcccggaatttccctgggtgcagttaggaccggatttaggtttggacacggggataaggttcgatacagatgctcctctaaccttgtgctaacgggcagttcagagcgcgagtgccagggaaatggcgtatggtccggaacagagcctatctgtcgtcagccttattcttacgactttccagaggatgtcgctccagccttaggaacttccttttcccacatgcttggagctaccaatccaactcaaaaaactaaggaccacgagaacggaacgggtaccaacacatacgccgctctgaattctgtgtaccttatgatgaataaccagatgcggctactgggcatggagacaatggcttggcaggaaatccgccacgcaatcatcctgctcacagacggtaagagcaatatgggcggtagcccgaagacagctgtggaccacattagggagatcctgaacatcaatcagaagcgaaacgattacctcgacatttacgccatcggggtgggaaaactggacgtcgactggcgagagttgaatgagttgggctctaaaaaggatggcgagcgacacgccttcatcctgcaagacactaaagcactccatcaggtcttcgaacatatgctcgacgtatctaaactcaccgatacaatctgtggggtgggcaatatgtcagccaatgcatcggaccaagagcgcaccccttggcacgtgacgatcaaaccaaagtcccaagagacatgccgcggtgcactaatctccgaccagtgggtcctgaccgctgcccactgttttcgagacggcaacgaccacagtctctggagggtaaatgtgggggatcccaagtctcagtggggaaaggagtttctgatcgaaaaggcagtgatttctcctggattcgacgtttttgccaaaaaaaatcagggcatactcgagttctatggtgatgacattgcgttgctgaaacttgctcagaaggtaaagatgtcaacccacgccaggccaatatgtcttccttgtaccatggaggcaaaccttgctttacgcaggccacaaggtagtacctgcagagaccatgaaaacgaactgctcaacaaacagtcagtccctgcgcatttcgtcgccctgaacggatcgaagttaaacattaatttgaaaatgggcgtggagtggaccagttgcgcagaagtagtgagccaggagaagactatgttcccaaacctgactgacgtgagggaagtggttacagaccagttcctgtgctccgggacccaggaagacgaaagtccctgtaaaggcgttaccaccaccccctggagcctagcaaggccacagggcagttgctcattagagggagtggagattaagggcggatcctttcgccttctgcaagaaggccaagcactggagtacgtctgtccctccgggttctatccatacccagttcagacccgcacttgccggtctaccggtagctggagtactttaaaaacacaggatcagaagactgtcagaaaagcggagtgtcgcgcaatccactgcccacgccctcacgactttgagaacggagagtactggccacggtcaccgtattataacgtgagcgatgagatcagttttcattgttatgacggctatacgctgagaggatctgccaaccgtacatgccaggtcaacggacgatggtctggacaaacagcaatctgcgataacggcgctgggtattgttctaaccccggaattcctattggcactaggaaggtaggtagtcagtatcgcctcgaggacagtgtcacctaccactgtagcagaggattgactctaaggggttctcaacggagaacctgccaggaagggggatcgtggtcaggaaccgagccgtcttgccaggactccttcatgtacgataccccgcaggaagtggctgaagcgtttctctccagtctcaccgaaactatcgagggagtggatgccgaggacggacacggccctggagagcagcaaaagcgcaagattgtgctggatccttcgggcagcatgaatatttacctggtgttagatggtagcgatagcattggcgcttcaaatttcactggcgctaagaagtgtctggtcaacctgatcgagaaggttgcctcctacggcgtcaagcccaggtacggacttgtgacatatgccacgtatccaaaaatttgggtcaaggtctcagaggctgatagtagtaacgctgattgggtgacaaagcagctgaatgaaattaattacgaggatcacaaactgaaaagtggtacaaacaccaaaaaagctctgcaggctgtctactcaatgatgtcatggcccgacgacgttcctcccgagggctggaataggacacgacatgtcataatactgatgaccgatgggctgcataacatgggaggcgacccaattactgtcatagatgaaatccgcgacctactctacatcggtaaggacaggaaaaacccaagggaagattatctcgacgtgtatgtctttggtgtgggcccactggtgaatcaagtcaatatcaatgctctggcatccaagaaagataacgagcagcatgtctttaaagtaaaggatatggagaatcttgaggacgtgttctaccaaatgatcgatgagtctcagtcactctctctatgtggtatggtgtgggagcatagaaaggggacagactaccacaagcagccctggcaagccaaaatttccgtgatccggccttccaagggacatgaaagctgcatgggcgctgtggtatccgaatattttgttttaacagccgcacactgttttacggtggatgataaagaacactcaatcaaagtttcggttggaggtgagaaacgggacctggaaattgaggtcgttttatttcaccccaattataacattaacggcaaaaaagaggcaggaatccctgaattttacgactatgacgtcgcattgatcaagttaaagaataaactgaaatatggacagacaatccggccaatttgcctgccttgtaccgagggaactactagggcgttaagactgccacccactactacgtgtcaacagcagaaagaagagctccttccagctcaggacattaaagccctgttcgtgagcgaagaggagaagaagcttactaggaaagaggtctatatcaaaaacggtgacaaaaaaggatcctgtgaacgtgatgcgcagtatgcgccaggctacgacaaggtgaaggacatctccgaagttgttacacctcgattcctatgcaccggaggcgtgagtccatacgccgacccaaacacatgcaggggagattcaggcggaccactcattgtgcataaacgctccagatttatacaggttggtgtgatctcttggggcgttgtggatgtgtgcaaaaatcagaagaggcagaagcaagtgccagcccacgcaagggacttccacattaacctgtttcaagtgctcccctggctcaaggagaaattgcaagatgaggacctgggctttctgtag

SEQ ID NO: 219113 - DNA, 3801 bp, synthetic construct
  misc_feature 1..3801: note = Description of Artificial Sequence: Synthetic coding sequence
  source 1..3801: mol_type = other DNA
atgggaccacttatggtacttttctgcctgttattcttatatcccggattggcagatagcgctccctcatgccctcagaacgtgaatatctcgggaggcactttcactctatctcacggatgggccccagggtccctgctgacctacagctgtccacagggtctgtacccatcccccgcttcgcgcctctgcaaatcgtcgggtcaatggcagacaccgggagctactcggagcctttcaaaagcagtttgtaagcccggacactgccccaatccagggatcagtttgggtgcggtccgtactgggttccgattcggccacggtgacaaggtgcggtaccgctgttcctccaacctggtactaacaggttcctctgaacgagaatgtcagggcaacggagtctggtccggcaccgagcccatatgtcgccaaccctactcctacgatttcccggaagatgtggcccctgcattaggtacatcttttagtcatatgctgggagccaccaacccaacccaaaaaaccaaggaccatgaaaacgggaccggcactaacacatacgccgcactgaacagcgtgtatcttatgatgaacaaccagatgcgcctgctgggaatggagacgatggcctggcaggaaattcgccacgccattatcctgctcactgacggcaagagtaacatgggagggagccccaagaccgccgtcgatcacatacgggagatccttaatatcaaccagaagcgtaatgactatcttgacatttatgcaatcggagtgggaaagctggatgtcgattggagggaactgaacgagctgggttcaaaaaaagacggtgagcggcacgcatttatcctacaggacacaaaggccctccaccaggtgttcgagcatatgctggatgtgagcaaactgacagacaccatatgcggcgtgggcaatatgtctgcgaacgcctccgaccaagaacggaccccgtggcacgtcacgataaaacctaagagtcaggagacctgtaggggcgcactcatttctgaccagtgggtcctgaccgcagcccactgctttagggatggaaatgatcacagtttatggcgtgttaatgtgggagatccaaagagccaatggggtaaagagtttctcattgaaaaggcagtgatcagcccaggcttcgacgttttcgccaaaaaaaaccaggggattttagagttttatggagatgacattgcattgctgaagcttgctcagaaagtcaaaatgtcgactcatgcgcgtcccatctgcctgccttgcacaatggaggctaatctggctcttcgcagacctcagggttccacttgccgggaccacgaaaacgagttattaaacaagcagagtgtccccgctcattttgtggcactcaacgggtccaagctgaacatcaatctgaagatgggtgtagaatggacttcctgcgccgaagtggtgtcacaggaaaaaacaatgtttccaaacctgaccgacgtgcgagaagtagtgaccgaccaattcctgtgctcgggcacccaagaggatgagagcccgtgtaagggcgtgacgacaactccgtggtctctggcgaggccccagggctcctgttcgcttgagggcgtcgaaataaagggaggcagcttcaggctattgcaggaaggacaggccctggaatatgtatgtccatcaggattttacccatatccagtgcaaacaaggacttgtcgcagtactgggtcctggagtaccttgaagacacaagaccagaagaccgtacggaaggcggagtgcagggccatccactgcccaagaccacacgatttcgagaacggggagtattggccgcgatctccatactataatgtatccgacgagatctctttccactgttatgacggctataccctgagggggtccgccaacaggacttgccaggtgaacggaagatggagtgggcaaacagcgatatgcgacaatggggcaggctactgcagtaatccgggtattcctattggcacccgaaaggttggatctcagtatagacttgaggactcagtcacctatcattgttcaagagggctgacattgcgcggttcacagcggagaacctgccaggaagggggatcgtggagtggcaccgagcctagctgtcaagactcctttatgtatgacacaccccaggaggtcgccgaggcttttctgagttctctgactgagacaattgagggcgttgacgccgaagacgggcacggtcccggagagcagcaaaagagaaaaattgtgcttgatcccagcggtagcatgaacatctacctggtgctggatggatccgatagcattggggcatccaatttcactggcgctaagaaatgcttagttaatttgatcgagaaggtggcttcttatggcgtgaagcctagatacggcttggtgacctatgccacataccctaaaatctgggtgaaggtttcagaggccgatagttccaatgctgactgggttacaaaacagctgaatgagattaattacgaagatcataaactgaagtccggtaccaacaccaaaaaagcactgcaggctgtgtattctatgatgagctggccagacgacgttccacccgaaggctggaatcgaactcggcacgttattatattaatgacagacggcctgcacaatatgggtggagatcccatcacagttattgatgagatcagagatttactttatatcggaaaagatagaaagaacccgcgagaggattacttggatgtttacgtcttcggcgtaggaccattggtaaatcaagtgaatatcaatgctctggcgagtaaaaaagataatgagcagcacgtcttcaaagttaaggatatggagaacctggaagatgtcttctaccagatgatagacgagtcccagagcctatcattgtgtggaatggtgtgggaacaccggaagggaacagattaccataagcagccctggcaggctaaaatcagcgtgataaggccctccaaagggcatgagagttgtatgggggctgtggtgtccgaatacttcgtgctcaccgcggctcattgtttcacagtggacgacaaagagcactccatcaaagttagcgtgggtggcgaaaaacgtgatttggaaatagaggttgtgctctttcatccgaattacaacataaacgggaagaaggaggccggaattcccgagttctatgattatgacgttgcccttattaagctgaagaataagctgaaatacggtcaaacaatacggcctatttgtctgccctgtaccgaaggcactacaagagcactgcggcttccaccgaccacaacatgtcagcagcagaaggaggaactcctgcccgctcaggacatcaaagccctgtttgtttctgaagaggaaaaaaagctgacacggaaagaagtgtacattaagaacggtgacaaaaagggctcatgcgaacgcgacgcacagtacgcccctggctatgataaagttaaggatatttccgaagtcgtgaccccacgattcttgtgcaccggaggagtgagcccctatgccgatcccaacacgtgtcgtggagacagcggagggccactaattgtgcataagcgaagtcggtttattcaggtcggcgttatctcttggggcgtcgtggacgtttgcaagaaccaaaaacggcaaaaacaagttccagcccatgccagggacttccacatcaacctgtttcaggtgctaccatggctcaaagagaagctccaggatgaggaccttggattcctgtag

SEQ ID NO: 219114 - DNA, 762 bp, synthetic construct
  misc_feature 1..762: note = Description of Artificial Sequence: Synthetic coding sequence
  source 1..762: mol_type = other DNA
atgcattcatgggaaaggctggcggtgcttgtgctgctgggtgcagccgcttgcgccgctcccccaagggggaggattttgggcggaagagaagccgaggcacacgcgcgaccctatatggcgtctgtgcagttgaatggggctcatctgtgcggcggagtacttgtggctgaacagtgggttctctcggcagcccactgtctggaggatgcggcagatggaaaagtacaggttctactgggagcccattcgttgtcacagccagagccttccaagcgcttgtacgacgtgttacgggcagtgccgcaccctgactcgcagcccgataccatcgaccatgatcttctgctgctgcagctttccgaaaaggcaacgttaggtcccgcagtacggcctcttccttggcagcgagtcgaccgggatgtggcccctggcactctgtgcgatgtggcagggtggggtattgtgaatcatgccggacggagaccagattccctccagcatgtgctcctcccagtcttagacagggctacttgtaatcggcgtacacaccacgatggcgctattacggaacgtctcatgtgtgccgagtccaataggcgtgattcatgtaagggggacagcggtgggccactggtatgtggaggtgttctggagggggtggtcacatctggttccagggtgtgcggcaacagaaaaaaaccaggcatatacacgcgcgtggcctcttacgcagcatggatcgactccgttctcgcctag

SEQ ID NO: 219115 - DNA, 993 bp, synthetic construct
  misc_feature 1..993: note = Description of Artificial Sequence: Synthetic coding sequence
  source 1..993: mol_type = other DNA
atgtggctactcgtcagtgtgattctgatttcccgaatctcgagcgttggtggtgaagcgacattttgtgattttccgaagattaaccatggcatactgtatgatgaagaaaagtacaaacccttttcccaggtccccacaggtgaggtgttctactatagctgtgagtacaattttgtgagcccgtcaaagtctttttggacccgaatcacatgcactgaggaaggttggtcccctactcccaagtgcttaaggctctgtttttttccttttgtggagaatgggcactctgagtccagcggccagactcacttggagggggacaccgtgcagatcatctgtaacactggatatagactgcagaacaacgagaacaacatttcatgcgtagagaggggatggagcactccaccgaagtgtcgctcaacagacacctcctgcgtcaatcccccaacagtgcaaaatgcccacatactcagcagacaaatgagcaagtatccctctggcgagagagttagatacgaatgccgctctccttatgagatgttcggagatgaggaggtaatgtgtctgaatggcaactggaccgaaccccctcagtgtaaagactccaccgggaaatgcggcccaccaccacccatcgacaacggagacatcacatctttcccactgagcgtatatgccccagcaagctccgtagagtatcaatgccagaacctgtatcagctggagggaaataagcgaattacctgtcgcaatggtcagtggtctgagccacccaaatgccttcatccgtgtgttattagcagagaaattatggagaattacaacatcgctctgcgctggacagcgaagcagaagttgtatctgcgaaccggggaaagcgcagagtttgtctgtaaacgaggctatagattatcttcccgctcccatacgcttagaaccacctgttgggatggaaagctagaatatcctacctgcgccaaacgctag

SEQ ID NO: 219116 - DNA, 813 bp, synthetic construct
  misc_feature 1..813: note = Description of Artificial Sequence: Synthetic coding sequence
  source 1..813: mol_type = other DNA
atgtggttactcgtgtccgtgatcttaatatctcggatcagctcagtcggcggagaggccatgttctgcgatttcccaaagatcaaccatgggattctgtacgacgaggaaaagtacaaacccttctcccaggttccaactggcgaagtgttttactactcttgcgaatacaattttgtgagcccaagtaagtccttttggacaagaattacgtgcgccgaggagggatggtcacccactcccaagtgcctgcggttgtgtttttttccattcgtggagaatggccactccgagagcagcggtcagacccatctggagggggacactgtgcagatcatctgcaataccggctatcgactgcagaacaatgaaaacaatatttcctgcgtggaacggggatggtctactccacccaagtgcaggtcaactataagcgcggagaagtgcgggcctcccccaccaattgacaatggggacataacatcttttctgttatccgtgtacgcccctgggtcctcagtggagtaccagtgtcaaaatctgtaccagctggaaggaaataaccagattacatgtaggaacggccagtggagcgagcccccaaagtgtttggatccatgcgtcatctctcaggagattatggaaaaatacaacatcaagttgaaatggaccaatcagcaaaagctgtacagcaggacgggcgacatcgtggaattcgtgtgcaaatcagggtaccatccaactaagagtcactctttccgcgcaatgtgtcagaatggcaagctagtgtatcccagctgtgaagaaaaatag

SEQ ID NO: 219117 - DNA, 813 bp, synthetic construct
  misc_feature 1..813: note = Description of Artificial Sequence: Synthetic coding sequence
  source 1..813: mol_type = other DNA
atgtggctgttagtatctgtgatactgatctcacgcatttcttccgttggaggggaggccatgttttgtgactttccaaagattaaccatggaatactgtatgatgaggagaagtataagcccttctcgcaggttcctaccggcgaagtgttttattactcctgcgaatataattttgtgtcgccttctaaatccttttggacccgtatcacctgcgctgaggagggatggtcccctacaccaaagtgtctccgcctctgcttttttcccttcgtcgagaatggccacagtgagagctcaggccaaacgcacctagagggcgacacagtccaaattatctgcaataccgggtatcgtctgcagaacaacgagaataacatcagctgtgtggagagaggctggtcaacaccccctaaatgtaggtccactatctcagccgagaaatgtggccctccacctcccatcgataatggcgacatcacatctttcttgctgtccgtttatgctccagggtcttcagtcgagtaccaatgccaaaatctataccagctcgagggcaacaaccaaatcacatgccgaaatggacagtggagcgaaccccctaagtgtcttgacccgtgtgtcatctctcaggagattatggagaaatacaacattaagttaaaatggaccaatcagcagaagctctactcacggactggggacattgtggaatttgtgtgtaaaagcggctaccacccaaccaagagccattcattcagggccatgtgtcagaatgggaagctcgtctatccaagctgtgaagaaaagtag

SEQ ID NO: 219118 - DNA, 993 bp, synthetic construct
  misc_feature 1..993: note = Description of Artificial Sequence: Synthetic coding sequence
  source 1..993: mol_type = other DNA
atgctgctgctaattaacgtcatcttgactttgtgggtgtcctgtgctaatggccaggtcaagccgtgtgactttccggacatcaaacacgggggtctttttcatgaaaatatgcgcagaccatattttccagtggctgtcggtaagtactactcgtactactgcgacgaacacttcgaaacgccaagtggatcttattgggattatattcattgtacccagaatggatggtcccccgctgtaccctgtttgagaaagtgttacttcccgtatttagagaacggttataatcagaattatggcaggaaattcgtccaaggcaactccactgaagtagcatgccatcccggatacgggttgcccaaggctcagactaccgtcacatgtaccgagaagggttggtcacctaccccaaggtgtatcagagtgcggacgtgcagcaaatctgacatcgagatcgaaaacgggttcatttcggaaagctccagcatatacatccttaataaagagatccagtataagtgcaagccaggctatgccacagcagatggtaatagtagtgggagtattacctgcctgcagaacgggtggtctgctcagcctatctgcatcaattcttcggagaagtgcggaccccctccccctatttcgaacggcgacacgacatccttccttctcaaggtgtatgtaccccagtcccgggtcgagtatcagtgtcaaccttactatgagctccagggttctaactatgttacttgttcaaatggagaatggtctgaaccaccaagatgcatacatccatgcataattaccgaggagaatatgaacaagaacaacataaagctgaagggtagatcagacagaaagtactacgcaaagacaggggacacaatagaatttatgtgcaaactggggtataatgctaacacctccattctctctttccaggctgtctgtagggaagggattgtcgagtatccccgttgtgagtag

SEQ ID NO: 219119 - DNA, 588 bp, synthetic construct
  misc_feature 1..588: note = Description of Artificial Sequence: Synthetic coding sequence
  source 1..588: mol_type = other DNA
atgctcctgttgatcaacgtgatcttgaccctgtgggtgtcatgtgctaacggacaagtaaagccttgcgattttccggacatcaagcacgggggactgtttcatgagaatatgcgacgaccctatttccctgtggcagtgggcaagtattactcctactattgcgacgagcactttgaaaccccctccggctcgtattgggactatatacattgcactcagaatggctggagtccagcggttccttgtttgcgaaagtgttatttcccatatctggagaatggatacaatcaaaattacggcagaaagtttgtccaggggaattcaaccgaggtggcatgccaccccggatacgggctcccaaaggctcagaccacagtgacatgtaccgagaaaggctggtctccgaccccacgatgcatacgggtcaggacatgttctaaatccgatattgagatcgagaacggctttataagtgagagctcctccatttatatcctaaacaaagagattcaatataaatgcaagcccggatacgctacagctgacggtaacagcagtgacatggtcttctgtatttcttactag

SEQ ID NO: 219120 - DNA, 810 bp, synthetic construct
  misc_feature 1..810: note = Description of Artificial Sequence: Synthetic coding sequence
  source 1..810: mol_type = other DNA
atgctattgcttatcaatgtgattctgacactgtgggtcagttgcgcgaacggacaggtgaagccttgcgacttcccggacattaagcatggaggtctgtttcacgaaaatatgcgcagaccttattttcccgtggcggttggtaaatactatagctattactgtgatgaacatttcgaaaccccatccggttcatattgggactacatacactgtacgcagaacggttggagtcctgcggtgccatgcctgcgaaaatgttactttccatatttggaaaacggatacaaccagaattacgggcgaaaattcgtccagggcaattccactgaggtggcttgccatcccggttacggcctaccgaaagctcagactaccgttacatgcactgagaaggggtggtctccaaccccacggtgtattcgagtgaactcttccgagaagtgcgggccacctcctcccatttccaacggcgacacgactagttttctccttaaggtttacgtgccgcagtcaagggttgagtatcagtgtcagccatactatgaactacaggggtccaattatgtgacctgctcaaatggggaatggagtgagcctcccaggtgtatccatccatgtatcataaccgaggagaacatgaacaagaacaatatcaaactgaaaggtcgttccgaccgcaaatattacgctaagacaggggataccatagaatttatgtgcaaactgggctataatgccaatacctctattttgtcgttccaagccgtgtgtagggagggcattgttgaatacccacgttgtgagtag

SEQ ID NO: 219121 - DNA, 996 bp, synthetic construct
  misc_feature 1..996: note = Description of Artificial Sequence: Synthetic coding sequence
  source 1..996: mol_type = other DNA
atgctgctcttaatcaatgtaatcttgaccctctgggtctcatgtgcgaatggccaggaagtgaagccttgtgacttcccagaaatccagcatggaggcctctactataaaagtctgagacggctgtactttccggcagccgcaggccagtcctacagttactattgtgatcagaactttgtgactcccagcgggtcttactgggactacattcactgtacccaggatgggtggtccccgaccgtcccctgtctcaggacatgcagtaagtcagacattgagatcgaaaacggttttatctcggaatccagcagtatttatatcctaaacaaagagatacagtataaatgtaagccagggtacgcaacagccgacggcaacagttctggcagcatcacatgcctgcagaacgggtggtccgcccagccaatatgcatcaagttctgtgatatgccggtgtttgagaactcgcgcgcaaagtccaacggcatgcggtttaagcttcatgacacgctggattacgagtgttatgatggctatgagatttcttacggcaataccacaggaagcatcgtttgtggtgaagacggatggtcacacttccccacatgctacaattcttcagagaaatgcgggcctccaccacccatcagcaatggggacactactagctttctgttgaaagtttatgtccctcaatctagggtggaataccagtgccagagctactacgagcttcagggctccaattacgtgacttgttctaatggtgagtggtccgaaccacctcgctgcatacatccctgcattatcacagaggagaatatgaacaagaacaacattcagctcaaagggaagagcgacatcaagtactatgcaaaaacaggggacaccatcgaatttatgtgtaagttgggttataatgcaaatacctcggtgctctcattccaggccgtttgccgggagggcattgttgaatatcctcgttgtgaatag

SEQ ID NO: 219122 - DNA, 1734 bp, synthetic construct
  misc_feature 1..1734: note = Description of Artificial Sequence: Synthetic coding sequence
  source 1..1734: mol_type = other DNA
atgctcctcctgattaacgtcatcctaacgctgtgggtttcctgcgctaatggtcaagttaaaccctgcgacttccctgaaattcagcacgggggactctattataaatccctcagaaggctctactttccagctgccgcaggacagtcttacagctattactgcgatcagaattttgtgactccttcgggctcttactgggattatatccactgcactcaggatggttggagcccaaccgtcccatgtcttcgcacctgcagcaagagcgacgtggagatagagaatggctttatcagcgaatcatcatccatttacatcttgaacgaagagacccagtataactgcaagcctgggtacgccaccgccgaaggcaacagctccggcagcattacctgcttgcagaacggttggagcacacagcccatatgcatcaaattctgcgacatgcctgtgttcgagaactctagagcaaaaagcaatggcatgtggttcaaactgcatgatacgctggactacgagtgctacgacggatatgagtcatcatacggtaacactacggacagtatcgtgtgcggggaggacggatggtctcacctgcctacctgttataattccagtgagaattgcggcccaccccctcccatctctaatggagacacaactagttttcctcagaaagtttaccttccctggtctcgtgtcgagtatcagtgtcagtcttattacgaactgcagggcagtaaatacgtaacctgctcaaacggggattggagcgagcccccaaggtgtatttccatgaagccatgcgagttccctgagatacagcatggccacttgtactatgagaacacgcggcgaccatacttccctgtggctacaggtcagtcatatagctactactgtgaccagaatttcgtcacccccagtggaagttattgggattacattcattgcactcaggatggttggcttcctacagtgccttgtctgcgcacttgctccaagagtgacatcgagattgagaacggttttatcagcgagagctcctctatttatattctcaataaagagatccagtataagtgcaagcctggatatgccaccgcagacggaaacagctcggggagcataacatgtcttcagaacgggtggagcgctcaacctatctgtataaagttttgcgatatgcctgtgttcgagaactcgcgagccaagtccaacgggatgaggttcaagcttcatgacacccttgactacgagtgctacgacggttacgaaatttcctacggaaatacaacggggagtatcgtctgtggtgaggatggctggtcccatttcccaacttgctacaactcaagtgaaaagtgcggtcctccccctcctataagtaacggcgacacgaccagttttctactgaaagtgtatgtgccccagtcacgggtcgagtaccagtgtcagagctactatgaactccagggctccaattacgtcacttgctccaatggggagtggagcgaaccgccaagatgtatacacccatgcataatcactgaggaaaacatgaacaagaacaacatccagctcaagggaaaaagcgatattaagtattacgctaaaacaggggacactatcgaattcatgtgtaaattaggctataatgccaatacctccgtactctcatttcaagccgtgtgtcgggagggaatcgtggagtatccacgctgtgagtag

SEQ ID NO: 219123 - DNA, 996 bp, synthetic construct
  misc_feature 1..996: note = Description of Artificial Sequence: Synthetic coding sequence
  source 1..996: mol_type = other DNA
atgcttctgttaatcaatgtgatccttaccctgtgggtgagctgcgccaacggacaggctatgaaaccctgtgagtttcctgaaatccagcatgggcatctttactacgagaacacccggcgtccctatttcccagtggcaaccggccagagctattcctattactgtgatcagaatttcgtcactccatcaggctcttattgggactatatccattgtacacaagatggatggctccctaccgtaccttgtctccgcacttgctctaagagtgacatcgagatagaaaatggatttattagcgaatcctccagcatttatatactcaataaagagatccagtacaaatgtaagccaggctacgccactgcggatggaaactcaagcgggagtattacatgcctgcagaacggatggagcgcacagcctatctgcatcaaattttgtgacatgcctgtatttgagaattcaagggccaaatctaacggtatgcgattcaagctacacgacacattggactatgagtgctacgacgggtatgagatcagctacgggaacacaaccgggtctattgtctgcggagaggatggttggtctcattttcctacatgctataacagctctgagaagtgcggccctcctccaccaatctcaaatggagatactacaagctttttactgaaagtttacgtacctcaatcaagagtggagtaccaatgtcagtcatattatgaactccagggaagcaactatgtcacttgttctaacggtgagtggagcgagccaccacggtgtatccatccatgcatcatcacagaggagaacatgaacaaaaacaacattcagcttaaggggaagagtgacattaaatattatgcaaagacgggagacactatcgagttcatgtgcaaactcggatacaatgctaacacctctgtgctgtcattccaagctgtatgtagagaagggattgttgaatatcccagatgcgagtag

SEQ ID NO: 219124 - DNA, 996 bp, synthetic construct
  misc_feature 1..996: note = Description of Artificial Sequence: Synthetic coding sequence
  source 1..996: mol_type = other DNA
atgcttctgctgataaacgttattcttacactgtgggtgtcttgcgccaatggccaggaagtgaagccttgtgatttcccggaaattcagcacggtggtctgtactacaagagtttgcgccgtctgtacttccctgctgcggctggccagtcttactcctattattgcgatcagaatttcgttacaccttctggctcttactgggattacattcactgtacccaggacgggtggttacccacagttccctgcctgagaacttgtagtaaaagtgacatcgagattgagaatggctttattagtgagagctcctccatctatattctgaacaaggagattcagtacaagtgcaagcccggatatgcaaccgcagacggcaactcatccggctccataacctgtctgcagaacggctggtcagctcagcccatctgtatcaagttctgcgacatgcccgtatttgagaacagcagagccaaaagcaacgggatgaggttcaagctccacgataccttagattacgagtgctacgacggctacgagatttcatacgggaatactactggttccatagtttgtggagaagacggttggtcccatttccccacctgttacaactcctctgaaaaatgtggcccacctccccctattagtaatggtgacaccacaagctttctcctgaaggtttacgtcccccagtctcgggtggagtatcaatgccagtcttactatgaattgcagggctcaaattatgtgacatgctccaatggggagtggagtgagccgcctagatgcatccatccatgtatcatcaccgaagaaaatatgaacaagaacaacattcaactcaaaggcaaatccgacataaagtactacgccaagacgggtgacaccattgagtttatgtgtaagctcgggtacaacgctaatacatctgtgttgtcctttcaggccgtgtgtcgcgaagggatagtggaatatccgcgttgcgaatag

SEQ ID NO: 219125 - DNA, 1752 bp, synthetic construct
  misc_feature 1..1752: note = Description of Artificial Sequence: Synthetic coding sequence
  source 1..1752: mol_type = other DNA
atgaaacttcttcatgtgtttctcttgtttctatgtttccatctacgcttttgtaaggttacatatacgtcccaggaggacctggttgaaaagaaatgcttagctaagaagtatacacacctgagttgcgataaagtcttctgtcagccctggcagaggtgcattgaaggcacctgtgtgtgtaaactcccctatcagtgtcccaaaaacggcaccgctgtatgcgccaccaacaggaggagttttccaacttattgccagcagaaatcccttgaatgcctacatcccggaacaaaattcctcaataatggcacatgcaccgccgagggcaaattcagtgtatcactcaagcacggtaacactgatagtgagggaatcgtggaagttaagctggtggaccaagataagactatgtttatctgcaaaagtagttggagcatgcgggaagcgaatgtggcctgtctggatttgggcttccaacagggagctgatacacagaggagattcaagctgtctgatctgtccatcaattcaacggagtgtctccatgtgcactgtaggggccttgaaacctcccttgcagagtgcacctttacgaagcggagaacaatggggtaccaagattttgccgacgttgtctgctacactcaaaaggccgattcacctatggatgacttcttccagtgtgttaatggaaagtacatctcccaaatgaaggcttgtgatggtattaacgattgtggcgaccaaagtgacgagttgtgctgcaaagcgtgccaggggaagggtttccattgtaaaagcggtgtctgcatcccttcacagtaccaatgcaacggcgaggttgattgcatcaccggagaggacgaggtgggatgcgctggcttcgcctcagttactcaggaggaaacagagatcttaaccgcggatatggatgccgaaagaaggcgcatcaagtccctgttgccaaagctcagctgtggggtcaagaatcggatgcacattaggcggaaaagaatagttggaggcaagcgcgctcagttaggtgacttgccatggcaggtcgcaatcaaagacgcaagcggaattacatgcggtggcatctacataggcggttgttggatcctgaccgccgctcattgtctgagggcttctaagacacatcgttaccaaatttggacgactgttgtagattggattcacccagacctgaagcgaatagttattgaatatgtagaccgtattattttccatgaaaactataacgcgggtacataccagaacgatatcgctctgatcgagatgaaaaaggatggaaataaaaaggactgtgaactgccgcgatccattcccgcatgcgtgccatggagcccttaccttttccaacctaatgatacctgtatcgtgtctgggtggggccgtgaaaaagataatgagcgggtgttttcgctgcagtggggtgaggtgaaactgatatcgaattgcagcaagttctacggtaaccgattttacgaaaaagagatggagtgtgctggaacatacgatggttccattgatgcctgcaagggcgacagcgggggacccttggtctgcatggatgcgaacaacgtgacttatgtgtggggcgtcgttagctggggggagaactgtggcaaacccgaattccctggagtgtacaccaaggtggcaaactatttcgactggatcagctaccatgttgggagaccctttattagtcagtataacgtgtag

SEQ ID NO: 219126 - DNA, 1776 bp, synthetic construct
  misc_feature 1..1776: note = Description of Artificial Sequence: Synthetic coding sequence
  source 1..1776: mol_type = other DNA
atgaagctcctgcatgtgttccttctgttcctttgctttcacttgcggttttgtaaggtcacttacacaagccaggaggatctcgttgaaaagaagtgtctggccaaaaaatacacacacctgtcatgcgataaggtgttttgccagccgtggcagagatgcattgagggaacctgcgtgtgcaagctgccctaccagtgcccaaagaacgggaccgcagtctgcgccaccaacaggagatcgttccctacttattgccagcagaaatctctggagtgcctgcacccagggactaagtttctaaacaatggtacttgcacagccgaggggaagttctccgtgtccctcaagcacggaaacaccgacagcgagggaatagtcgaggtaaagcttgttgatcaggacaagacgatgtttatatgcaaatcgagttggtctatgcgggaggctaatgttgcttgtctagatttaggctttcagcagggtgcagacacacagagaagattcaaactgtccgatctgagcattaactcaactgaatgcctgcacgtgcactgccgtggactcgaaacttctctagctgaatgcacctttaccaagcgtcgaaccatggggtatcaggactttgctgatgtcgtgtgttatacacagaaagctgacagcccgatggacgatttcttccagtgtgtcaatggaaagtacatcagccaaatgaaggcttgtgacggcattaatgattgtggcgaccagtctgatgagctatgctgtaaggcctgccagggtaaggggttccactgtaaaagtggcgtgtgcatcccctcgcaataccagtgtaacggagaagtggattgcattactggggaggatgaggtgggctgcgccgctgcccgacacccgaccatccaagggttcgccagtgttactcaggaggaaacggagatattgactgccgacatggatgctgagcgccgtcgaatcaagtctctgctgcccaagctgtcctgtggcgtgaagaataggatgcatattcggaggaaacggatcgtgggcggtaaaagagcacagctgggggatctgccctggcaagtcgccatcaaggacgcaagtggtatcacatgcgggggtatctacattggtggttgttggatcttgaccgcagctcattgtttgcgcgcatctaagacccaccgctatcagatttggaccactgtggtcgactggatccatccagacctgaagcggattgtgatcgagtatgtagatcgaatcatattccacgaaaattacaatgccggaacatatcaaaacgacatcgctcttatcgaaatgaaaaaggacggcaataagaaggactgtgagctgccgaggtccatacctgcctgtgtgccttggagtccttatctgtttcaaccgaatgacacttgtattgtcagtggctggggcagggagaaagataatgagcgggttttttctctccagtggggtgaggtgaagctcatctccaattgctccaagttctatggtaaccgattttacgaaaaggaaatggaatgcgccggaacttacgacggatcgatagacgcatgtaagggcgactctgggggtcctttggtgtgcatggacgcaaataatgtcacctatgtgtggggcgtcgtgagctggggagaaaactgtggtaaaccagagttccctggcgtgtataccaaagttgcaaattacttcgactggataagttatcatgtcgggaggccattcatttcgcagtataacgtgtag

SEQ ID NO: 219127 - DNA, 1731 bp, synthetic construct
  misc_feature 1..1731: note = Description of Artificial Sequence: Synthetic coding sequence
  source 1..1731: mol_type = other DNA
atgaagctacttcatgtgtttttactatttctttgcttccacctccgtttttgtaaggtgacttatacaagccaagaggaccttgtagaaaagaaatgtctcgccaaaaagtacacccacctttcctgtgacaaagttttttgccaaccttggcagcgctgtattgagggcacctgtgtgtgcaaactgccatatcaatgccctaagaacgggacggcggtctgcgcaacgaaccgtagaagcttccctacctactgtcaacagaagagtttggagtgccttcaccctggcacaaaattcctgaacaatgggacttgcacagccgaaggtaagttctcagtgtccctgaaacacgggaatacagactctgagggtatcgtggaggttaagttggtggaccaagataagactatgttcatctgcaaatcttcttggtccatgcgcgaagctaatgtggcctgcctggaccttgggttccaacagggagccgatacccaacgcagattcaaactctccgacctgtctattaactccacagagtgtcttcacgtgcactgccggggtttagaaacgtcgctagccgagtgcacctttaccaagcggagaactatgggttatcaggatttcgccgatgtggtctgctacacgcagaaggcagattctcccatggacgacttcttccagtgtgtcaatggaaagtatatatcacagatgaaagcatgcgatggcattaacgactgtggagatcaatcagacgaactgtgctgtaaagcctgccagggcaagggcttccattgcaagagtggagtctgtattccctctcagtaccaatgcaatggcgaggtggactgtattaccggagaggatgaagtgggttgtgctgaggaaactgagatcctcaccgccgatatggacgcagagcgtagaagaataaagagtttgcttccaaaactatcttgcggggtgaagaatcgcatgcatattagacggaagagaattgttggaggcaagcgagctcagttaggggacctgccctggcaggtcgcgattaaggacgcaagtggcatcacatgcggtgggatctacatcggcggatgctggattctgacggccgctcattgtttacgtgcctctaaaacccaccggtaccagatctggacgaccgtcgtggattggatacaccctgatcttaaacggatagtgatcgagtacgtggatagaattatttttcatgaaaattataatgcgggaacttaccagaatgacatagccctgattgaaatgaaaaaggatgggaacaagaaagactgcgagctccctcgctctatacccgcatgcgtgccctggagcccttatctcttccaaccgaacgatacctgcattgttagtggttggggcagggagaaagacaatgagagagtgtttagtttacagtggggcgaggttaaactgatttcaaattgctccaaattctacggcaatagattttatgaaaaggaaatggagtgcgctggcacttatgatggctctatagacgcctgtaagggagatagcggcggtcccctcgtgtgcatggatgctaataatgtcacatacgtttggggagtggtgtcatggggagaaaattgcgggaagcctgagttccctggcgtgtacactaaggtggcaaactactttgactggatttcctaccacgtgggaaggccttttatttctcagtataacgtgtag

SEQ ID NO: 219128 - DNA, 966 bp, synthetic construct
  misc_feature 1..966: note = Description of Artificial Sequence: Synthetic coding sequence
  source 1..966: mol_type = other DNA
caggtgacatacacctcacaggaggatcttgtcgaaaagaagtgtctggctaagaaatacacacatttgtcttgtgacaaggtgttctgtcaaccgtggcagcgctgcatcgagggaacttgtgtgtgcaaactgccttatcagtgccccaaaaatggcactgctgtatgtgccaccaatcgacggagttttcccacctactgccaacaaaaaagtttggagtgcctccaccccggtaccaagttcttgaacaacggcacatgcactgccgaggggaagtttagtgtgtcgctaaaacatggaaacactgattcagagggaattgtagaggtgaagctcgtggatcaagacaaaacgatgtttatttgcaagtcaagctggtccatgagagaggcaaacgttgcctgccttgacctaggcttccagcaaggcgctgatactcagcgacgtttcaagctcagcgatttatctatcaactcaaccgaatgcctgcacgtgcactgtagaggattggagactagtctcgccgagtgtacctttaccaagaggcgtacaatgggataccaggactttgcagatgtcgtgtgctacacacagaaggccgactcacccatggacgactttttccaatgcgtcaacggcaagtacatcagtcagatgaaggcctgcgacggtatcaatgactgcggcgaccaaagtgacgagctctgttgtaaagcctgccaggggaaggggttccattgcaaaagtggcgtttgcattccaagccagtatcagtgcaacggagaggttgactgcatcaccggggaggatgaggtcggctgcgcagcattcgcggaactctgcatcgaggagacagagattttgactgccgatatggatgctgaaagacgacgcattaagtctttgcttccaaagctgtcctgcggagtgaagaatcgtatgcacattcgacgaaaaagatag

SEQ ID NO: 219129 - DNA, 1134 bp, synthetic construct
  misc_feature 1..1134: note = Description of Artificial Sequence: Synthetic coding sequence
  source 1..1134: mol_type = other DNA
atgaagctgttacatgtgttcctgctctttctttgcttccacttacgcttctgcaaggtgacgtacaccagtcaggaggatttagtcgagaagaaatgcctcgcgaaaaaatatacgcacctgagttgcgacaaggtcttctgccaaccctggcagcgctgcattgaaggcacttgcgtgtgtaagctgccttatcagtgccccaaaaatgggaccgccgtatgtgccactaatagaagaagttttcctacttactgccagcaaaagagtcttgagtgtctccatcctggcaccaagttcctgaataacgggacctgcaccgctgaaggaaaattttctgtgagtcttaagcacgggaataccgactccgaggggatcgttgaggttaagcttgtagatcaggataaaaccatgttcatatgtaaatcttcttggagtatgcgagaagccaatgtggcctgcctggacctggggttccaacagggggcagatacccagagacgttttaaactctctgatctcagcataaattccaccgagtgccttcacgtacactgtcggggtttggaaacgtcattagccgaatgcacatttaccaaacggcgtactatgggttatcaggatttcgcagatgtggtgtgctatacccagaaggctgattcccctatggacgacttctttcagtgtgtgaatggaaaatacattagtcagatgaaggcgtgcgacggcatcaacgattgtggagatcagtctgatgagttgtgttgcaaagcctgccagggtaaaggcttccactgcaagagcggggtttgcatcccttcacagtaccagtgtaacggtgaggtggactgtataaccggcgaggacgaggtcgggtgtgctggttttgctagcgtgacccaagaggagactgaaatactgacagccgatatggacgccgagcggcgtaggatcaagtccctgctgcctaaacttagctgtggggtcaagaatcgaatgcacattaggaggaagcggatagtcgggggaaagcgagcacaattaggaaaaatgaagcagatcagtctcgatatctttaaaggcttacaccgggtctacgctattctcgagttctgttgtattattttaaagtag

SEQ ID NO: 219130 - DNA, 405 bp, synthetic construct
  misc_feature 1..405: note = Description of Artificial Sequence: Synthetic coding sequence
  source 1..405: mol_type = other DNA
atggagttcgtcatgaagcaagctctgggcggtgccaccaaggacatggggaagatgttgggcggagacgaagaaaaagatccagatgctgctaaaaaagaggaagaacgccaagaggcactgcggcaggccgaagaggaaaggaaggccaaatacgcaaagatggaagccgaaagggaagccgtgagacaggggattcgagacaaatacggcatcaaaaaaaaagaagagcgcgaggccgaggcccaggcggctatggaagccaacagcgagggctccctcacacgacctaagaaagcaatcccaccaggctgtggcgatgaagtcgaggaagaagatgagagcatcctggacacggtgatcaaatacctgcctggccctctacaagacatgctgaaaaagtag

SEQ ID NO: 219131 - DNA, 405 bp, synthetic construct
  misc_feature 1..405: note = Description of Artificial Sequence: Synthetic coding sequence
  source 1..405: mol_type = other DNA
atggatttcgtaatgaagcaggccctaggaggagccaccaaagatatgggcaagatgttgggaggcgaggaggaaaaagatcccgacgcacagaagaaagaggaagaacggcaggaagccttgcggcagcaggaggaggagagaaaagccaagcacgctaggatggaggctgaacgggagaaagtccggcagcaaattcgtgacaaatatggtctcaaaaaaaaggaagaaaaagaggcagaggagaaggccgctctagagcagccatgtgagggcagtctgacccgaccaaaaaaggcaatccccgctggatgtggtgacgaagaagaagaagaggaagaatctattctggatacggtacttaaatacctgcctgggcctcttcaggatatgttcaagaagtag

SEQ ID NO: 219132 - DNA, 405 bp, synthetic construct
  misc_feature 1..405: note = Description of Artificial Sequence: Synthetic coding sequence
  source 1..405: mol_type = other DNA
atggattttgtgatgaagcaagctctaggaggcgcaaccaaagacatggggaagatgctcggcggagaagaggaaaaagatccggacgcgcaaaagaaggaggaggaacgccaagaggcactgagacagcaagaggaggagcggaaggccaaacacgcgcgaatggaggctgaaagagagaaagtgagacagcaaatcagggacaagtatggactcaagaagaaggaggagaaagaagccgaggaaaaggcagcattggagcagccatgtgaagggtctctgactcggccaaaaaaggccattcccgctggttgcggtgacgaggaggaggaggaagaggaatctatactcgacactgtgctcaaataccttcctggaccgctacaggacatgtttaaaaaatag

SEQ ID NO: 219133 - DNA, 555 bp, synthetic construct
  misc_feature 1..555: note = Description of Artificial Sequence: Synthetic coding sequence
  source 1..555: mol_type = other DNA
atggactttgttatgaagcaggccctcgggggagccactaaggacatgggaaaaatgctcggaggagaggaggagaaagaccctgatgcccaaaagaaagaggaggagcggcaggaagcactgcggcagcaagaggaggaacggaaggctaaacatgccaggatggaagctgagagagagaaagtgcgccagcagatccgggataagtacggcttgaaaaaaaaggaagagaaagaagctgaggaaaaggctgcattgagagggcgaggcggaggaggcaggggcgagcaccccggacatggggcacaaatcccggcacgcgctgcagccggtcacgttcaggaagtgacgcgaccgccagctcccgcatattcaacttgctattacttcttcctggtgctgtcatttttgtttataaggctttccctcaatagcgagggcgagaacttaagctggcccctgcctctttttcccggtcagggactgctcccgctgtcaagtccatcccacctgccctccagccaagggatccacctccacccgacccctaagtag

SEQ ID NO: 219134 - DNA, 234 bp, synthetic construct
  misc_feature 1..234: note = Description of Artificial Sequence: Synthetic coding sequence
  source 1..234: mol_type = other DNA
atggacttcgtgatgaaacaggccttgggtggagcaaccaaggacatggggaaaatgctcggaggtgaggaagagaaggatccggatgctcagaaaaaagaagaagaacgccaggaagctctgcgacagcaagaagaggagcgcaaagcaaaacacgctcgtatggaggccgagcgagaaaaggtgcgccagcagattcgagataagtacgggttaaaaaagaaagaggagtag

SEQ ID NO: 219135 - DNA, 336 bp, synthetic construct
  misc_feature 1..336: note = Description of Artificial Sequence: Synthetic coding sequence
  source 1..336: mol_type = other DNA
atggatttcgtgatgaaacaggcactgggcggtgcaacaaaagatatggggaagatgctggggggtgaagaggagaaggacccagatgcacagaagaaggaagaggaaagacaagaggctctgcgacagcaggaagaggagcgtaaagcgaagcacgcacgcatggaagctgagcgggagaaggtgcgccagcagattagagataaatacggcctaaagaagaaagaagaaaaagaagcagaagagaaggctgctctggaacagccatgtgagggatccctgacccggcctaaaaaagccatacctgccggatgcggggacgaggaagaggagtag

SEQ ID NO: 219136 - DNA, 360 bp, synthetic construct
  misc_feature 1..360: note = Description of Artificial Sequence: Synthetic coding sequence
  source 1..360: mol_type = other DNA
atggactttgtaatgaaacaggctctaggcggagccacgaaggatatgggaaaaatgttaggaggggaggaggagaaggatcctgatgcgcagaaaaaggaagaagagaggcaggaagcgctgcggcagcaggaagaggagaggaaggcaaagcacgcaagaatggaagcggaacgtgagaaggtgaggcagcaaatacgggataagtatgggcttaaaaagaaagaggagaaggaggcagaggaaaaagccgctttggagcaaccttgtgaggggagcctgacgaggcccaagaaggccatccccgctgggtgtggggacgaggaggaggaagaggaggagtcaatattagatacatag

SEQ ID NO: 219137 - DNA, 114 bp, synthetic construct
  misc_feature 1..114: note = Description of Artificial Sequence: Synthetic coding sequence
  source 1..114: mol_type = other DNA
atggatttcgttatgaaacaggctctgggcggagctacgaaggacatggggaagatgctgggtggcgaagaggagaaggacccagacgctcaaaaaaaggaagaggaacgttag

SEQ ID NO: 219138 - DNA, 405 bp, synthetic construct
  misc_feature 1..405: note = Description of Artificial Sequence: Synthetic coding sequence
  source 1..405: mol_type = other DNA
atggatttcgtaatgaagcaggctttgggcggtgctaccaaagacatggggaagatgctggggggagaagaggagaaagaccccgatgcccaaaaaaaggaggaagaaagacaggaagcacttcgtcagcaggaagaggagcggaaagccaaacacgcaagaatggaggccgagagagagaaagtcagacaacagattagagacaagtacggccttaagaaaaaggaagagaaagaagccgaagagaaagcggcactggaacagccttgtgaaggttcattgactagaccaaaaaaggcgatacctgcagggtgcggcgacgaagaggaagaggaggaggagtctatcctggacaccgttctgaagtacctgcccggtccattacaggatatgttcaaaaagtag

SEQ ID NO: 219139 - DNA, 21 bp, synthetic construct
  misc_feature 1..21: note = Description of Artificial Sequence: Synthetic coding sequence
  source 1..21: mol_type = other DNA
atggactttgtgatgaaatag

SEQ ID NO: 219140 - DNA, 2943 bp, synthetic construct
  misc_feature 1..2943: note = Description of Artificial Sequence: Synthetic coding sequence
  source 1..2943: mol_type = other DNA
atggccacggcggctaccagccctgcactgaaaaggttggatctcagggatccagcagccctatttgaaacacatggggctgaagagattcgtggcttagaacggcaggtcagggccgagattgaacacaagaaggaggagctgaggcagatggttggggagcggtacagagacctgattgaggccgctgatacaatcggccagatgaggcggtgtgctgtaggtctggtggatgcagttaaggccaccgaccagtattgcgctagattgaggcaggcagggagcgccgctcctaggcctccgagggcgcaacagcctcagcagccctctcaggagaaattctattcaatggccgctcagattaagctgttgctcgaaattcctgaaaaaatttggtcctcaatggaggcctcgcagtgcttacacgctactcagctatatttgctttgctgccacctgcactctctgctccagctggacagctctagctcgcgctactcacctgtgctcagcagattccccatacttattaggcaagttgccgcagcctcccattttcggagcaccattctgcatgagagcaaaatgctgttaaaatgtcaaggcgtctccgaccaagccgtagctgaagccctgtgtagcatcatgttgcttgaggaaagttcaccaaggcaagcactgaccgatttcctcctcgcccgaaaagctaccattcaaaagctgctcaaccagcctcaccatggtgccggaattaaagcgcagatttgtagcctggtggaactgcttgccaccacgctgaagcaagcccacgctcttttctatacattgccagaaggcctgttgcctgatccggcactgccttgcggactgctcttctccactttagaaactattactggccagcacccagcagggaaaggaactggggtccttcaggaagagatgaaattgtgctcttggttcaagcacctgcccgctagcattgtggagttccagccaacactccggacattagcacaccctattagccaagaatacctcaaggacacacttcagaagtggatccatatgtgtaacgaggacattaaaaacggcataaccaacttgctgatgtacgtcaagagcatgaagggcctggctggaattcgagacgctatgtgggagctgctaactaacgagtcgactaatcactcatgggacgtgctctgtcggcgactgttggagaagcctctcttgttctgggaggacatgatgcagcaactgttcctggatcggctccagacccttactaaggaggggtttgacagcatcagttcctcatccaaggagttgttagtgtccgcactgcaggagctggagtcgagtacctccaattccccttccaataagcatattcacttcgaatacaatatgtctctgtttctttggtcagagtcgcctaatgacctcccttcggatgcagcttgggtgagtgttgcaaatagagggcagtttgcatcatcgggcctgtcgatgaaggcacaagccatcagtccctgcgtccagaacttttgttctgcccttgactccaaattgaaggtgaagctggacgacttgctggcatatctgccatccgacgactccagcttgcctaaggatgtgtctcctacccaggccaaatctagcgcgtttgacagatacgctgacgccggaaccgtgcaggagatgctgcggacgcagtcagtcgcctgtataaagcacattgtcgactgcattagagccgagctgcagtcaatcgaagaaggtgtacaagggcagcaagatgcccttaatagtgcgaaactgcactcagtattatttatggctaggctgtgtcaaagcctgggcgagctatgcccccacctgaagcagtgcatattggggaaatccgaatccagtgagaaaccagcacgcgaatttcgagccctgagaaagcaggggaaagtgaagacacaggaaatcattcccacacaggcaaaatggcaggaagtgaaggaggtcctattacagcagagtgtgatgggttatcaagtgtggtctagtgcagttgtcaaagttctcatccacggattcacccagagtttgcttctggatgacgcagggtcagtgttggccactgccacctcatgggatgagctcgaaattcaggaggaggccgaaagcggaagcagcgtgacctctaaaatcagactgcccgctcaaccctcctggtatgtgcagtcgtttctgtttagcttatgtcaggagatcaacagggtgggcggacatgcgctgcccaaggtcacactccaagaaatgttgaagtcttgtatggttcaggttgttgccgcttatgagaagctctcagaggagaagcaaatcaaaaaggagggcgcattcccggtgacccagaacagagccctgcaacttttgtacgacctgcgatacctgaacatagtccttacagccaaaggagacgaagttaaatccggacgatccaaaccagactcaagaattgaaaaagtcaccgaccatctggaagcactgatcgatccgtttgatttagatgtatttacaccacatctgaacagcaatctgcacagactcgtccagcggacatccgtcctgttcggtcttgtcaccggaacagaaaaccagctcgcaccacgaagctctaccttcaattcacaagaaccacataacattttgcctctcgcctccagccagatccgattcggattgcttcccctgtccatgacaagcacacggaaggctaaaagcacgcgtaacatcgagacaaaggctcaagtcgtgcctccagcaaggagcaccgctggtgatccaaccgtccccggatccctgttccgccaactggtctctgaggaggataacaccagtgctcccagcctctttaagcttgggtggctcagttcaatgaccaagtag

SEQ ID NO: 219141 - DNA, 2823 bp, synthetic construct
  misc_feature 1..2823: note = Description of Artificial Sequence: Synthetic coding sequence
  source 1..2823: mol_type = other DNA
atggccacagctgccacttctcccgctcttaagaggctggatctaagagatcccgctgccctgtttgagactcacggtgccgaggagatcagaggcttggaaagacaggtgagagcagaaatcgaacacaagaaggaggaactaagacagatggttggtgagaggtatagggacttgatagaggccgcagacacaatcggccagatgcggaggtgtgctgtcggactggtggatgccgtcaaggcaacagatcaatattgcgcgaggcttcgccaggccggtagcgccgcacccaggcccccacgcgctcaacaacctcagcagccctcacaggaaaaattctatagcatggctgcgcaaattaagctgctgctagagatcccggaaaagatctggagtagcatggaggctagccagtgcttgcacgcaactcaactgtacctgctttgctgtcacctgcacagtctgctccagctggattcctctagttctaggtattctcctgtactatcacgctttcccattcttataaggcaggtagcagcagcaagccattttcggagcacaatattgcatgaatctaagatgctgctgaaatgtcaaggggtcagcgaccaggccgtagcggaggctctgtgctccattatgttgcttgaggaaagctccccacgtcaggctcttaccgattttctgcttgcacgcaaagctaccatacagaagttactgaatcagccccaccacggtgcagggatcaaagcccagatctgctccctggtggagctcttggcaaccacactgaagcaggcgcatgcactattctataccctacctgaaggcctgctgcccgatcccgctctgccctgtgggctcctgtttagtacactcgagaccataacaggtcagcaccctgcaggaaagggtactggcgtactgcaggaagaaatgaagctgtgcagctggttcaagcacctccccgcttccattgtcgagttccagcccacccttcggaccctcgcacaccccattagccaggagtatctgaaggacacactgcaaaagtggattcacatgtgtaatgaagatatcaagaatgggatcactaacctgctaatgtacgtgaagtctatgaagggactggctggcatcagggatgccatgtgggagcttctcactaacgagtccacgaatcattcctgggatgtattatgtaggcgccttctggagaagcccctgttattctgggaagacatgatgcagcaactgtttctagatcgactacagaccctgacgaaggaagggttcgatagtatttccagctcctctaaagaactgctggtttcggctttacaggagcttgagtcctcaacctccaacagtccatcaaataagcacattcatttcgagtacaatatgtctctttttctgtggtcagaaagccccaacgacctgcctagcgatgcagcctgggtgtctgtggccaataggggtcagttcgccagcagtggcctgtcaatgaaagctcaggcgatctctccgtgtgtgcagaatttctgctcggctttagattccaagttgaaagtcaaattggatgatctactcgcctatctgccgagcgacgattccagcctgcccaaagacgtttccccgacacaagccaagtcttccgctttcgatcgatacgccgacgccggtactgttcaggagatgcttcgcacacaaagcgtcgcctgtattaaacatatcgtggactgtataagagccgaactccagtccatagaagagggtgttcagggccagcaggacgccctgaactctgctaagctgcatagtgtgttgtttatggcaaggttgtgtcaaagtctcggggagctgtgtccccacctaaaacagtgtatcctgggtaaaagtgaatcttctgaaaaaccagccagagaattccgggctctgcgcaagcagggcaaagtcaaaactcaggagatcatacctactcaggcaaagtggcaggaagttaaggaagtcctgctacagcagtcagtcatgggatatcaggtttggtcaagtgcggtcgtcaaggtgttaatacatggctttacacagtctctcttgctggacgacgccggttctgtgctggccacagccactagctgggatgagctggagatacaagaggaagcagaaagtggctcatctgtgacctccaaaattaggctgcctgcccaaccatcttggtacgtccagtcctttctcttttctctttgtcaggagatcaatcgagtcggagggcacgctcttcccaaggtaaccctgcaggagatgctgaaaagttgtatggtgcaggtcgtggcagcatacgagaagctcagcgaagaaaagcagatcaaaaaggagggggcttttccagtgacccagaatagggcactgcagcttctgtacgatctgcggtacctgaacatcgtcttaacagcaaagggtgacgaggtcaagtccgggagatccaagccagactctcgaatagaaaaagtaaccgatcatttggaagccctaatcgatccttttgatctggacgtgttcacacctcatttgaactccaatctgcatagacttgtccagaggacaagtgttctcttcggattggttaccggcaccgaaaatcagctggcccctcggtcatcaacgttcaatagccaggagccacacaatatcctgcctctcgcctcatcccagatccgttttgggttgcttccgctctcaatgactagtaccagaaaggcaaaatcgacccgcaacatcgagaccaaggcccaatatgatgcgaattgctag

SEQ ID NO: 219142 - DNA, 2214 bp, synthetic construct
  misc_feature 1..2214: note = Description of Artificial Sequence: Synthetic coding sequence
  source 1..2214: mol_type = other DNA
atggagaaaagcaggatgaacctgcccaaggggccagacacgctgtgcttcgataaggatgagttcatgaaggaggatttcgatgtcgatcactttgtgtccgactgtcggaaacgcgtgcagctcgaagagttgagagatgaccttgagctgtactataagttgctcaagacggccatggtggagctgatcaataaggactatgcagattttgtaaacctgtctactaatctggtcggaatggacaaggctcttaaccagctttccgtacccctgggccaattaagggaagaagtcctctctctgaggagtagcgtgtcagaggggattcgcgctgtcgatgagcgtatgtcaaagcaggaagacataagaaagaagaaaatgtgcgtcctgcgattaatccaggtgattaggtcggtggagaagattgagaagattctgaatagccagtcaagcaaagaaacatctgcccttgaagccagctcacccctgctcactgggcaaattctggaaaggattgctaccgagtttaatcagctacaattccacgctgtgcagagcaaggggatgcccttgctcgataaggtccgaccccgtattgccggtatcactgcaatgctgcagcagagccttgaaggtctgcttctggaaggtttgcagacctccgacgtcgacatcatccgccattgtctgaggacctacgccacaatcgataagaccagggacgcagaagcactggtgggccaggtgctcgtaaaaccatatattgatgaggtgattatcgaacagttcgtggagtctcatcctaatggcttacaagtgatgtacaacaagctcctggagtttgtgccccatcattgccggctgctgagagaggtgacaggcggtgcgatttcctctgaaaaaggcaatacagtgcccggatacgacttcttggttaattccgtgtggcctcagatcgtccagggccttgaagagaagctgccctcgctctttaatcctgggaaccctgacgcattccatgagaagtatacaataagtatggatttcgtgcggaggttggagcgccagtgcggcagccaggcaagtgtgaagcgactgcgagcacaccctgcataccactccttcaacaaaaagtggaacctgcccgtgtatttccagattcgttttcgagagatcgctggatctttagaagccgctctgaccgacgtccttgaagacgccccagctgagtccccttattgtctgttagcgagtcatcgcacctggagttccttgcgcaggtgttggtcagatgagatgttcttgccactgttggtccatcgcttgtggcggctgacgttacagatcctagcccgttactctgtgtttgttaacgagctaagcctccgccctatttcaaacgaatcccctaaagaaatcaaaaagccccttgtcaccggatctaaggaaccatccatcacacagggcaatactgaggatcaagggtccggaccctccgaaacgaagcctgtcgttagcatcagcaggactcagcttgtctatgtcgtcgccgacttggacaaactgcaggaacagctgccggagttactggagatcatcaaacccaaattagagatgattgggtttaagaactttagctccataagcgccctcgaggactcccagtcctcgttctctgcgtgcgttccttcactcagctccaaaataatccaggatctgtcagattcctgctttggatttcttaagtccgctctggaggtccccagactctacaggcggacaaataaggaggttccaacgactgcatcttcctacgtcgacagtgcacttaaacccctgtttcagttgcagtccgggcacaaggataagctgaagcaggcaattatccaacaatggttagagggcactctgagtgaatcaacccacaaatactatgaaacagtgagcgatgtgctgaactcagtgaaaaagatggaagagtccctgaagcgtcttaaacaagcacggaaaacaacccccgcaaatcctgttggtccaagcgggggaatgtctgacgacgataagatcagattacagctcgcactggacgtggagtacctgggagagcagatccagaagcttggactccaggcctccgatatcaagtccttctcggcccttgcagagctggtggctgccgctaaggaccaggccactgcagaacagccgtag

SEQ ID NO: 219143 - DNA, 2217 bp, synthetic construct
  misc_feature 1..2217: note = Description of Artificial Sequence: Synthetic coding sequence
  source 1..2217: mol_type = other DNA
atggagaaaagccgcatgaatctgcccaaaggccctgataccttgtgctttgataaggacgaattcatgaaggaagacttcgacgtggatcactttgtgtcagattgtcggaagcgcgtccagctagaagaactgcgtgacgacctggagctgtattacaaactcctcaagaccgccatggtcgagctgatcaataaggactatgccgattttgtcaacttatctaccaacttagttgggatggacaaggccttgaatcagttgtcagtgcctttagggcagctgagagaggaggttctgagcctgagatcttctgtctccgaggggattcgagctgtcgatgagcgaatgagcaagcaggaggacatcagaaagaagaaaatgtgtgtcctgaggctcattcaggtcattcgaagtgtggaaaagatcgaaaaaattttgaacagtcagtctagcaaagagacttcagcattagaagctagcagcccattattaacaggccagattctggagaggattgctaccgaatttaatcagctccagttccatgccgtgcaatcaaagggtatgcccctgctcgacaaggtgcggcctcgaatcgctggcattactgccatgctgcaacagtcattagagggtctgctcttggaggggctgcagaccagtgatgttgacatcattagacactgcctccgcacctacgccaccatagacaagacccgcgatgccgaagccctcgtgggccaagtgctcgtcaaaccgtacattgacgaggtgatcatcgagcaattcgtagaatcacatccaaatgggttgcaagtgatgtataacaaattgctcgagttcgtccctcatcactgcagacttctcagagaagtgaccggcggagcaatttcatccgagaagggaaatactgttcccggatacgacttcctggtcaacagcgtttggcctcagattgtacaaggattggaagagaaactaccaagcctgtttaaccctggtaatcccgatgcatttcacgagaagtataccatatctatggatttcgtacgtagattagagcggcagtgtggcagtcaggcctctgtgaaaagacttcgtgctcacccggcatatcattctttcaacaaaaagtggaacctgccggtctactttcagatacggtttagggagattgccggttccctcgaggctgcgctgaccgacgttctcgaggacgccccagccgagagtccatactgtctactcgcctctcatagaacgtggagttccctcaggagatgttggtctgacgagatgtttctgccattgctggtgcatagattgtggcgactgaccctccagatactggccagatatagtgttttcgtgaatgagctttccctgagacccatttcgaatgagtcccctaaggaaattaaaaagcccctggttactgggagcaaagagccaagtatcacacagggtaatacggaggatcagggctcagggcctagtgaaaccaagcccgtggtgtcgatctcccgaacccagttagtgtatgtcgtcgctgacctcgataagttacaggaacagctaccagagttactggaaattatcaaaccgaaactcgaaatgatcggcttcaagaacttctccagtataagcgccgcattagaggatagccagagttcattctccgcttgtgtgcctagcttgtcatctaagatcatccaggacctgagcgactcttgcttcggttttttgaagagtgctcttgaagtaccaagactctacaggcgcaccaacaaggaggtgcctaccaccgcttcttcttatgtggatagcgctctcaaacccctattccagttgcagtctggccacaaggataaactcaagcaagctatcattcagcagtggcttgagggaactctaagcgaatccactcataagtactacgagacagtcagtgacgttctgaacagcgtgaagaagatggaggagagcttaaagcgcctgaagcaggctcggaagactaccccagcgaatccagttgggccatcaggaggaatgtcagacgacgataagatccgcctccaacttgctctggacgtggagtatttgggagagcagatccagaagctggggctacaggcgagtgatatcaagtccttttccgcactcgcggaactcgtagccgctgcaaaggatcaagccacagccgagcaaccctag

SEQ ID NO: 219144 - DNA, 2040 bp, synthetic construct
  misc_feature 1..2040: note = Description of Artificial Sequence: Synthetic coding sequence
  source 1..2040: mol_type = other DNA
atggttgaactgattaataaagactacgcagattttgtaaatctttcgactaacctggtggggatggacaaggctctcaatcagctgagtgtgcccctgggccagttgagagaggaggtgctctcgctgcgatcgagtgtgtctgagggaataagggctgtcgatgagcgtatgagtaagcaggaggacatcagaaagaaaaagatgtgtgtcctgagactcatccaagttatcagatcagttgaaaaaattgagaagatcctgaatagtcagtcaagtaaggaaacctcagcgctcgaagcttcatcccctctcctcaccggccagattctggaacgaatcgcaaccgaattcaatcaattgcagttccacgctgtgcagtcaaaggggatgcctctgcttgacaaagtgcggccaagaattgctggaatcaccgccatgttgcagcagagcctggaaggccttttgctcgaaggcctgcagacatctgacgtggatattattcggcactgtctgagaacatacgccactattgacaaaacacgcgacgcagaggctttggttggtcaagttttagtaaagccatacatcgatgaggtgattatcgaacaattcgtagaatcgcatcccaacggactgcaggtaatgtataataagctcttggaattcgtacctcaccattgtcgactgttgcgggaggttacagggggagccatttcatctgaaaaaggaaatacagtcccaggatatgattttctggtgaatagcgtctggcctcagatcgtccagggcctagaggaaaagctgccctccctgtttaatcccggaaaccccgatgcatttcacgagaaatacacaatcagtatggacttcgtgagaagacttgagcgtcagtgcggttcacaggcgtcggtgaagcgattgagggctcatccagcctaccatagctttaacaagaaatggaaccttcccgtctattttcagattcgttttagagagatagcaggatctctggaggcagctctgacggatgtgctggaagatgcccctgcagagtctccatactgcctgctagcctcccatcggacctggtcgagcctacggagatgttggagcgatgagatgttcctgcccctgttggtgcatcgcctgtggcggctgacattgcagattctcgctaggtactcagtatttgtgaacgaactctccctccgcccaatctctaacgagtctcctaaggagattaaaaaacccctagttaccggcagcaaagagccctccatcactcaaggcaacacggaggaccagggatcgggtcccagcgaaactaaacctgtcgtatcaatttcaaggacccagcttgtgtacgtcgtagccgatctcgataagttgcaggaacagttacccgaacttctggagatcattaagcccaaactcgaaatgattggctttaagaacttctcatctatttctgccgcactggaggactcacagtcctccttctccgcttgtgttccaagcctcagtagtaagatcattcaagatctttctgatagctgttttggcttcctgaaatccgctttggaagtcccacggctgtacaggcggaccaataaggaggttccgacaactgctagcagctacgtcgactctgcattaaagcctctctttcagctgcagagtgggcacaaagacaagcttaagcaggccataattcaacagtggctggagggaactctttccgagtcgacccacaagtattatgagacagtctctgatgttctcaattccgtgaagaagatggaagaatctctgaaacgtctcaagcaggcacgcaaaactacacccgctaatcccgtcgggccatccgggggaatgtccgacgatgataagatcagactccagcttgctctcgacgtggagtatcttggcgagcaaattcagaaactgggtttgcaggcttccgacatcaaatcctttagtgcccttgcagaactagtggccgcagctaaagatcaggccacagccgagcagccctag

SEQ ID NO: 219145 - DNA, 1869 bp, synthetic construct
  misc_feature 1..1869: note = Description of Artificial Sequence: Synthetic coding sequence
  source 1..1869: mol_type = other DNA
atgagtaagcaggaagacatccggaaaaaaaagatgtgcgtcttgcggctgatccaggttataagatctgttgaaaaaatagagaagattttaaacagccagtcgagtaaagaaacaagtgcgctcgaggcttcttctcctctactcacaggccaaattcttgagcgcatcgccacagagttcaaccagttgcagttccacgccgtccagtccaaaggcatgccacttctggataaggtaaggccccgtattgccggaattacagccatgctgcagcagagcctcgagggtctcctcttggagggcctgcagactagcgatgttgacattattcgtcactgcctcaggacatacgctacgatcgacaagactcgcgatgccgaagccttggtcggacaggtgctggtcaagccatacatcgacgaagttataatcgagcagtttgtagaaagtcaccctaatggactgcaagtgatgtacaataaactcctggagtttgtgccacaccattgccggctgcttagggaggtgaccggcggagctatatcctccgaaaaggggaacaccgttcctggctacgatttcctggtaaattctgtctggcctcagatcgtgcaagggcttgaagagaagctccctagcctgtttaatcccggaaacccggatgctttccacgagaagtatactatcagcatggatttcgtgagacgtctggagcgccaatgtggatcacaagcttctgtgaagcggctaagagcacaccctgcataccacagttttaataaaaagtggaacctcccagtatatttccagatccgatttcgagagattgccggttctcttgaggcagccctgaccgacgtgctggaggacgcccctgctgagagcccatattgcctcctggccagccacaggacctggagttcactccgtcgctgttggtcagacgaaatgtttctgcccctgctcgtacataggctctggaggcttactctccagatactggccagatattctgtctttgtaaacgagttatctttgaggccaatctccaatgagagtcctaaggagatcaaaaaacctctggtgacaggaagcaaagaacctagtatcacccaggggaatacagaggatcaaggatcagggccatcagaaactaaacccgtggtttccatcagcaggacgcaactggtgtacgtggtggcggacctcgataagcttcaagagcagcttcctgagctgctggagattatcaaacctaagctggagatgattgggttcaaaaacttcagctctattagcgcagcacttgaggacagccaaagttctttcagtgcatgcgtgcctagcctatcatctaaaattattcaagatttgtctgatagttgtttcggcttcctgaagtcagcccttgaggtgccgaggctttataggagaaccaacaaagaggtgcccaccacagcttcctcatacgtcgactccgctctgaaaccgctgtttcagctgcaatctggccacaaggataaacttaagcaggccataattcagcagtggctggagggaaccctttctgaatctactcataaatattacgaaacggtctccgatgtattaaattcagtgaagaagatggaagaaagcctcaaaagactgaagcaggcacgaaagaccacacctgccaatcccgtgggaccatcggggggtatgtcagatgatgacaagatccgcctgcagcttgctctggacgtggagtacctgggggagcaaattcagaaactcggacttcaggcatcagacattaaaagtttttccgctttggcggagctcgtcgccgctgctaaagatcaagccactgctgagcagccttag

SEQ ID NO: 219146 - DNA, 1284 bp, synthetic construct
  misc_feature 1..1284: note = Description of Artificial Sequence: Synthetic coding sequence
  source 1..1284: mol_type = other DNA
atggggttcgccatggaggatactgaggatatctcccaaaaccacttcgggcatctgtgtatcttcaagtggggtcactggaaaaaggatctcaagtacactatcagtatggacttcgtccggaggctggagcgccaatgtgggagccaagcctccgttaaacgactgagggcccaccccgcatatcactcattcaataagaaatggaatcttcccgtgtacttccaaatacggttccgtgagatagcaggaagtcttgaagccgctttgacagatgtactggaagacgcacctgcggagagcccttactgtttgttggcaagccacagaacatggagctccctcagacggtgctggtcggacgagatgttcctaccgctgctagtgcatcggttatggcggttgaccctacagatccttgcgaggtatagcgtgttcgtgaatgagctttctctcagacccatatccaacgaatcaccaaaggaaataaaaaagcctttagtgaccggaagtaaagagccatctatcacacaaggaaatactgaggatcagggcagtggtccatccgagactaagcctgtagtttccatttctaggacacagctcgtatatgttgtcgctgaccttgacaagctgcaggagcagctccctgagctgctggaaataattaagccgaaacttgagatgatcggtttcaagaatttttcatccatctcagccgcactcgaggattcccagagttccttttctgcatgcgttccgtccctgagctccaagattatccaggacctatcagactcatgtttcggcttcctcaagagtgctctggaagtgcccaggctttaccggcgtacgaacaaagaggtgccaactactgcctcctcctacgtggatagtgcactcaaaccactattccagcttcagagtggccacaaggataagcttaagcaggcaatcatacagcagtggctggagggcacattgtctgaaagtacacataagtactacgagaccgtgagtgatgtacttaactccgttaaaaagatggaagagtctttgaaacgcttgaaacaggccaggaagaccactccagccaatcctgtaggtcctagcggcggaatgtcagacgatgataaaatcaggcttcagctggcgcttgatgtggaatatttgggagaacagattcaaaaacttggcctccaggcctctgacattaagtctttctccgccctagctgagttggtggccgctgctaaagaccaggcaacagccgaacagccatag

SEQ ID NO: 219147 - DNA, 2487 bp, synthetic construct
  misc_feature 1..2487: note = Description of Artificial Sequence: Synthetic coding sequence
  source 1..2487: mol_type = other DNA
atggccgaggcagctttacttctcttaccagaggcagcagcggaacgcgacgcgagagaaaaattggccctgtgggacagaagaccggataccaccgcacctctcaccgatcgccagacggattccgtcctggaactgaaagcggctgctgaaaacttaccggtacctgcagagctgccgattgaggatctgtgcagcctgactagtcagtctttaccaattgaactaacttccgtcgtgcccgaaagcactgaggacatcctcctgaaaggttttactagtctgggcatggaggaagagagaattgagactgcccagcagtttttctcttggttcgcaaagctccagacgcagatggatcaagatgaggggaccaagtatcgccagatgagagactatctgagcggttttcaggaacagtgtgacgcaattttaaacgacgtaaactcagcactgcaacacctcgagagtctccagaaacaatacctgttcgttagcaacaagacggggacactacatgaagcctgtgaacagcttctgaaggaacagagcgagctggtggaccttgccgagaacatccagcagaaacttagctattttaacgagctcgaaacgataaacacaaaattaaactcccctacgctgtctgttaactccgatgggtttattccaatgctggcgaaactcgacgactgtataacttatatatcaagccatcctaactttaaggactatcccatttacctgctcaagtttaaacaatgtctgtcaaaggcactccacctgatgaagacttataccgtcaacactctccagacattgacaagccagcttctgaagcgtgatccctcctccgtgcctaacgccgataacgcattcacgctcttctacgttaagtttcgggcagcggctcctaaggttcgaaccctgatcgagcaaatcgaattaagaagcgagaagatccccgagtatcagcagctcttgaacgacatccaccagtgttaccttgaccaaagagagcttttattgggaccaagcatcgcttgtactgtggccgagttaactagccagaataaccgcgatcactgtgcccttgtgcgatccgggtgcgcgttcatggtccatgtgtgtcaggacgagcatcaactgtacaacgagtttttcaccaaacccacctccaaattagatgaattactcgagaaactgtgcgtgagcctctatgacgttttccgacctctgataattcatgtaatccacttagaaacactcagtgagctgtgtggcattctcaaaaacgaggtgctggaggatcacgtgcagaacaacgccgagcaacttggcgcttttgccgcaggcgtcaagcaaatgctggaagatgtgcaggaacgccttgtctaccgcactcacatctatattcagaccgacataaccgggtacaagcctgccccaggggatcttgcttatcccgataagctggttatgatggaacaaatcgcccaaagtctgaaagacgagcagaaaaaggtacctagcgaggccagtttctcagacgtgcacctggaagaaggagagagcaacagcctgaccaaaagcgggtccaccgagagtctcaatccgagaccacagaccacaatatctcccgctgacctgcatgggatgtggtacccgacggttcgcagaacccttgtgtgtctgtctaaattgtacaggtgcatcgaccgcgcagtctttcaaggactgtcacaggaagccctgtccgcatgtattcagtctctgctgggtgccagcgagagtatcagcaagaataaaacccaaatcgacgggcagttgttcctaatcaaacacctgctgattctgcgtgagcagatcgcacccttccacaccgaatttactattaaggagatctctttggacctcaagaagacccgggatgccgcattcaagattctgaatcctatgaccgtgcccaggtttttccggctgaattcaaataacgcactcatcgagtttctgctcgagggaacaccggagattagagaacattatcttgactcgaaaaaggacgttgacaggcatctgaagtcagcctgtgaacagttcatccagcaacaaacgaagctgttcgtggaacaacttgaggaatttatgactaaggtttctgcactcaagacaatggcctctcaaggcggacctaaatacactctgagtcagcagccctgggctcagccagcgaaggtgaatgacctagctgccaccgcctataagacaattaagactaaactacctgtgacgctccgtagcatgagcttatacctgagcaataaggatactgaatttattctgttcaaacctgttcgcaataatattcagcaggtgttccagaagttccatgctctgttaaaagaggaattttcccctgaggacatacagatcatcgcctgcccatccatggagcagctcagtctgctgttgttagtaagtaaatag

SEQ ID NO: 219148 - DNA, 2370 bp, synthetic construct
  misc_feature 1..2370: note = Description of Artificial Sequence: Synthetic coding sequence
  source 1..2370: mol_type = other DNA
atgggtaccaaaatggcagacctggattcaccacctaagcttagcggagtccagcagccgtctgaaggcgtgggcggaggtcgctgctctgagatttccgctgaactcatcaggtccctaaccgaactgcaagagttagaagctgtctacgagcgcctctgcggcgaggaaaaggtggtggagcgagagctggacgcattgctggaacagcaaaataccatcgaaagcaagatggtgactctgcatcggatgggccctaatttacaactgatagaaggagatgctaaacagctggcgggtatgattacatttacctgcaacctggcagagaatgtgtcttccaaggtgcggcagctggacctggcaaaaaaccgcctgtatcaagctatacagagagccgatgatatcctcgatctcaagttctgtatggatggggtgcagaccgccttacgcagcgaagactatgagcaggccgcagcacatacacaccgttacctgtgtttagacaaaagcgtcatcgagcttagccgacagggcaaggagggctctatgatcgacgcaaacttgaaacttctccaggaagccgaacagaggcttaaggccatcgtggcggagaaatttgctatagcgactaaggagggggacctcccacaggttgaaagatttttcaaaatcttcccgctgctgggcctgcacgaagaggggctgcgcaagttttccgagtacctgtgcaagcaagtggctagcaaggctgaagagaacctgctgatggtcctgggcacagacatgtctgatcgcagggccgcagttatcttcgctgacaccctgactttattatttgagggaatcgcccgaatcgtcgaaactcaccagcccatcgtcgaaacatactatggcccaggcaggctgtacacattgattaaatatcttcaggttgaatgtgataggcaggtggagaaggtcgtcgataaatttattaagcagagggactatcatcagcagttccggcatgtgcagaacaatttgatgaggaattcaaccaccgaaaagatcgagcccagagaactcgatccgattctgactgaggtgacactgatgaatgctaggagcgagttgtacctgaggtttctgaaaaagcgcatctccagtgatttcgaagtgggagactcaatggctagcgaggaggtgaagcaggagcaccaaaagtgtctggacaagttactgaataactgtcttctctcttgcactatgcaggaacttatcgggctgtacgttacaatggaagagtattttatgcgagaaactgtgaataaggcagtagccttagacacctatgagaaaggccagcttacaagctctatggtcgacgacgttttttacatagtcaaaaagtgcatcggtagggctctctcctcctcaagcatcgattgcctctgtgcgatgatcaaccttgctaccaccgaactggaatctgattttcgagatgtcttatgtaataagctgcgcatgggctttcctgcgacaacattccaggacatccaacggggagtcaccagtgccgtgaatataatgcacagcagcttacagcagggcaagttcgatacaaaaggaattgagtccacagacgaagcaaaaatgagcttcttggttaccctgaacaatgttgaggtctgcagcgaaaacatcagtacactgaagaagactctagagagtgactgcacgaagttattcagccagggaatcgggggagaacaggcgcaggctaaatttgactcatgcttatccgatctggccgctgtgagcaataaattccgcgatctgcttcaggaagggctcaccgaacttaattcgaccgctatcaaacctcaggttcagccgtggatcaactccttctttagcgtctctcataatattgaggaagaagagtttaatgactatgaagcaaatgacccttgggtccagcaattcattttaaatctcgagcagcagatggccgagttcaaggcttcactctcaccagtgatctacgattctctgactggcctgatgacttctctcgtggctgtcgaattagaaaaggtggtgctgaaatctacatttaatcgcctgggtggactgcagtttgataaggaactgagatcgctcattgcctacctgacgaccgtcaccacctggaccattcgtgacaaatttgccagactgtctcagatggccactattcttaacctggagagagttactgagatactagattactggggcccaaactcaggcccactcacttggcggctgactcccgcagaggtacgtcaggtgctcgccttgcggattgactttcgctccgaggacattaagcggctgcgactatag

SEQ ID NO: 219149 - DNA, 2295 bp, synthetic construct
  misc_feature 1..2295: note = Description of Artificial Sequence: Synthetic coding sequence
  source 1..2295: mol_type = other DNA
atggctgacctcgactcgccacctaagctgagcggagtacaacagccttccgaaggcgtcgggggaggtcggtgcagtgagatcagcgccgaactgattcgaagcctcaccgagctgcaggaattagaggccgtctacgagcggctgtgtggtgaggagaaagtcgtcgagagagaacttgacgcactgctcgaacaacagaatacaatagaatctaagatggtgacgctgcatcggatgggaccgaatctccaacttatagagggggatgctaagcagcttgccggaatgataacgtttacatgcaatttggccgaaaacgtgagctccaaagtccggcagctcgatctggccaagaaccgactttatcaagctatccagcgcgcagacgacatcttggaccttaaattctgtatggacggtgtccagacagcccttcggtcggaggattatgaacaggccgctgcgcatacccacagatatctctgcctagataagtcagtgatcgaattgagcagacagggcaaagagggttcaatgattgatgcaaacctgaaactccttcaagaggcagagcagcggctgaaagccatagtggctgaaaaatttgccatagcaaccaaagaaggagacttgccccaggtggaacgattttttaagatctttccgttgctgggattgcatgaggaggggctgagaaaattttcagagtacttgtgtaagcaagtggcatccaaagctgaagaaaatcttctaatggtgcttgggaccgatatgtctgataggcgcgctgccgtgatcttcgccgacactctgacgctactgttcgaggggattgcccgtatagtggaaacccaccagccaatcgtagaaacatactatggcccaggacgcttgtacacactgataaagtatttgcaggtcgaatgcgatcggcaggtggagaaagtcgtggataagttcatcaagcagagggattaccaccagcagttccgacacgtccagaacaacctgatgcgcaatagcaccacagagaagattgagccacgcgagctggatcccattctcacagaagtgaccctgatgaacgcaagatccgaattatacctccgatttctcaaaaaaagaatcagtagtgattttgaagtgggtgactcgatggcgtctgaggaggttaaacaggaacaccagaagtgcctcgataagctgcttaacaactgcttgctgagctgtacaatgcaggagctgatagggctgtacgtgaccatggaagaatattttatgcgggaaacagtgaataaggccgtggccctggatacttacgaaaaggggcagctcacctcatccatggtcgatgatgtgttctatatcgtcaagaagtgtataggacgtgcactctcctccagtagcatcgactgtctgtgtgccatgattaatttggcgacaacggaactagagtccgatttccgcgatgtgctctgtaataagctcaggatgggtttccctgctactacttttcaggatatccagcgaggggtaacctcagctgttaacatcatgcactcttcgctccagcagggtaagttcgatactaaaggtatagaaagtacagacgaggctaaaatgtccttcctatcagactgtacaaaactctttagccaggggatcggcggagaacaggcccaggcaaagttcgactcttgtttgtcagacctggcagcagtgtctaataagtttcgggaccttctgcaagagggactgacggagctgaattctaccgccatcaaaccccaagtgcagccgtggattaacagcttcttctccgttagccacaatattgaggaagaggagtttaatgactatgaggccaatgacccttgggtacagcagtttatcttgaacctggaacagcaaatggccgagttcaaagccagcctctcacctgtcatctacgattcactgacaggattgatgacgagcctggtggctgtcgagctggagaaggttgtgctgaagagtactttcaaccgcctcgggggtctgcaatttgataaagagcttagatccctaatagcctacctcacaacagtgactacttggacgatacgggataagtttgcacgcctgtcccagatggccaccattctcaatctagaaagagtgactgaaatacttgattattggggaccgaactccggacccttaacctggcgacttacccctgccgaagtgcgccaggtccttgctttgcgcatcgactttcgctcagaggacataaaacggctccgtttatag

SEQ ID NO: 219150 - DNA, 1014 bp, synthetic construct
  misc_feature 1..1014: note = Description of Artificial Sequence: Synthetic coding sequence
  source 1..1014: mol_type = other DNA
atggccgatctcgactcaccccctaaactcagcggcgtccagcaaccttccgaaggcgttggaggaggcaggtgcagtgaaatctccgcggagctcattcgttcactcactgaactgcaggaactagaggccgtttacgagagactgtgcggggaggaaaaggttgtagagcgggagctggacgccttgttggagcagcagaatacaatcgagagcaaaatggtgaccttgcacaggatgggcccaaacctgcagctgatcgaaggggatgccaaacaactggcaggtatgatcacatttacttgtaacctagccgagaatgtatcgtctaaggtcaggcagctggacctggccaaaaaccgcctctaccaagccatccaacgcgcagatgatatactcgatctcaagttttgtatggacggcgtgcagactgctttgagatctgaggactatgaacaggcggcagctcacacacaccgatacttgtgcttggacaaatcagtaattgagctcagcaggcagggcaaggagggcagcatgatcgacgctaacctgaaacttctacaggaggctgaacagaggctgaaggcaatcgtcgccgagaagtttgcaatagcaacaaaggagggagatctgcctcaggtcgaaagattttttaagatttttcctttattggggcttcatgaggagggccttcgtaaattttctgaatatctttgcaagcaggtagcctccaaggccgaagaaaatctcctgatggttctgggtaccgacatgtctgatagacgtgcggctgtgatatttgccgatacattaacattactgtttgaggggatcgctagaatcgtcgaaacgcatcaacctattgtggagacgtactacgggcctgggcgactctacactctgatcaaatacctacaggtcgagtgtgataggcaggttgagaaggtcgtcgataagttcatcaagcaacgggactatcatcagcaaaacttcgtgttctctttcttttag

SEQ ID NO: 219151 - DNA, 1344 bp, synthetic construct
  misc_feature 1..1344: note = Description of Artificial Sequence: Synthetic coding sequence
  source 1..1344: mol_type = other DNA
atgcgaaattccacgacagaaaaaatcgagccaagagagctcgaccctatcttgaccgaggttaccctcatgaacgcgaggagcgaactctatttgagattcctcaaaaaacgcatttcaagcgacttcgaggtgggggactctatggcgagcgaggaggtgaaacaagaacatcaaaaatgtctagacaaactccttaataattgtctgctctcatgtaccatgcaggagctgatcggcctctacgtgacaatggaggaatactttatgcgggaaactgtgaataaggctgttgcacttgacacttacgagaaaggacagttaacatctagcatggtcgatgacgtcttctacattgtcaaaaagtgcatcggacgtgcattgtctagctctagtattgattgcttatgtgcgatgatcaacctggcgaccaccgagctggagtccgactttcgcgatgtgctttgcaacaagctccgtatgggctttccagcaaccaccttccaagatattcagcgcggagttacttcagccgtgaacatcatgcactcctctcttcagcagggtaagtttgacaccaaaggaatcgagagcaccgacgaggcaaaaatgtccttcttggtcaccctgaataacgtggaggtgtgttcagagaacatctccacattaaaaaaaactcttgaatccgattgcactaagctgttttctcagggcatcggaggcgaacaggcacaggccaagttcgactcctgcctgagcgatcttgccgctgtgtcaaataaattccgcgaccttcttcaggaaggcctgaccgaactgaactcaacagctatcaagccacaggtacagccttggattaattctttcttttcggtcagccataacattgaggaagaagaattcaacgattatgaggccaacgacccgtgggtacagcagttcatcctcaacctggagcagcagatggccgagtttaaagccagtctctctccagtcatctacgactcccttacaggactgatgactagtctcgtcgctgtagagctcgagaaagtggtgcttaaatctacgtttaaccgtctgggaggcctgcagttcgacaaggaactgcggtctctgatagcctatctgactactgtgaccacttggaccattagagataagttcgcccgactgtcgcagatggccacaatcttaaatctcgaaagagtgaccgaaattttggactattggggcccaaacagcgggcctttgacatggcgcttaactccggctgaggtgaggcaggtcttagctctgcgcattgacttccggtcagaggacattaaacggctccggctgtag

SEQ ID NO: 219152 - DNA, 2583 bp, synthetic construct
  misc_feature 1..2583: note = Description of Artificial Sequence: Synthetic coding sequence
  source 1..2583: mol_type = other DNA
atgggatgggtcggcggacgcaggagagatagcgccagcccaccaggcaggagtcggtccgctgctgatgacattaatcctgctcccgctaatatggagggagggggaggaagtgttgccgtagcgggtctgggggctcggggaagcggcgcagccgctgcgactgtgagggagctgctccaggacggatgttattctgattttctgaatgaggatttcgacgtgaagacgtataccagccaatccattcaccaagctgtgattgccgagcagttggccaagctggcccagggtatcagccaattagaccgagaactgcatctgcaggttgtagcccgacacgaggatctgctggcccaggctaccggaatcgagtccctggagggggttctccagatgatgcaaaccagaattggtgccctgcagggcgcagttgaccgaatcaaagccaaaatcgtggagccctacaataaaatcgtggctcgcaccgctcagttggccaggcttcaagtggcctgcgatctgctgagaagaatcattcgcatcctcaacctgtccaagcggctgcagggacaactgcagggaggctctcgtgaaatcactaaggccgctcagtccctgaatgagttggactatttgtcacagggtatagacctctccgggattgaggtgattgagaacgacctcctgtttattgcgcgagcccgactagaggtggagaaccaggccaagcgattactggagcagggtctcgagacacagaaccctacacaggtcggaacagcactacaggtattctataaccttggcacgttgaaggatacaattacaagcgtcgtggatggttactgtgcaacacttgaagagaatatcaattctgccctggacatcaaggtactgactcagccttcccagagcgccgtgcggggagggcctggtaggtctacaatgcctacacccggtaataccgctgcactgcgagccagcttttggactaatatggagaaactgatggatcacatatacgctgtctgcggccaagtgcaacaccttcagaaggttcttgcgaaaaaaagagaccctgtttcacacatttgttttatagaggaaatcgtcaaagacgggcagcctgagatcttctacacattttggaactctgtgacacaagctctaagttcacaatttcatatggctaccaattctagtatgttccttaaacaggcattcgaaggagagtaccctaaactcctgagactttataacgatttatggaaacgtctccagcagtacagtcagcacatacagggtaatttcaatgcaagcggaacaaccgacctgtatgttgacctgcagcatatggaggatgatgcgcaggacatcttcattcccaagaagccggactacgatccagaaaaagcactgaaagattcgctgcaaccttacgaggccgcatatctgagcaaatccttatcccgacttttcgatccaatcaatctggtgtttcctcccggtggcaggaacccccctagctccgatgaattggacggaatcattaagacaatcgcgtcagaattaaacgtggcggctgttgatacaaacctgactctcgctgtgtcgaagaacgtggccaagactattcaactgtactccgtgaaatctgaacagttgctgtcaacacaaggcgacgcatcccaggtcataggccctcttacagaggggcagagaaggaacgtcgccgtggtcaacagtctgtataagctacatcagagtgttacaaaggtcgtctcttctcagtcctctttccccctggccgctgagcagacaatcatctcagctctgaaggccattcacgcgttgatggagaacgctgtacagccgcttctgacttctgtgggcgatgcaatcgaggcaataatcatcacaatgcaccaggaggatttcagcggcagtctgtcctcatccgggaagcctgacgtaccttgtagcctttacatgaaggagctgcaggggtttattgccagggtaatgtcagattatttcaagcatttcgagtgtctggacttcgtgtttgacaataccgaggcaattgcacaaagggcagtcgaactctttatccgacacgcatcacttatccgtcctctgggagagggcggaaaaatgagactcgctgccgattttgctcagatggagctggccgtgggcccattctgccggagggtgagtgatctgggaaaatcttatcgcatgttgcgcagctttaggcccctgcttttccaagctagcgagcacgtggcaagttcacctgccttgggtgatgtgattcccttctcgatcatcattcagttcttgttcactagagcgcctgctgaactcaagagtcccttccagcgcgctgagtggtcccatacaagattttcacagtggctggacgatcatccgagcgagaaagatcgcttactgttaatccgaggagccctcgaagcctatgtgcagtcagtcagatcccgggaagggaaggaatttgcccctgtataccccattatggtgcagctgctacagaaggccatgtccgccctgcagtag

SEQ ID NO: 219153 - DNA, 2520 bp, synthetic construct
  misc_feature 1..2520: note = Description of Artificial Sequence: Synthetic coding sequence
  source 1..2520: mol_type = other DNA
atgggttgggtgggaggccgacggcgagacagtgccagcccacccggaagaagcagatccgcagcagatgatattaatccagctccagccaacatggaaggcggaggcggatcagtggctgtcgctggcctgggagcacgaggaagtggcgcagccgctgctactgttcgcgagctcctgcaggatggatgctattccgatttcctcaatgaggacttcgacgtcaagacatataccagtcaaagcatccaccaggctgtcattgccgagcaactcgctaagcttgctcaaggaatcagccaacttgaccgggagctgcacttgcaggtggtagcacgccacgaggacctgctagcgcaggctacaggcattgagtcccttgaaggcgttctgcagatgatgcaaaccagaatcggtgccctccagggggctgtcgatcggatcaaggctaagattgtggagccctacaataaaatcgttgccaggacagcacagctggccagactgcaggtcgcctgtgacctactgagacgtatcatccggatcctgaacctatctaagcggcttcaggggcaactgcagggagggagccgcgaaattacaaaagctgcccagagcctcaacgaactggactatcttagccaggggatcgacctgtcaggtatcgaagtgatcgagaacgacctgttatttattgcaagagccaggttagaggtggagaaccaggccaagcggctgctggaacagggactggaaacacagaatcccactcaagttggcacagccctgcaggtattctacaacctgggcaccctgaaggacaccatcacctctgtggtggatgggtactgtgccactctcgaggaaaatatcaactccgccttggacatcaaagtacttacccagccaagccagtctgcggtgagaggcggacccggacgctccaccatgcctacacctggaaataccgccgcactgcgggcaagcttttggacgaatatggagaaactgatggaccatatatatgctgtatgtggtcaggtgcagcaccttcagaaggtgttggcaaaaaagcgcgatcccgttagccatatatgtttcatagaggaaattgtaaaggatggccaacctgaaattttttatacattctggaactccgtaactcaggcccttagttctcagttccatatggccacaaattcatcaatgtttctcaagcaggcttttgagggggagtaccccaagctactgaggctttacaacgacctctggaagaggctgcagcagtactctcagcatattcaaggcaactttaacgcctcgggtactacggatctgtatgtcgacctgcagcacatggaggacgatgctcaggatattttcattcccaagaaaccagattacgacccggaaaaagccttgaaggacagcctgcaaccttatgaggcagcctatttgagcaagagcctgagccgactttttgatccaatcaatttggtctttccccctgggggtcgcaacccaccgtcatccgacgaactggatggtataatcaaaaccattgcctcagaattaaacgtggccgctgtcgataccaatctaacactggccgtgagcaaaaatgtagcaaagactatacagctgtattccgtcaagtctgaacaactcttatctacccagggtgacgcctcgcaggtcatcggccctctcacagagggtcagcggcgaaatgtggccgtggtgaacagcttgtataaactgcaccagtccgtcaccaaagctatccacgctttaatggagaacgccgtacagcccttactgacatccgtgggcgacgcaatagaagccatcatcatcaccatgcatcaagaggactttagcggaagcttgagttcctccggcaagccagatgttccgtgcagtctgtacatgaaagagctgcagggctttatagcaagagtcatgagcgattacttcaaacatttcgagtgtctggattttgtctttgacaatacggaagcaatcgcgcagagagcagtggaattgttcatacggcacgcttcactgatccggcctctgggcgaagggggaaaaatgagactcgcagctgactttgcccagatggaactcgctgttgggcctttctgcaggcgagttagcgatctgggtaaaagctaccgaatgcttcggtcgttcaggccccttttgttccaggcctccgaacatgtcgcctcttctcccgcacttggtgacgtgattcctttttctattattattcagtttcttttcacacgcgcacctgccgagcttaaaagcccgttccagagggccgagtggagccatacacgattctcccaatggcttgacgatcatccatccgagaaagataggctattgctcatcagaggagccctggaggcttatgtgcagagtgtgaggagtcgtgaagggaaagagtttgcacctgtgtaccctatcatggtgcagctccttcagaaagccatgtctgcattacagtag

SEQ ID NO: 219154 - DNA, 2472 bp, synthetic construct
  misc_feature 1..2472: note = Description of Artificial Sequence: Synthetic coding sequence
  source 1..2472: mol_type = other DNA
atggggtgggtggggggaagacgacgggatagtgcctctccaccaggaaggagccgcagtgcggctgatgacattaatccagcccctgctaacatggaggggggaggcggaagcgtggccgtggctggcctgggggctcgcggttcaggagccgcagccgcaacggtccgggagctgctgcaggatgggtgttacagtgatttcctgaacgaagacttcgacgttaaaacttacacaagccagagcattcaccaagcggtgatcgccgagcagctagcaaaactggcccagggaatcagccagctcgaccgcgagctgcacctccaagtcgtggccaggcacgaggatctgctcgcccaggcgacaggaattgaaagtcttgagggggtgttacaaatgatgcagacacgcatcggagccttgcagggagcagtggaccgtatcaaggcgaaaattgtagaaccctacaataagatagttgctcgcacagcccaattagctaggttgcaggtggcgtgcgacttgctgaggaggatcatccgcatccttaacctgtctaagcgactccagggccagctgcagggcggttccagggagattacaaaagccgctcaatccctcaacgagctcgattacttgtcacagggcatagatctcagcgggattgaggtgatagagaacgatctgctgttcatcgccagagctcggcttgaggttgagaatcaagcaaaaagactactggagcagggtctggagacgcagaatcctacgcaagtcggtacggcactgcaggtgttctacaatctaggtacactaaaagatacgattacatccgtggtagatggctactgcgccaccttagaggagaacataaattcagctctcgatattaaggtcttaactcagcctagccagtctgccgtacgcggtgggccaggcaggtctaccatgcctacccccggaaacacagccgcattacgtgcctccttctggaccaacatggaaaaactgatggaccacatctacgccgtgtgcggacaagttcagcacctacaaaaagtcttggcgaagaagagggatcctgtgagtcatatctgcttcattgaagagattgtcaaagatggtcaaccagagatattttacacattttggaactctgttactcaggcgctcagttcacagttccacatggctaccaactcgtccatgtttctgaaacaggcatttgaaggggagtatccaaagctcctcaggctgtataatgacctttggaaaaggctccaacagtatagccagcacattcagggcaactttaacgccagtggaaccaccgatctgtacgtagatttacagcacatggaagatgacgctcaagacatcttcattccaaagaaacctgattacgatcctgaaaaagcgctaaaggattccctgcagccttacgaggccgcatacctcagcaagagcttgtccagactgttcgaccccattaacttagtgtttccaccagggggaaggaatcctccttcaagcgatgaactagacggcatcattaagacgattgcttctgaacttaacgttgctgctgtagataccaatttgaccctcgctgtgtccaaaaatgtggcgaagacgatccaactttatagtgttaaaagcgaacagctcttatctactcagggcgatgcctctcaggtgattggccctctgacagaggggcagcggagaaacgtggcggttgtgaactcgctttacaaactccatcagagtgtaacaaaagttgtatcctcccaaagtagcttcccccttgcggctgaacagaccattatctcagccctgaaagccattcatgcactgatggagaatgccgtgcagcccctgctgacctctgtgggagatgctatcgaggccatcattatcactatgcatcaggaggactttagtggctcactgtcctcttccgggaaacctgatgtgccgtgcagcctgtacatgaaggaacttcaaggctttatcgcacgggtgatgagcgattacttcaaacattttgaatgtcttgatttcgtgttcgacaacacagaggctattgctcagagggcggtagagctgttcatcaggcacgccagcctcatccgccctctaggagagggaggaaagatgcgcctggccgctgacttcgcgcagatggaactagctgtaggccctttttgtaggcgcgtctccgacctcggaaagtcttaccgaatgttgaggagctttaggcccctactgtttcaggcaagcgagcacgtggcatcatcccctgctttaggtgatgtcataccgttttctattatcatccagttcctcttcaccagagctccggcagaactgaaaagtccttttcagagggccgagtggagccatactcggttctcacagtggctcgacgaccatccatctgagaaggatcggctgctgctcattagatag

SEQ ID NO: 219155 - DNA, 2067 bp, synthetic construct
  misc_feature 1..2067: note = Description of Artificial Sequence: Synthetic coding sequence
  source 1..2067: mol_type = other DNA
atgcgtggcaggttcgcacatgcccagtactccagatgtctccgcggtccatgtctggccgaggtcgcagcaggcggaggcacgcgatccgctatggctgaaggatctggagaggtcgttgctgtcagcgccactggtgccgctaacgggctgaacaacggtgccggagggacaagtgccacaacttgtaaccctctctctaggaaactgcacaagatcttagaaacccgactggacaatgacaaagagatgttggaagcccttaaggcattgagtacattctttgtggaaaattctctcaggaccaggcgtaatctgcgtggcgatattgagcgcaagtctctcgccatcaatgaggaatttgttagcatattcaaagaagtgaaggaggagcttgagtccatttccgaggacgtgcaagccatgtccaactgttgtcaggacatgacctctcggctgcaggccgctaaagaacagactcaggacctgatagtgaaaactactaagctccagtccgagtctcagaagctggagatacgggcacaagtggcagatgccttcctgtccaaatttcaactaacctctgacgaaatgagcctcctgcgcggaactcgtgaaggaccgatcaccgaggactttttcaaagctcttgggagggtgaagcagatccataacgacgtcaaggttctgcttcgcacgaatcagcagactgccggtcttgagataatggaacaaatggctttgctgcaggaaacagcttacgaaagactctaccgctgggcgcaaagtgaatgtagaacgctgactcaggagtcctgtgacgtgtctccagtgttgacccaagctatggaggccctgcaggaccggcctgtcctgtacaagtatactctcgacgaattcgggaccgctcgacgttccacagtggtacgtggctttatcgatgccctcactagggggggacccggagggacaccacgccctatcgagatgcatagccatgacccactgcgctacgtcggggacatgttagcatggcttcaccaggcaactgccagtgaaaaggaacatcttgaggcactgcttaagcatgtgaccacacagggcgtggaagaaaatatccaggaggtggtgggacatattacagagggggtgtgccgcccactgaaggtgcgaatcgagcaggtcattgtcgccgagcctggagccgtgcttctctacaaaatttccaatctgctaaagttttaccaccataccatctcaggcattgtgggtaacagcgccacggccctgctcactaccatcgaggaaatgcatttactgtccaaaaagattttcttcaattctttgtccttacacgccagtaagctgatggataaagtcgaactacccccacccgacctgggccctagctctgcactgaaccagaccttgatgctccttcgtgaggttttagcctctcatgactcttcagtggttccactggatgccaggcaggcggactttgtgcaggttctgtcttgcgtcctcgatccattgttgcagatgtgcaccgtgagtgcctcaaatttgggtaccgctgatatggccacatttatggtgaactccctctacatgatgaagaccacccttgcgcttttcgagtttaccgaccggagattggaaatgcttcagttccagatcgaagctcacctcgacaccttgatcaatgagcaggcttcctacgttctgacccgtgttgggctctcttatatttacaacactgtgcagcagcacaaacctgagcagggtagtctggcaaacatgcccaacttggacagcgtgacacttaaggcagcaatggtccaattcgaccgatatctgtccgccccagataacctacttatccctcaactaaacttcctacttagcgcaacagtgaaggaacagattgttaagcagtcgactgaacttgtctgtcgggcatatggggaagtgtacgccgctgtgatgaatcccattaacgaatataaggaccctgagaatatcttgcacagatcgccgcaacaggtgcaaactctgctgagctag

SEQ ID NO: 219156 - DNA, 1848 bp, synthetic construct
  misc_feature 1..1848: note = Description of Artificial Sequence: Synthetic coding sequence
  source 1..1848: mol_type = other DNA
atggctgaggggtccggagaggtggtcgctgtcagcgccacgggggctgctaacgggcttaataatggtgccggagggaccagtgccacgacgtgtaaccccctgtcacggaagctgcataaaatcttggaaacaagactagataatgacaaggaaatgctcgaggccttgaaggccctgtctacattctttgtggaaaactcgctgcgaacccggcgaaatctccgcggagacatcgagaggaagagtctcgccatcaatgaagaatttgtgagcattttcaaggaagtgaaggaagaactggagtccatttccgaagacgtccaagccatgtcaaactgttgtcaggatatgacctctcgcctgcaggctgccaaggagcagacccaggacttaattgtcaagacaaccaagttgcaatccgagagccagaaactggaaattagagctcaagtagccgacgcctttctttctaagttccaacttacatcagatgagatgtctctactccgcggaacccgtgagggacccatcacggaagacttcttcaaggctctcgggagagtgaaacagatccacaacgacgtcaaagtgctcttacgcacaaatcaacagacagccggactggagatcatggagcagatggccctgctgcaggagactgcctacgagagactctatcgatgggctcagtcagagtgcaggacactaacacaggagtcctgcgacgtgagccccgtcctgacgcaagctatggaagctctgcaggaccgaccagtgctctataagtatacacttgatgagttcggcacagcgaggcgatcaactgtggtgcgaggattcattgatgcacttaccaggggcggacccggaggtacacccagaccaatagagatgcactcacacgaccctctacggtatgtcggcgatatgctggcatggctgcatcaggcaacagccagtgagaaagagcatctcgaggcacttctgaagcatgtcacaacacagggcgtggaggagaacatccaggaggtggtcggtcacattactgaaggtgtttgtagaccactaaaggtgagaatcgaacaagtcattgtggccgagccaggagcagtcctcctgtataagatcagtaatctcctcaagttctaccaccacacgattagcggcattgtaggaaattcagccaccgcattactaaccaccatcgaggagatgcacttgctgagcaagaaaatttttttcaacagcctttctctgcatgcctcaaaactgatggataaggtggagcttccaccccctgatctgggccctagttcagcactgaatcagacacttatgctcctccgggaagtgctcgcctcacatgattcctcagtcgtgccactggatgccagacaagcggattttgtccaggttttgtcttgcgtcctggatccacttctacagatgtgtaccgtgagcgcctccaacctgggcacggcagacatggccacatttatggtcaattctctatacatgatgaagactacgctggctttgttcgaatttaccgatcgccgactggagatgttgcagttccagatagaggcccacctggacacactcataaatgaacaagcgtcctacgtgctgacccgcgtgggcctctcatacatctataatacagtacaacaacataagcctgagcaggggtcactcgcaaatatgcccaatttagactccgtgaccctgaaagcagcgatggtgcagtttgaccggtacctaagtgctcctgataatctcctgataccccagcttaattttctgttgtctgcaacggtgaaacggcctcccaacggcccttag

SEQ ID NO: 219157 - DNA, 1974 bp, synthetic construct
  misc_feature 1..1974: note = Description of Artificial Sequence: Synthetic coding sequence
  source 1..1974: mol_type = other DNA
atggctgagggcagcggggaggtggtcgctgtgtcagccactggcgcagctaacgggttgaataatggggcagggggaacctccgccaccacgtgcaatccactctcgcgaaagctccacaagattttggaaactaggctcgataatgataaggagatgctcgaggccctaaaagccttgagcaccttttttgttgagaactctcttcgaacacgtaggaacctaagaggcgatattgaaagaaaatcactcgcgatcaacgaggagttcgtatccatatttaaggaagttaaagaggaattagaatctatatccgaagacgtgcaggcaatgagcaattgctgtcaggacatgacaagcagactgcaggctgccaaggaacaaactcaggatctgattgtgaaaaccacaaaattgcaaagcgaatctcagaaacttgaaatcagggctcaagtggccgacgcctttctttccaaatttcagcttacttctgacgaaatgtctctgcttagggggactcgagaggggcctattacagaggacttttttaaagccctaggccgagttaagcagatccacaacgatgtcaaagtgctgctaagaacaaatcaacaaacggcagggttggaaataatggagcagatggcgctccttcaggaaacggcctacgaaagactatatcgatgggcccaatcggaatgtcggacactgacacaggagtcttgtgacgtgagtcccgtgcttacccaggcgatggaagctcttcaagacagacccgtgctgtacaaatacacgttagatgaattcggaacagcccgtaggagtaccgtcgttagagggtttattgatgctttaacaaggggcggaccaggtggaacaccacgacccatcgagatgcacagccacgatcctttacgctacgttggggacatgctagcgtggctgcaccaggcaaccgcgtccgagaaggaacacctggaagcactgttaaaacatgtgacaacccagggggttgaagagaacatacaggaggtagtcggccacatcaccgaaggggtgtgcaggccactgaaagtcagaatcgagcaggtgattgttgcagagcctggggcagtgctgctctacaaaatatctaacctcttgaaattctatcaccacacgatttccggtatcgtcgggaattcagcaaccgctctgctcactacgatcgaagagatgcacctgctctctaaaaagattttcttcaactcgctctctctccatgccagtaaactgatggacaaggtcgagctgccaccccctgacctgggtcccagttcagcactaaaccagactctcatgctgctgcgcgaggtcctagcctctcatgactcatccgttgtgcctcttgacgcgagacaggctgattttgttcaggtgctgtcttgtgtcctggacccactgctccagatgtgtactgtctccgcatcaaacctcgggaccgctgacatggcaacatttatggtgaactccttgtacatgatgaagactaccctggctttgttcgaatttactgaccggcgactcgaaatgctccagttccaaattgaagcccacctggatacactaatcaatgaacaggctagttatgttctgacacgtgttggcttgtcatatatctataatactgtgcaacaacataaacctgagcagggtagcctggccaacatgccaaatctggattcggtgactctaaaagcggcaatggtacaattcgaccgctacctctcagcccctgataatttgctgattccacaattgaatttccttctgtccgccactgttaaagagcagatcgtaaagcagagtacggagctggtgtgccgagcctacggcgaggtgtacgccgcagtgatgaaccctattaacgaatataaggatccagagaacatcctgcatagatccccacagcaggtgcagaccctattatcctag

SEQ ID NO: 219158 - DNA, 2313 bp, synthetic construct
  misc_feature 1..2313: note = Description of Artificial Sequence: Synthetic coding sequence
  source 1..2313: mol_type = other DNA
atggattttagtaaatttctcgctgacgattttgatgtaaaggagtggattaacgcagcttttcgcgcaggatcaaaggaggctgcctctgggaaggccgatggccacgccgcaacgctggtgatgaaactacagttattcatccaggaagtaaatcacgctgtggaagagacgtcgcatcaggcactgcagaatatgcctaaggtattgagggatgtagaggccctaaagcaagaggcaagctttctgaaggagcagatgattctcgttaaggaagacatcaaaaagttcgaacaagatacctcacagtccatgcaagttctagtagaaatcgatcaggtaaaatcccgcatgcagctggctgccgagtcactgcaggaggccgataaatggtccaccctgagcgccgacatcgaagagactttcaagacccaggatattgcagtgatttctgctaagctgaccgggatgcagaactcactgatgatgctagtggacacgccagactacagcgaaaagtgcgtccaccttgaggccttgaagaaccgactcgaggctctcgcctctccccagatcgtagcagcttttacttctcaagccgtggaccaatccaaagtgttcgtgaaggttttcacagagatcgaccgcatgcctcagctcttagcctattactacaagtgtcataaggtgcagctcttggccgcatggcaggaactctgccagtccgatctgtctctcgatcgccagctgaccggactgtacgatgcgttgctgggtgcttggcacactcagatccaatgggccacacaagtctttcagaagccgcatgaggtcgtgatggtcctgttgatccagacgctcggcgctctcatgccttccttgccctcatgcctcagcaatggggtggaacgcgcaggccctgaacaggagcttacccgtctgttagagttttatgatgccactgcgcatttcgcaaaaggcttagagatggcacttttgcctcatcttcacgagcacaatttagtgaaggtgacagaactcgtggatgccgtctacgacccatataaaccctatcaactcaagtacggagatatggaagaaagcaacctcctcattcagatgtcagctgtccccctggagcatggcgaagtgatcgactgcgttcaagagttgtcgcactccgtaaataagttattcggactcgcctctgcagccgtcgatcgatgtgtaagatttactaatgggctgggaacatgcggcctgcttagcgcccttaagtccctgtttgctaagtacgtatcagattttaccagcaccctgcagtccatcagaaagaagtgtaagctcgaccacatacctcccaactccctgttccaggaggattggaccgcgtttcagaactctatccgcatcattgcaacctgtggcgagcttctgcgtcattgcggagactttgagcagcagctagccaaccggatcctgtccacagccggtaagtacctgagcgactcctgtagcccacgaagcctcgcgggatttcaagagagcatcctcacagacaagaagaatagcgctaaaaatccttggcaggaatacaattacctgcagaaagataaccccgctgaatacgcttccctcatggagatcctctatacgctaaaggagaaagggtccagcaaccacaacctgctggcagctcccagggccgcacttacacgcctgaatcaacaagcacatcagcttgctttcgacagtgtgttcctgcggattaagcaacaactactgctcatctcaaaaatggattcgtggaatactgctgggattggtgaaacgcttaccgacgagttgcccgctttttccttgacacctctcgagtatatcagcaacatcggtcagtacattatgtccctccctctcaatctggagccattcgtgacacaagaggatagtgcgctggagttggcactccatgctggcaagctgccatttccaccagagcagggagacgagctgcctgaactggataatatggctgataattggcttggcagcattgctcgtgctacaatgcaaacgtattgcgacgccattcttcagatccctgagctttccccacatagcgccaagcagttggcgactgatattgactacctcatcaacgtaatggatgccctaggcctgcaaccgtcaagaactttacagcatatcgttacgctgctcaagactaggcccgaggattacaggcaggtttccaagggtctgccaaggcgcttggccacaaccgtggcaactatgaggtctgtaaattactag

SEQ ID NO: 219159 - DNA, 1839 bp, synthetic construct
  misc_feature 1..1839: note = Description of Artificial Sequence: Synthetic coding sequence
  source 1..1839: mol_type = other DNA
atggctaccgccgcaaccatcccttcggtggctaccgccacggcagcggctttaggcgaagtcgaggacgaaggtctcctggcctcattatttcgtgacagattccccgaggcccagtggcgcgagcgtcccgatgtgggccgatacctgcgtgaactgagcggctccgggctggagagactgcggcgagaaccagaacggttagccgaggaacgcgcacagctgctgcagcagactcgcgatctggcattcgccaattacaagacttttatccggggagccgagtgtaccgagaggattcaccggctgtttggtgacgtcgaagcctcactaggacgcctccttgaccgcctcccatcatttcagcagagctgccggaactttgtgaaggaagccgaggagattagctccaaccggcgaatgaacagtctgaccttaaaccggcacactgagatccttgagatactggagatcccgcagcttatggacacttgtgtgaggaacagctactatgaagaggctctggaattagccgcttatgtccggcgacttgaacgcaaatactcttcaatccccgtaattcaggggatcgtaaatgaagtccgccagagcatgcagctaatgctttcccaattgatccagcaacttcgtaccaatatccagcttcccgcatgcttgcgggtgattggttacctcaggagaatggacgtgttcaccgaggctgaactcagggtgaaatttctgcaggcgcgagacgcatggcttaggagtatattgaccgccatccccaacgacgacccttacttccatatcacaaaaacaatcgaagccagtcgggtgcatctctttgacatcattacccagtacagagccattttctccgacgaagaccctctgcttccccctgcgatgggggaacacaccgtcaacgagagcgcaatcttccacgggtgggttctacagaaagtatctcagttcctccaggtgctggagacagatttgtatcgaggcatcggaggacatttagattcgctgctaggccagtgtatgtactttggattgtcattctccagagtaggggcagatttccgcggacaactcgcccctgtgtttcagcgcgttgctattagcacctttcagaaagccatacaggagacggtggagaaatttcaggaagaaatgaattcatatatgctcatcagtgctcctgcaattttaggaacctcaaatatgccagcagcagtgcccgcaactcagccgggtacgcttcagcctcccatggtgctgttagactttccacctctcgcatgcttcctcaacaatatcctggtggctttcaacgacctgcggctgtgctgccccgtggcactggcacaggacgtgaccggagccctggaggacgcacttgcaaaggttactaagataatactggcttttcatcgcgctgaagaagccgcattctctagtggcgagcaggagctttttgtacaattttgcaccgtgtttcttgaggaccttgtgccatatctgaatcggtgtcttcaagtgctgttcccacccgctcagatcgcccagacattgggcatcccaccgacacagctgtccaaatatggcaacctgggccacgtcaatatcggcgctatccaagagcctctggctttcatactcccgaaacgtgagactctgtttacgttggatgaccaggcattgggaccagagttgacagctcccgctcccgagccgccagccgaagagccacgccttgagcccgctggacctgcatgccctgaaggcggacgggcagaaacccaagcagagccgccatcagtgggaccatag

SEQ ID NO: 219160 - DNA, 2109 bp, synthetic construct
  misc_feature 1..2109: note = Description of Artificial Sequence: Synthetic coding sequence
  source 1..2109: mol_type = other DNA
atggagtccccatccgcgcctccgcatcgctggtgcatcccttggcagcgtctcttgctgactgcatctcttctgactttttggaacccaccgacaactgcaaaattgacgatcgagtccaccccgttcaatgtggcggagggtaaagaggtgttactccttgtgcacaatctgccccagcacctcttcggctacagctggtacaaaggagagagagtcgatggtaaccgccagataatcgggtacgtcattggtactcaacaagcgactcccggtccagcctatagtggcagggaaattatctaccccaacgcatccttgctcattcagaatatcatccagaacgatacaggcttctacacccttcatgtaattaaaagcgatctggtcaacgaggaggccaccgggcagtttcgagtttatcccgagctccctaagccctcgatatccagtaataactcgaagccggtcgaagataaggacgccgtagcgttcacttgtgaacccgaaacgcaagacgctacctacctttggtgggttaataatcaatctcttcctgtcagccccagactacagctctcaaacggcaacagaaccctaacgctgtttaatgtgactcggaatgacaccgcaagctacaagtgtgaaacgcagaaccccgtctcggccagacggagcgattctgtgatcctgaacgtgctgtatggcccagacgccccaacgatcagccctttgaacactagctatcgatcaggtgagaatctcaatctgagctgtcacgccgcatccaatcctcctgcacagtactcttggtttgtcaacggcactttccagcagtccacgcaggaactgtttattccgaatattaccgtgaacaacagcggcagctacacatgtcaagcccataactcggacacagggctgaaccggacaaccgtgaccactatcaccgtatatgcagagccgcctaaaccatttattacatctaataacagcaatcccgtggaggacgaggacgcagtagccctcacgtgtgaacctgaaattcaaaacaccacctacctgtggtgggtgaataatcaatcactgccagtgtcccctaggctccagctctctaatgacaatcggaccttgaccctcctgagtgtgacccggaatgacgtcggtccgtacgagtgtgggattcagaataagttgagcgttgaccattccgaccctgtaattctgaatgtgctttatggccctgacgacccgacgatctcccccagctatacatattatcgccctggcgtgaacttatctctgagttgccatgccgctagcaatcctcctgcacagtactcttggcttatagatggaaatatccagcagcatacacaggagctgttcatctctaatatcaccgaaaaaaatagtggcttatatacatgtcaggccaacaactccgcatccggccacagtcgtactaccgtgaagacgatcacagtgtccgccgagctgccgaagccctcgatttcatccaataacagtaagccggtggaagataaagacgctgtggcttttacctgcgagcccgaagcccagaacactacctatctgtggtgggtgaatggtcaaagcctcccggtgtcgccgagactgcagctgagcaatgggaatcgtacactgacactgttcaacgtgactcgtaacgatgccagggcgtacgtgtgtggcattcaaaattccgtctccgctaatcgcagcgaccccgtgacattggacgtgctgtacggcccagacacccctattatcagtcctccagattcctcctatttgtccggagccaatttgaacctctcctgtcacagtgctagcaacccgtccccgcagtattcatggcggataaacggcatccctcagcagcatacgcaggtgttgtttattgctaaaatcactcccaacaacaacgggacctatgcatgctttgtgtctaacttggctaccggcagaaataattctatcgtcaagagtattacagtgagcgcttctggcactagccctgggctgagtgcaggagccactgtgggcattatgatcggcgtgctggtgggagtagcacttatatag

SEQ ID NO: 219161 - DNA, 981 bp, synthetic construct
  misc_feature 1..981: note = Description of Artificial Sequence: Synthetic coding sequence
  source 1..981: mol_type = other DNA
atgatggcctacatgaaccctggtccacactactctgtgaacgcactcgccctgagcgggccaagcgtcgacctcatgcaccaagccgtcccttatccttctcctccactggccctagacccccctaggagacagcgccaggaaaggaccgtttacacagaatctcagcagaaggtgctcgagttttacttccagaaagaccagtacccaaattatgaccaaagactaaacctggccgagatgctatcccttagggagcagcagttacaagtatggttcaagaatagacgggcaaaactggccagagagaggcgcctccagcagcagccgcaaagggtcccaggtcaaaggggaagaggggcaagagccgctcccctcgtgcccgtcgcagcagctagcttccctggcggacccgagttcccccagggcagaggatcctggatttcccctcagccaggcccatggggcgtcctgcctgccgcagagccaaagatctactccctgcccaggacctggggcggtcctgaatgtggtactcaggagggcctgaaggcggtcccggctccaggacctggccctatcccagcgcctatccctggcccagcccagatccctggacccgtaccaggacctgcgcctaatttgggcccaatgtcagggcctctgtccgtatctatcccaggccctattcccgctcccatcagctgtcccggaccaatccccgatcctgtattgggacgcactctgatgccgggacctgggtccctaccgacaccagcgccaggagcgctttggccccagtcgccctacgcctccaatttatctcccgacacccaactctatccagatttcacgaagctcctgcccctcctcgacagatttgaggaaagctcactgtctactacgacgagccagtataaagaagaagacggctttgtggataagaaccacagtgtacctaggagccttctggacctttag

SEQ ID NO: 219162 - DNA, 900 bp, synthetic construct
  misc_feature 1..900: note = Description of Artificial Sequence: Synthetic coding sequence
  source 1..900: mol_type = other DNA
atgatggcgtacatgaatccgggtccgcactatagcgtcaatgcactagctctttctgggcctagtgtcgatctcatgcatcaagctgtgccctatccgtcagcgcctaggaaacagcggagggaaaggaccacttttacccgaagccagctcgaggagctcgaggccttgtttgccaaaacacagtacccagatgtgtacgctcgggaggaggtggctctaaaaatcaacctccccgagagccgggtgcaggtgtggtttaagaaccggcgagccaagtgccggcaacagcgacagcaacagaagcaacaacagcagcccccagggggacaggctaaggctaggccagccaagagaaaggcaggtactagcccccgtccgagcacagatgtttgtcccgatcccctgggcatcagtgactcatactcccccccactgcccggtccaagcgggtctccgacaactgcagtagccacagtatctatctggagtcccgcaagtgagtccccactgccggaggcccagagagccggattggtggcaagcgggccatctctcacttctgctccatatgctatgacttatgcacccgcatctgcgttctgctcttctccctcggcctatggaagtccttcatcatacttctccgggctcgacccgtacttgtctccaatggtgcctcagttgggcggacccgctctgtcacctctcagcggaccttcggtaggaccttccctggcccagagccctacctcactgtcagggcaaagttatggcgcatatagtccagtagactcactggaattcaaggatcccacgggaacttggaaattcacatataatcctatggatccgctcgattacaaggaccaatctgcatggaagttccagatactttag

SEQ ID NO: 219163 - DNA, 900 bp, synthetic construct
  misc_feature 1..900: note = Description of Artificial Sequence: Synthetic coding sequence
  source 1..900: mol_type = other DNA
atgatggcctatatgaaccccggaccccattacagtgtgaatgccttggctctcagcggaccaagtgtggacctgatgcaccaagcagtgccttaccccagcgctccacggaagcagaggagagagaggacaaccttcacccggtctcagttggaagagttggaggcactttttgctaagactcaatatcctgacgtatacgcacgtgaagaggtcgccctgaaaattaatctccctgaatcaagggtccaagtgtggttcaaaaacagacgagctaagtgccgccagcagcggcagcagcagaagcaacagcaacagcctcccggaggccaggccaaggcacgtcctgccaaaaggaaggcagggacctcaccccgaccctccacagatgtttgccctgatccactgggaattagtgattcttattcccctccactcccaggcccttccggctctccaaccactgcagttgccacagtgtcaatttggagccccgcatcagagtcccccctgcctgaggcacagagggctgggctcgttgccagcgggccaagtctgacttccgccccttacgctatgacttacgcacctgcctcagccttttgcagctccccaagcgcatacgggagtccatcctcctacttttccggactggacccatacttgtctccaatggttccacagctggggggacccgcactttcaccccttagtgggccatccgtgggcccttctctagcacagtcacctacctcactaagtgggcagtcctacggcgcttacagccccgtggactctctggaatttaaagacccaacaggaacttggaagtttacatacaatccaatggatccccttgattacaaggaccagtccgcttggaaattccagattctgtag

SEQ ID NO: 219164 - DNA, 900 bp, synthetic construct
  misc_feature 1..900: note = Description of Artificial Sequence: Synthetic coding sequence
  source 1..900: mol_type = other DNA
atgatggcctacatgaatcccggtccgcattacagcgtgaatgcactggcactctccggaccatctgttgacctgatgcatcaggccgtgccgtatccctccgcccctcggaagcaacgaagggaacggaccacctttaccagatctcaactagaggaactcgaggctctgttcgcgaaaacacaatacccagacgtctacgctagagaagaagtggcgctcaagatcaacctccccgaatctagagttcaagtttggtttaaaaatcggagagcaaaatgccggcagcagagacaacagcagaaacagcaacaacagccacctggaggccaggccaaggccagacctgccaaaagaaaggctggaacttctcctagaccatccactgacgtctgtcccgatcccctgggcatctctgattcatacagcccacctctgccaggtccatctggatcacctactaccgcagtagcaacagtgtcgatctggtctccggctagcgagagccctcttcccgaagcacaacgtgcgggtctggtagcctccggcccatctcttaccagcgctccctacgctatgacatatgccccagcgtccgccttttgttcgagcccctccgcctacggctctccatcaagttattttagcgggctggatccctatttatccccaatggtcccccagcttggcggaccggctctgagcccgctatccggcccttccgttggtccatcactggctcagagccccacatctctctcgggacagagttacggtgcttattctccagtcgattctctggagtttaaggaccctaccggcacatggaaatttacttacaaccctatggacccgctggactacaaggaccagtcagcctggaaattccagatcctgtag

SEQ ID NO: 219165 - DNA, 3678 bp, synthetic construct
  misc_feature 1..3678: note = Description of Artificial Sequence: Synthetic coding sequence
  source 1..3678: mol_type = other DNA
atggccgcagtgcttgagagtttattgcgcgaggaagtgtccgtggctgcagtggtccgttggattgctaggtcgacacaggggagtgaggacaatgctggcgaagccgctgctctaagcagcctgcgagcactgagaaaagagtttgttccatttctgttaaatttcctcagagagcaatcttctagggtgctgccccaagggccaccaacccccgctaagactccaggggcttctgccgctttacccggtcgccctgggggtccccctcgcggaagccgcggagccaggtcacaactcttcccacccactgaagctcagtcaactgcggctgaggcacccctcgctcgacgcggtggtcgccgacgagggcctggcccagcgcgtgagagggggggtaggggccttgaggaaggtgtttctggagagagcctgcctggagccggtgggagacgactgcggggtagcgggtccccttcccggccaagtctgactctgagtgatccacccaacttgagcaacctcgaggagtttccacccgttgggtcagtgccaccgggtccaacagagactcagcttagctgtcgacgttgggtgccgcgacggctgtggggggtgagtcacagttccagcgctctgcgctccggtgcgcctgggtgccgtactaaaccctcaagaagaatcaacccaaccccggtgtccgaagaaagaagcctgtctaaacctaaaacctgctttacaagccctcctatatcatgtgtgcccagcagcaaacagctgcaacagagcccaacaccaacctgtcccaccccggaactggggtctccattaccaagtcgaacagggagtctcacagatgagcctgcagatccagcacgggtctccagcaggcagcggttggagctggttgctctcgtgtactcgtcgtgcattgccgaaaacttggtgcctaacctgttcctcgagcttttctttgtcttccagctgttaactgcaagaagaatggtgaccgccaaggatagcgatccagaactgtccccagctgtgctcgacagcctggaaagtccactcttccagagcattcatgactgcgtctttttcgctgtccaggtgctggagtgccacttccaggtgctgagtaaccttgataaaggcactctcaaactgctagccgaaaatgaaagactgttgtgtttttcccctgctctacaaggcaggctgagggcggcttatgaaggatccgtggctaaagtgtctttggtaatgcctccttctacccaggctgtttcctttcagccagagaccgataacagggccaatttctccagcgaccgcgctttccacaccttcaaaaagcagagagacgtattctatgaagtcctaagggagtgggaggaccaccacgaggagccaggttgggatttcgagaaagggcttggcagccgaatcagggcgatgatgggccaattgtccgcagcatgctcccacagccatttcgttcggctttttcagaagcagcttctccagatgtgccagagtccgggaggagcagggggtactgttcttggcgaagcacctgatgttctgtccatgctgggcgcagacaagctgggcaggctttggaggctgcaggaacgcctgatggccccacagtcatcaggaggaccatgtccccctcctacgttccctgggtgtcaaggattctttcgggacttcatactgtccgcttcaagctttcaattcaaccagcacctgatggacagcctgtccctcaagatacaagagctgaatgggcttgctctgccacagcacgagccgaatgacgaagacggtgaatccgacgttgactggcagggagagaggaagcaatttgctgtagtcctcctttccctccggctcctggctaagttcttaggcttcgtggcgttcctgccctatcggggaccagaacctcctcctaccggtgagcttcaagattctatactggcgctgcgctctcaggtccccccagtactcgatgtaagaaccctgctacagagaggtttgcaggctagacgtgcggtgctgacagttccttggttggttgagtttttgtcatttgccgatcacgtggtcccgctgttagaatactaccgggacatttttactctgctgctgaggttgcacagaagcttggtcctgtcacaggaatctgagggtaaaatgtgcttcttgaataagctgctgctgctagctgttctaggatggctgtttcaaatccccactgtgcctgaggatctgttcttcttggaagaaggcccttcatacgcctttgaggttgacacagtcgcgcctgaacatggcttggacaatgccccagtggtcgatcagcagctgctgtacacttgctgtccgtacattggagagttaaggaagcttctcgcttcgtgggttagcgggtcttctggcagaagcggaggatttatgcgcaagatcaccccaactaccacaactagcctgggcgcacaaccgagccagacatcccagggacttcaggcgcagctcgctcaggcgttctttcacaaccagccacccagtttaaggcggaccgtcgaattcgtcgcggagcgaattggtagtaattgcgtgaaacatatcaaggccacactcgtggccgacctggtcaggcaagcagaatcattacttcaggaacagctggttactcagggagaagagggcggagatccagcgcagctgctggaaatcctgtgcagccagttgtgcccccacggggcacaggctctggctctggggagggaattctgtcagagaaagtctcctggagctgtgcgcgctctattgcccgaggagactcccgctgctgtgttgagttccgccgagaacatcgcagtcgggctggctaccgagaaagcttgcgcatggctgtccgccaatattaccgccctgatccggagggaagtcaaggcagccgttagtaggaccctgagggcgcagggcccagagcccgcagccagaggagagcggagggggtgctcaagggcctgtgagcatcacgctcccctcccttcacatctgatctctgagatcaaggatgttctctcgctggccgtgggaccccgtgatccagatgaaggagtgtctcctgaacatctggaacagctgctcgggcagctgggacaaactttgagatgtcgccagtttctttgccccccagcagagcagcatctagccaagtgttccgtggagttagcatccctgctggtcgctgaccagattcccattttagggcctcctgcccaatacaggctagaaagggggcaggcccgtcggctccttcatatgctgctgtcactttggaaggaagatttccaaggacccgtcccccttcagttgctgctgtccccgaggaatgtgggtctgctggccgatacccgtccccgtgagtgggaccttctcctgttcctgttgcgcgaacttgtcgaaaagggccttatggggcgaatggaaattgaggcgtgccttggatcgctgcaccaagcccagtggcctggggatttcgccgaagagctcgcgacactctctaatctgttcctggctgagccacacctgcctgagccccagctcagggcttgcgagcttgtgcagccaaacagaggtacagtcttggcccagagctag

SEQ ID NO: 219166 - DNA, 3684 bp, synthetic construct
  misc_feature 1..3684: note = Description of Artificial Sequence: Synthetic coding sequence
  source 1..3684: mol_type = other DNA
atggccgcagtgctggaatccctgctccgggaggaggtttcagttgctgctgtcgtacggtggatagctcggtcaactcaaggttccgaagacaatgcgggagaagccgctgcactaagtagtcttagagcgttaagaaaggaatttgtgcccttccttcttaacttccttagggaacaatcttcacgggtccttcctcaggggccacctactcccgctaaaacacctggggcttctgccgctctgcctgggagaccaggcggacctcctcggggatcacggggagccaggtcccaactgtttcctccgactgaggcacagtccaccgcagcagaagccccactggccaggagagggggtcgaagaagaggccctggccctgcacgggaacgtgggggacgcggattggaagagggcgtaagcggggagtcactgcctggcgctggtgggcgtcgcctgcgtggcagtggctcccccagtagaccaagtttgacgctgagcgacccaccaaatctgagtaatctggaggagtttccaccagttggctcagtgcctccaggcccaaccggaacaaagcctagtcgacgaattaaccccactcccgtatcagaagagaggtcactctctaaaccgaaaacatgttttacatcccccccaatctcttgcgttccctcctcgcagccgtccgcactcgacacctctccttggggcttaggattaccaccgggatgtaggtccctgcaggaggaacgtgagatgctgaggaaggaacgctccaagcaactccagcagtctccaacgcccacatgccccactcctgagctcgggtcccctcttccctccagaacaggcagtctgacagatgagcccgctgaccccgcacgtgtttcttctaggcagcgcctggaacttgtggcactcgtgtactcctcctgcattgcagagaacctcgtgcccaatctgtttttagagctttttttcgttttccaactgctgacagctagacgcatggtgaccgcgaaggatagcgaccccgagctcagtcccgcagttctcgacagtctcgagtctcctctgttccagagcatccacgactgtgtcttcttcgccgtccaggtgctcgagtgtcacttccaggtgctttcaaacttggacaagggcacgctcaaactgctcgcagagaacgagagattactgtgcttttccccagcactgcaagggaggctgcgtgctgcttacgaaggatccgtagccaaggttagcctggtgatgccccctagtacccaggccgtgtccttccagccggaaacggataacagagcgaacttttcatctgatcgagccttccacacctttaaaaagcagagggatgtcttctatgaagtgttaagagagtgggaggatcaccatgaggaacccggatgggactttgaaaaaggtctaggtagcaggattagagctatgatgggccagctctcggccgcttgcagccattcacatttcgtgaggttatttcagaagcagctcttacagatgtgtcagagccctggtggcgctggtggcacagtgctgggtgaggcgcctgatgtactctccatgttgggtgcggataagctaggtcgtctgtggagactccaggagcgactgatggctccacagtcaagcggcggtccctgtcctccacctacgttcccaggctgtcaaggtttctttagagattttattctgtccgccagctcgtttcaatttaatcagcacttaatggactctctaagtctgaaaattcaggaactgaatgggctggctcttcctcagcacgaaccaaatgacgaggacggcgaatctgacgtcgattggcagggcgagcgcaaacagttcgcggtggttctgctctctctacgcctcctggctaagtttctgggattcgtggcctttcttccttacagaggacccgaaccaccgccaactggcgagctccaggatagtatcctggcccttaggtcacaggtccccccagtcctagatgtacgcaccctcctgcagagaggcctccaagcaaggagagctgttctaaccgtgccatggctggtggaatttctctcctttgccgatcatgtggtacctctgttggagtactaccgggatatttttactctcctgcttagactgcaccgttctcttgtgctgtcccaggagagcgaggggaaaatgtgcttcctgaacaagctgctgctacttgcagtcctgggctggctgttccagataccaactgttcccgaagatctgtttttccttgaagaaggtccatcctacgccttcgaggtcgatacagtcgctccagaacatggcctcgacaacgctccagtggtggatcaacaattattgtatacatgctgtccttatattggggaacttcgaaagctcttggcctcatgggtgtcaggtagcagtggacgctctggagggttcatgagaaaaatcaccccgacaacaaccaccagcctcggggctcagccctcacagacctcccaggggctacaagcccagctggcacaagccttctttcacaaccagcctcccagtctgcgcaggacagtggagttcgtggccgagagaataggaagcaattgcgtgaagcacattaaggccaccctcgtggctgatttggttagacaggctgagtccctcctacaggagcagctcgtgacgcagggcgaagaaggtggtgatcctgcgcagctcctggaaatcttgtgctcccaactttgcccacacggggcacaggccttggcactgggcagagaattttgtcagagaaagtcgcccggagccgtgagggctctgctacccgaggagacaccggcagccgttctgagttccgcagagaacatcgcggtcgggctggccacagagaaagcctgcgcctggcttagcgcaaacattaccgcccttattcgccgagaagtgaaggctgcagtcagcagaacactgagggcacagggcccagagcctgcagcacgcggtgaacgacgcggttgctctagagcgtgtgaacatcacgcccctttgccttcgcatctgatctccgaaatcaaagacgtgctttccctggccgttggtcctagggacccagacgagggcgtttcaccggaacacctggagcagctcttgggccagctgggtcaaaccctgcgttgtcggcagtttctgtgtcctcctgccgagcagcacttggcaaaatgctctgtggagctggcatccctgttggtcgctgatcagatcccaatactggggcctcccgctcagtaccggctcgaacgtggccaggccaggcgactgctacacatgctgctctccctgtggaaggaagatttccagggaccggtccctttacaactcctgctctcccctcgcaatgtggggctgttagcagacacaaggccacgagaatgggatctgctgttatttctcctccgcgagttagtcgaaaaaggcctcatgggaagaatggagatagaagcttgtcttggcagcttgcaccaggcccaatggcccggagactttgctgaggaattagctacgctctcaaacctatttctggccgaaccacacctgcctgagccccaattgcgggcttgcgaactggtacagcccaacagggggacagtcttggctcaaagctag

SEQ ID NO: 219167 - DNA, 2697 bp, synthetic construct
  misc_feature 1..2697: note = Description of Artificial Sequence: Synthetic coding sequence
  source 1..2697: mol_type = other DNA
atggcgttaattatggagcctgtgagtaaatggtctccctctcaagtggtagactggatgaaaggcttggacgattgtttacaacagtacatcaagaactttgagcgggagaagatttccggggaccagctccttcgcatcacacatcaggagctggaagatcttggcgtgagcaggatcggccaccaagagttgattttggaagctgtggatcttctgtgtgccctaaactacggcctcgagactgagaatctgaagacgttgtcacacaagctcaacgcatcagcaaagaatttacagaatttcattacaggtcgccgaaggtctggacactatgatggaaggactagcagaaagctaccaaacgacttcttgacctctgtggtcgatctcatcggggcagctaaaagtcttctggcatggctggatcgttcaccattcgccgcagttacggattacagtgttacccgcaacaacgtcattcagctgtgcctcgagctgacaactatcgttcagcaggattgcacagtgtatgaaacagaaaataaaatattacatgtgtgcaaaaccctatccggcgtttgcgaccacatcatcagcttatcatcggacccactggtcagccaatctgcccacttggaggtgattcaattagccaatatcaagccaagcgaagggttggggatgtacatcaaatccacctatgatggactgcacgtcattacgggcacaacagagaatagcccagctgacaggtgcaagaaaattcatgccggtgacgaggtgatccaggtgaaccatcagaccgtagtgggctggcaactcaaaaacttggttaatgcactcagggaggatccttcaggggtaatccttacactcaaaaagaggccccaatcaatgttaacgtctgcccctgcgttgctcaagaatatgaggtggaagcctttagccctgcagcctctgatcccccgtagtccaacatcatcagtggcgacacccagtagtactatctcaacgcccacaaagagagactcctctgcccttcaggacctgtacataccgcctcccccagcagaaccatacattccacgcgacgaaaagggaaacctgccttgtgaggatctgagaggccacatggtcggaaagcccgttcataaaggtagcgaatctcctaactcctttcttgaccaggaatatcgaaaacggttcaacattgtcgaagaggatactgtgctctattgctacgagtatgaaaagggtcgctcgtcctcacaaggcaggcgcgagtctactccaacttacggtaagctccggcctatatccatgcccgttgaatacaattgggtgggcgactacgaagaccccaataaaatgaagcgcgattcacggagagagaactccctgcttcgttatatgagcaacgaaaagattgcccaagaggaatacatgtttcaaaggaactccaaaaaggatacgggtaaaaagtctaagaagaagggcgacaaatctaattctcctactcattacagcttgctgccatcgttgcagatggatgcccttaggcaagacattatgggcacacccgtaccagagaccaccctctaccacacttttcagcagagctccctccaacacaagtctaaaaagaagaataaggggcctatcgccggaaagtctaaaagaagaattagctgcaaagacctgggccgaggggactgtgaagggtggctatggaaaaaaaaggatgctaaatcctacttttctcagaaatggaagaagtactggtttgttttgaaagacgcctccctttattggtacatcaacgaggaggatgagaaagcggaaggctttatctccctccctgagttcaagatagaccgtgcctctgagtgcagaaaaaagtacgctttcaaggcctgtcaccctaaaatcaagtctttttacttcgcagctgagcacctcgacgatatgaaccggtggctcaacagaattaatatgctgacagccggatacgctgaacgggaaaggatcaagcaggaacaggattactggtcggaaagcgataaggaggaagcagatacgcctagcacccctaagcaggatagcccccctcctccatatgatacttatcctcgccctccatccatgtcatgtgcctctccctacgtggaggctaaacattcacgcctgtcctccacggagacatctcagagtcaatcctctcatgaggagtttcggcaggaggtgaccggctcctctgctgtctctcctatcaggaaaacagcatctcagagaaggtcctggcaggatctcatagaaactcctctgacctcttccggactgcattacctgcagacactgcctctggaggactctgtgttctcagacagtgcggcaatctcccccgaacacaggcgacagtcgacattaccgacacaaaaatgtcaccttcaggaccattacggcccttacccactggcggagagcgaaaggatgcaggttctcaatggaaacggtggaaagccaaggtcatttactctgccacgagacagcggtttcaatcattgttgtctcaatgcccctgtgagcgcctgtgatccgcaagacgacgtgcaaccaccggaagtcgaagaagaggaagaagaggaggaagaggagggcgaggcagctggggaaaacattggagaaaagtcatag

SEQ ID NO: 219168 - DNA, 3105 bp, synthetic construct
  misc_feature 1..3105: note = Description of Artificial Sequence: Synthetic coding sequence
  source 1..3105: mol_type = other DNA
atggcattgattatggagccagtgtctaagtggtctccatctcaggtggtggactggatgaaaggcctcgacgactgcctgcagcaatacatcaagaatttcgaacgggagaaaatctcaggcgatcagttgctcaggatcacacaccaggagttagaggatctgggcgtgagtagaatcggtcaccaggaactcattctggaggcagtggacctgctgtgtgcactaaactatggtctggagactgaaaatctcaagacactctcgcataaactaaacgcctccgcaaagaacctgcagaatttcatcaccggcagacggcgatctggccactatgatggtcggacatccagaaagctgcccaatgactttctgacttctgtcgtagatctgataggagcagccaaaagtttgctcgcatggctggatcggtctccatttgcagctgtcaccgactacagcgtgacgcgcaacaatgtcatacaactgtgtctggagctgacgacaattgtgcagcaggactgcacggtctatgaaacagaaaataagatcctgcacgtgtgcaagacactgagtggcgtgtgcgaccacattatctccctaagcagtgacccccttgtgagccagtctgcccatctggaggttatacagctggcaaacatcaagccatctgaaggcttaggcatgtacatcaagtctacctacgacggccttcatgtgatcacggggaccaccgaaaattctcccgcagaccgatgtaaaaaaatccatgccggagacgaagttatccaagtaaatcatcagaccgtggtgggttggcagctgaagaacctggtgaatgcactgcgagaagatcctagtggcgtaattttgaccctgaagaagcggcctcagtctatgcttacctccgctccagctttgctgaaaaacatgcgctggaagccacttgctctgcagccgctgatccctcgcagccctacatccagcgtggctaccccatccagtaccatatcaacaccgacaaaacgcgactcctctgctctccaggatctgtatatcccaccacctccagcagaaccatacatacccagagatgaaaaagggaatcttccatgtgaagatctgagaggccacatggtgggaaagcctgtgcataaggggagcgagtcaccaaacagctttttagaccaggaatataggaagagatttaacatagtagaagaggacaccgtgctgtattgctacgagtacgagaagggtaggtcttcgtcccagggtaggcgggagtctacacctacctatggcaaactgcgacctatcagtatgccagttgaatacaactgggtaggagactatgaagaccctaacaaaatgaagcgggactctcgcagggaaaactccctcctgcggtatatgtcaaacgagaagattgcgcaggaggaatacatgttccaaaggaactccaaaaaggacaccgggaagaagagcaaaaaaaagggagacaagtctaattctcccactcattactccctcttaccatcgctccaaatggatgcattgcgtcaggacattatggggactcccgtccctgaaaccacactgtaccacacatttcaacagtcttccctgcaacacaagagcaaaaagaagaataagggacctatcgctgggaaatctaagagacgcatcagctgtaaagacctcgggaggggcgactgcgaggggtggctttggaagaagaaagacgccaagagctacttttcacagaagtggaaaaaatactggttcgtactcaaggatgccagcctctattggtacatcaacgaggaagatgagaaggccgaaggatttattagcctccccgagttcaaaattgacagggctagcgagtgcaggaaaaagtatgcttttaaagcctgtcatcctaagataaagagcttctacttcgctgctgaacatctggacgatatgaatcggtggctaaaccggatcaacatgctgactgcaggttacgctgagcgggaacgtatcaagcaggagcaggactactggagtgagagcgacaaggaggaagctgacaccccttcaaccccaaaacaggactctcctccgccaccttatgacacctatccaaggccaccatcaatgtcttgcgcatccccttacgtagaggcaaaacactcccggttatctagcacagagacgtctcaatcccaatcttcccatgaggagttcagacaagaggtgaccgggagttccgccgtgagcccgattcgaaagaccgcatcccagcgcaggagttggcaggaccttatcgaaactccgttgacgagctccggcctgcattatctccagaccctgccactggaagattcagttttttcggattccgccgctatctcgccagaacacagacggcagagcactcttcctactcaaaaatgtcaccttcaagatcactacgggccatatccactggctgaatcagaacgtatgcaagtactcaacggaaacgggggaaagccacgaagttttaccttacctagggacagcggctttaaccactgctgtctgaatgcacctgtcagcgcttgcgaccctcaggacgacgtccagccgcctgaggtggaagaggaggaggaagaagaagaggaggagggggaggcggctggcgagaacatcggcgaaaagagtgagagccgcgaggagaaattgggcgatagtctgcaagacctctacagggccttggaacaggcatctcttagcccactgggcgaacatagaatcagcacgaagatggagtataaattatccttcattaagagatgcaatgacccagtgatgaacgaaaaactccatcgactccgcatcctgaaaagtacactgaaggcacgtgaaggcgaggttgcaatcattgacaaggttttggataaccccgatctgacatcaaaagagtttcaacaatggaagcagatgtacctcgatctgtttttggatatctgtcagaacacgacctccaacgatccattgagcattagcagtgaggttgatgtcatcactagcagtctggctcacacccatagttacattgagacacacgtctag

SEQ ID NO: 219169 - DNA, 3015 bp, synthetic construct
  misc_feature 1..3015: note = Description of Artificial Sequence: Synthetic coding sequence
  source 1..3015: mol_type = other DNA
atggctcttattatggagccagtgagcaaatggtccccttctcaggtggtcgactggatgaaaggacttgacgactgcttgcaacagtacattaaaaattttgagagagagaagatttctggcgatcaattacttagaattactcatcaggaactcgaagatctcggggtgtctcgaattggtcatcaggagctgatacttgaggctgtggatctactgtgtgctctgaattacggcctggaaacagagaacctaaaaaccctgagccataaactcaatgcctcagcaaagaatctccagaactttattactggcagaaggaggagcggccactatgacggcagaacatcccgcaagctacctaatgactttctcaccagcgtggtggacctgatcggggctgctaagtcgctgctggcctggctggatcgaagccctttcgcagcagtgacagattatagcgtaacccggaacaatgtgattcagctatgcctagagctcacaaccattgtgcaacaggactgtactgtctatgaaactgagaacaaaatactgcacgtctgcaagaccctctccggtgtctgcgaccacattatcagcctgtcgagcgaccccctggtgtcacagtcagcccacctggaggtgatacagctcgcgaatataaaacccagcgagggcctcgggatgtatatcaaaagcacgtacgacggactgcatgtgattaccgggaccactgaaaactcgcccgctgatcggtgcaagaagattcatgctggcgacgaagtcatccaggtgaatcaccaaacggtggtgggctggcagcttaagaacctggtgaacgctctgcgcgaagacccctctggcgttatactcaccttgaagaagcgcccacagtctatgttgacttccgccccagctctactcaaaaacatgcgttggaagcctttggcattgcagccgctgattcccaggagcccaacctcctccgtagcgactccatcaagtaccattagtacacctaccaaaagagacagctcagccttacaggacctttatataccacctcctcctgccgagccctatatacccagggatgagaaagggaacctcccctgcgaagaccttcggggacacatggtggggaaacccgtacataagggatccgagtcacccaacagtttcctggaccaggaataccgcaagcgcttcaacatagtggaagaggatacagtgctgtactgttacgagtatgaaaagggcagatcttctagtcaaggaaggagggagtctactcctacatatgagaattctttgctcagatacatgagtaacgagaaaatcgctcaggaggagtacatgttccaaagaaatagtaaaaaggacaccggaaagaagagcaaaaagaaaggtgataagtccaacagcccaacccactatagcctgctgccctcattacaaatggacgcactcagacaggacataatgggaacacctgttcctgagacaaccctctaccacacctttcagcaaagcagcctccagcataagtcaaagaagaagaataaaggacctatcgctggtaagtctaagcgcagaattagctgcaaagatttgggcagaggggattgtgaaggttggctatggaagaagaaggatgctaaatcttacttctcacagaagtggaaaaagtattggtttgtgctgaaagatgcgtctttatactggtacattaatgaggaggatgagaaagccgagggctttattagcttgcccgagtttaagattgacagggccagcgagtgcaggaagaagtacgcgtttaaggcctgccatcccaagatcaaatctttttatttcgctgccgagcatctagatgatatgaaccgctggctgaaccggattaatatgctgaccgcaggctacgcggagcgggaacgaattaagcaggagcaggattattggagcgagtctgataaagaggaggccgatacgccctctacaccgaagcaggattctcctccacctccttacgacacgtatccacggcctccttccatgtcctgtgcaagcccctatgttgaagccaaacacagcagactttctagcaccgaaacctcgcagtcgcagtccagtcacgaagagtttcgacaggaggtgacgggcagttctgccgtgtccccaattcgaaagacagcatcacaaaggagaagctggcaggatctcatcgagacacctcttacctcaagcggacttcattacctacagaccctgccgctggaagacagtgtcttcagtgactcagcggctatttcacccgagcatcggcgtcagagtaccctgcctacacagaagtgccatttacaggaccactacggtccatacccgctagctgagtctgaacgtatgcaagtattgaatgggaatggtggtaaaccgagaagttttaccctgccccgtgacagtggcttcaatcactgttgtctgaacgcccctgtgtccgcctgtgatccacaggatgatgtccagcccccagaagttgaagaggaagaggaggaggaggaggaagagggcgaagcagctggagagaatattggggagaaaagcgagtcaagagaggagaagctgggggactctctgcaggatctttatcgggctctggaacaggcctctctgagtcctcttggagaacatcggatttcaacgaaaatggagtacaagttatcattcattaaacgttgcaacgatcccgttatgaacgaaaagctccatcggctgagaattctgaagtccacgttgaaagccagagagggagaagtggcaatcatcgacaaagtcctagacaaccctgacctgacaagtaaagagtttcagcagtggaaacagatgtacctcgacctgtttctggatatctgtcagaataccacaagcaacgatcccctctccatctcctcagaggtggatgtcataaccagctccctggctcacacacatagctacattgagacccatgtgtag

SEQ ID NO: 219170 - DNA, 2550 bp, synthetic construct
  misc_feature 1..2550: note = Description of Artificial Sequence: Synthetic coding sequence
  source 1..2550: mol_type = other DNA
atggcacttataatggaacctgttagcaagtggagtcccagccaggtcgtcgattggatgaagggactggatgattgcctgcaacaatatataaaaaattttgagcgcgaaaagatttccggggaccagctgcttaggattacacatcaagaactggaagacttgggggtatcacggattggacatcaggaactcattctcgaggcggtagacctgctgtgtgctctgaactacggcttggagacggaaaatctgaagaccctgagccacaaactgaatgcgtcggccaagaatttgcagaacttcattacagggagacgcagatctggtcactatgacggacggacatctcgaaagctcccgaacgactttcttacaagcgttgtcgacctgattggtgctgctaaaagcctactcgcctggcttgatagatccccctttgccgctgtgactgattatagcgttaccaggaacaatgtaattcagctgtgcctcgagctcactaccattgtgcagcaggactgtacggtatacgagacagaaaataagatcttacacgtgtgcaagactctgagtggggtctgtgatcacatcatcagcctaagctccgacccgctggtgtcccaatctgcccacctggaggtaatccagctcgccaatatcaagccctcagagggactgggcatgtacattaagtccacctacgatggattgcacgtgataactggcactaccgaaaactcccccgctgatagatgtaaaaaaattcacgccggagatgaagtaattcaggtgaaccaccagaccgtacctctgattccccgttctccaacatcgtcagtggcaaccccctcctccaccatctcaacacctacaaagcgcgactcgtcggcactgcaggacctatatatcccaccaccacctgccgagccatacattcctagagacgaaaagggaaacctgccttgcgaggatttgcgagggcatatggtgggcaagccagtacacaagggtagcgagagtccaaattcttttctagaccaggagtaccgtaaaaggtttaatattgtagaagaagacacagtcttatattgttatgagtatgagaagggcagatcctccagtcagggacgcagagaatccacgccaacatatgggaagctgagacctattagtatgccagtggaatacaactgggtgggagactacgaggatccgaataagatgaagagggattcaaggcgtgaaaattccctcctccgttacatgagcaacgagaaaattgctcaagaggaatacatgttccaaaggaattccaagaaggatactggcaagaagtccaaaaaaaagggcgataagtctaacagtcccacacactactccctactaccgtcgctccagatggatgctctgcggcaggacatcatgggaacccctgtcccagagactacattgtaccataccttccagcagtcaagcctccaacataaatccaaaaagaagaataaggggcctatcgcaggcaagtctaaaagaaggatctcctgtaaagacttagggcgaggggactgcgagggctggctgtggaaaaagaaggacgccaaatcatacttctctcagaagtggaaaaaatattggttcgtcctcaaggacgcctcgctctactggtatatcaacgaggaggatgagaaggctgagggtttcataagcctgcctgagtttaagatagacagagctagtgagtgtcgaaagaaatacgccttcaaggcctgtcatcccaaaattaagagcttctactttgctgcggagcacctggacgatatgaaccgctggctgaatcgtatcaacatgttaacagcagggtacgctgaacgggagcgtattaagcaggaacaggactattggagtgaaagcgataaagaagaggcggacaccccttccaccccaaagcaggattccccaccacccccatatgacacctatccacggcctccatctatgtcttgcgctagcccctatgtggaggccaagcactcacgcctctcttccacagagacatcccagtcccaatcatcccatgaggagttcaggcaagaggtaacaggtagctccgctgtctctcctatccggaagacggcaagtcagcgcaggagctggcaagatctcattgaaacccctctcacatctagcggcctgcactacctgcagactctgccgttagaggattccgtgtttagtgattctgctgccatctcccccgagcaccggcgacaaagcacactgcctactcaaaagtgtcaccttcaggaccattatgggccttatcctctggctgagagcgaacgcatgcaggtcctgaacggaaacgggggtaagccacgcagtttcactctccctcgcgacagcggatttaaccattgctgtctgaacgccccagtgtcagcctgcgatcctcaagacgacgtacagcccccagaagtggaggaagaagaagaagaggaggaagaggaaggagaggcagctggagagaatatcggtgaaaagtcctag

SEQ ID NO: 219171 - DNA, 414 bp, synthetic construct
  misc_feature 1..414: note = Description of Artificial Sequence: Synthetic coding sequence
  source 1..414: mol_type = other DNA
atggacgatagtgacacaccaacgtattatctacagatcgaaccccaggacggttgtcatcccggtgattcggtggagagatctgtgacttgcctaccgagcgcctctgacgaaaatgagaatcagcttgatggtgacgggcacgaacacctgacctcttccgacagtgcgatgggaaaacctcaggtgtctgaacaggatagccttaacaataacgagtcctgtactctttcctgcgaggtggctgccggtgaaaacttacaaaatacgctgtgcgaggcatctcgcgacgaacaggccttcttgggaaaggacaagaagatcccaggcaaaaggagcccccgaagtaagaaaggcactgctaaaaaaataccccctgattccagaatcctgttcccaggagggggactatag

SEQ ID NO: 219172 - DNA, 1851 bp, synthetic construct
  misc_feature 1..1851: note = Description of Artificial Sequence: Synthetic coding sequence
  source 1..1851: mol_type = other DNA
atggacgactcggatacccctacgtactacctgcagatcgaaccacaggatggctgccaccccggtgactccgtggaaaggagcgtgacttgtctgccgtctgcatcggatgagaatgagaatcagctagatggcgatggccatgagcatctgacttccagcgactctgcaatgggtaaaccgcaggtttcagaacaggactcactgaacaacaacgagtcttgcacactaagctgtgaggtggccgcaggagaaaacctgcagaacacattgtgtgaggcctctcgtgacgagcaggctttcctgggcaaagacaaaaagattccgggtaagagaagtcctcgaagtaagaagggcacggcgaagaagatcccaccaggcctcttttccggtgacatcgcgccactcatgcaagagaaggttctgagcgcagtcacttatgcagtcgacgatgaggaggctgcagaggtgaatgcaaatgagcaacctgaggcgcctaaactggtgctgcagtccttgttctctctgatccgcggagaagtcgaacagctggactcccgggcactccccctttgcctgcaccagattgcagagagctatttccaggaggaggattatgaaaaagcgatgaagtttatacagttggagcggctctaccatgagcagcttctcgctaatctgagtgccatccaagaacagtgggaaaccaagtggaaaacggtgcaacctcacacggtgacagccctgcggaactctgaaaaggggtttaatggcgaagatttcgaacgactaaccaagatttgcgcaacgcaccaagacccgctgctgtctaagcacaagatcgctgcagtggagaagtcccaggaacgcaaatgtagcacgcagcttctcgtctccgaagaccccaaggagggaggcgcaacaacaaaagagagtgaatccaagacgtgccttggcacagagtccagcaaggagagccagcatactgtggaacctctcggtagttcaccgtgctgccaccagatggacgtccaaactgattctccctccctgtcagtcactgccggaaaggatcacatggaggaactcctatgttccgccgaagcaaccctagcactacacactcagtcaagcgagaccgctggaagtccttccggccctgattcatccgaagacgcatgtgaggacgactcaagactgcaacttgcacagacggaagcctgccaggacgtggctcgcatagaaggaatcgcggaagacccaaaggtctttctgtcctccaaatctaagacggagcccctcatatcacccggatgtgaccggattcccccagccctaataagcgagggcaagtatagccaggcacaacggaaggagttgcgcctgcccctgcgggatgcctcagaagccctgcccacggatcagctcgagaacaatgagctcaatgagctccagcagcctgacctgactgactctgacggaaagtcaccacaggcgcaggctgactctgatggaagtgaaaatgtcctttgtggcaacaaccaaatcagtgacctgggtatccttctcccagaggtgtgcatggcccctgaagaaaagggagacaaagatgatcagctgaacaaagagacagaagattacctgaatagtctgttggagggctgtctgaaagacacagaagatagtctgagttacgaggacaaccaagatgacgactccgatttgctacaggacttgagccccgaagaggcgtcttatagcctccaagagaatctgcccagcgacgagtcttgcctaagtctcgatgacctcgcaaagcgaatcgagatcgctgaggttaatcagcgctag

SEQ ID NO: 219173 - DNA, 2178 bp, synthetic construct
  misc_feature 1..2178: note = Description of Artificial Sequence: Synthetic coding sequence
  source 1..2178: mol_type = other DNA
atggacgactctgacacacccacatattacttgcagatcgaaccgcaggatggctgccatcctggtgactctgtggagcgatccgttacctgtcttccctccgcctctgatgaaaacgaaaaccagttggacggggacggacacgaacacctcacgagcagcgactctgccatgggtaagccccaggtgtccgagcaggactcactgaacaacaacgagtcatgtaccttgtcatgcgaagtggctgccggagaaaatttgcagaacacactgtgcgaagcttctcgagatgagcaggcgtttctggggaaagataaaaagattccgggtaaaaggtctcctcgcagcaaaaagggcacggctaagaagatacctcctggtctattctccggagatatagcaccactgatgcaggagaaggtgttaagcgccgtaacctatgcagtggacgatgaggaggcagcagaagtgaatgcgaatgagcagccagaggctccgaagctggttctgcagtctctctttagtcttatccggggtgaagtggagcagctagactcccgcgcactgccgctgtgcctccaccagatagccgaatcctatttccaggaggaagactacgagaaggccatgaaatttattcagttagaacgcctctatcatgagcagctccttgcaaacttgagcgctatccaagagcaatgggaaaccaagtggaagaccgtccagcctcatactgtgacagccctcagaaacagcgagaaaggctttaatggcgaagacttcgaaagactgactaaaatatgcgcaacacatcaggatccactgttgagtaagcataaaatcgccgcagttgagaaatcccaagaacgcaagtgctccacacagttgctcgtgtccgaagaccccaaggagggaggggctacgacgaaagaaagtgaatcaaaaacctgtttgggcactgaatccagcaaagagtctcagcatactgtcgaacccctcgggtcctcaccatgctgtcatcaaatggatgtgcagacggatagtccatcactgtccgtcactgccggaaaagatcatatggaagagttgctgtgttcagctgaagcaacactagccctgcacacacagtcctcggagacggcaggcagcccttcagggcctgattcatccgaagatgcctgtgaagacgactccagacttcagctcgcccagacggaagcttgtcaggacgtggccaggatagagggcatcgcggaggaccctaaagtgttcttgtcttctaaatcaaaaactgagccgctgatcagtccagggtgcgatagaattccacctgccctgattagcgaggggaagtacagccaagcccaaaggaaggaattgaggctgccactgagagacgcgtccgaggcactacccactgaccagctggaaaataacgaactgaatgaattgcaacaacctgaccttactgatagtgatggtaaatctcctcaagcccaggccgatagcgacggatcagagaatgtcttatgtgggaataatcagatatctgacctgggaatactgttgccagaggtttgcatggcgcctgaagaaaaaggagacaaggatgaccagctgaataaggaaaccgaggactatctaaacagtcttctagagggctgcctcaaggataccgaggactccctcagttacgaggataatcaagacgacgactccgatctgctgcaggatttgtcgccagaagaggcaagttacagcctgcaggaaaatctgccctctgacgaatcctgtctctccttagatgacctggccaagagaattgaaattgccgaggtagtgcctactgaaggcctcgtgagcatcctcaaaaagcggaatgacaccgttggcgaccaccctgcgcaaatgcaacataagccaagcaaaagacgggtgcggtttcaagagattgacgattctctggaccaggacgaggtgggcggtgggtcatgtatccttctggtgctgttatgcatcgccaccgtctttctgtccgtgggtgggaccgcgttatattgtaccttcggagacatggagtccccagtctgcactgacttcgccgacaacatggatttctactacaccaagctcctgcagggtgtggctgagcttaaacattggatctacttatcctag

SEQ ID NO: 219174 - DNA, 3057 bp, synthetic construct
  misc_feature 1..3057: note = Description of Artificial Sequence: Synthetic coding sequence
  source 1..3057: mol_type = other DNA
atgaaaatgtggctgcttgtgagtcatttggtgatcataagcattacaacttgtctcgccgaatttacttggtaccgcagatatgggcatggcgtctccgaggaagataaaggattcggacccatcttcgaagagcagcctatcaataccatttaccctgaggagagcctggaagggaaggtgagcctgaattgccgcgcaagggctagcccttttccggtctacaaatggaggatgaataatggcgatgtcgacctgaccagtgatcgatatagcatggtggggggaaaccttgtgattaacaacccagacaaacaaaaagatgcagggatttattattgcctggcgtcaaacaattatggaatggtgagatccaccgaagccacactgagctttggttacctcgatcccttcccaccagaagagcgaccagaggtgcgcgttaaagagggcaagggcatggtcttgctttgtgaccccccttatcacttccccgatgacttgtcctatcggtggctacttaacgagttccctgtttttataacgatggataaaagacggttcgtgagtcaaacaaacggaaatctgtacatagccaatgtggaggctagtgacaaggggaactattcatgcttcgtatcgtcaccgagcataacaaagtccgtcttcagcaagttcataccccttatccctattccagagaggacaaccaagccctacccggcagatattgtagtccagttcaaagacgtgtacgctctaatgggtcagaatgtaacgctggagtgctttgccctgggtaatccggtaccagacattcgctggcgcaaagtgctggagccaatgccctcgaccgccgagatcagcaccagcggagctgtcctcaagattttcaatatccagctagaggatgagggaatctacgagtgcgaggctgaaaatatccgcggaaaggataaacaccaagctcgtatatacgttcaagcttttccagaatgggtggaacatattaatgacaccgaagtcgatatcgggagcgacctatactggccatgcgtggcaacaggtaagccgatcccaactatccgctggctcaagaacgggtatgcttaccataagggcgaactgcgcctatacgatgttacatttgagaatgcaggcatgtatcagtgcattgccgaaaatacctacggcgctatttacgcaaatgccgaactgaagatcctggccctagcccctactttcgagatgaacccgatgaagaagaaaatcttagcagctaagggcggaagagttataatcgagtgtaagcctaaggcggctccgaaaccgaaattctcctggtcaaaggggacagagtggctcgtgaactcaagtcgaatcctgatctgggaggatggttccctggagatcaacaacatcacgcgcaacgacggtggcatatatacctgctttgccgagaataacaggggaaaggcaaactccaccggaacattagtcatcacagatccaacaagaatcatcctggcacctataaacgcagacatcactgtgggagagaacgcaaccatgcagtgcgctgctagcttcgatcccgctcttgatctgacatttgtgtggtctttcaatggttatgttattgatttcaacaaagaaaacatccattaccagcgaaatttcatgcttgactcaaacggagagttactgatccgcaacgcccaactgaagcacgctggacgctatacgtgtaccgcccagaccattgtggataactcttcagcgagtgccgaccttgttgtccgcggaccacctggaccgccagggggactgcggatcgaggacatccgagctacctcggtggccttgacatggagcagaggaagcgacaatcatagcccaatctccaaatacaccatccaaactaaaaccatcttaagtgacgactggaaagatgctaaaacagacccacctattatagaagggaacatggaagcggctagggctgttgatctgattccctggatggagtacgagtttcgcgttgtcgctacaaatacactggggcgaggagagcccagcatcccttccaaccgaatcaaaacagatggagcagctcctaacgtggcgccaagcgacgtcggcggaggaggtggacggaaccgggagctcaccatcacatgggctcccttatcccgtgaataccactacggcaataattttgggtacatagtcgccttcaaaccttttgacggggaagagtggaaaaaggtgactgtgaccaatcccgacacaggaagatacgtgcacaaggatgaaaccatgtcccctagcactgcttttcaggtgaaggtgaaagcattcaacaacaaaggggatggcccatattcacttgtagcagtgataaactccgcccaggatgcccctagcgaggccccaacggaggtgggggtgaaagtgttaagctcctccgaaatttcggtacattgggagcatgttctggaaaaaatagtggaaagctatcagataaggtattgggcagcacatgacaaagaggaagccgcaaatcgtgtccaagtgacaagccaggaatattcagcccgtctcgagaatctcctacccgatacccagtattttatcgaagtaggcgcttgtaattcagctggatgcggacctccttcagatatgatagaggccttcacaaaaaaagcaccaccttcccaaccccctcgcatcatttctagtgtgcggagtggttctagatatattatcacctgggaccacgttgtagccctcagtaacgaaagcacagttacgggatataaggtgctatatcgtcctgacggacagcacgacggcaagctctatagcactcacaaacattcaatcgaggtgccaattcctagagacggagagtacgtggtcgaagtccgggctcactccgatggcggagacggagtggtctcacaggttaagatctccggagcgcctaccctgagcccaagcctattgggactgcttctgcccgcttttggcattctggtctaccttgaattttag

SEQ ID NO: 219175 - DNA, 3024 bp, synthetic construct
  misc_feature 1..3024: note = Description of Artificial Sequence: Synthetic coding sequence
  source 1..3024: mol_type = other DNA
atgaaaatgtggctgcttgttagtcatctcgttataatcagtatcacaacatgcctcgccgtcagcgaggaagacaaaggcttcgggccaatcttcgaggaacaacctattaacacaatttatcctgaagagtccctggagggtaaggtctctctgaattgcagggcgcgagctagcccattcccggtgtataagtggagaatgaacaacggcgacgtggacctgacgtctgacaggtactccatggtagggggaaacctggtgatcaataaccccgataaacaaaaagatgcgggtatatactactgcctggcctctaataattatggaatggtacgttctaccgaagctaccctctccttcggttacctggatcccttcccgcctgaggaaagaccagaagtgcgcgtgaaagagggaaagggcatggttttgctctgcgatccaccctatcatttccctgacgatttaagttacaggtggttattaaacgaatttcctgtgttcatcacaatggacaagagacgatttgtgtcgcagactaatgggaatctgtatatcgctaacgtggaggcaagcgataagggtaactatagttgttttgtttctagcccctccatcacaaaatccgtgttcagcaaattcatcccattaatacccatccctgaaagaaccaccaagccataccctgcagacatcgtggttcagtttaaggatgtgtatgccctcatggggcaaaatgtcaccctagaatgtttcgccctcggtaatccagttcccgacatacgttggcggaaggtcctggagcctatgccatctaccgccgaaatcagtacttcaggcgctgtcctgaagatcttcaacatccagcttgaagatgagggaatctacgaatgcgaggcagagaacattaggggcaaggacaagcaccaggccaggatctatgtgcaggccttccctgagtgggtggaacacattaatgacacagaggtggacattggaagcgacttatactggccatgcgtcgcgaccggaaaacccatccccaccattcggtggcttaagaacggctacgcctatcataaaggcgagctcaggctgtacgatgtaacgtttgaaaatgctggcatgtatcagtgcattgctgagaatacgtatggcgcaatttatgccaatgcggaactgaaaattcttgcgctagcccctacattcgagatgaatcccatgaagaaaaagatcctagccgcaaaggggggaagggtaatcattgagtgcaaacctaaggcagctccaaaacctaaattttcatggtcaaagggaacggagtggctagtgaatagtagccgcatcttgatttgggaggacggatctcttgaaatcaataatatcactcggaatgacgggggtatctatacctgctttgcagagaacaataggggaaaggcaaattctactggaacactcgtgatcaccgacccaaccagaattatcttggcaccaattaacgccgatatcactgtaggcgagaatgcaacaatgcagtgcgctgcaagttttgacccggctctggacttaacctttgtctggtccttcaatggctacgtgattgactttaacaaggaaaacatccactaccagcggaactttatgctagattcgaacggggaactactgataagaaacgctcagcttaagcacgccggtagatatacctgcactgctcagaccattgtcgataatagttccgcctctgcagatctcgtggtgcgaggacctccaggccctcccggtggcctacgcattgaggatatacgcgctaccagtgtggccctaacctggagccggggtagcgataatcatagccctatcagcaagtacacgatccaaaccaagacaatactgagtgatgactggaaggatgcaaaaacagacccccctattatcgaaggtaatatggaggcagcgagagcggtggaccttattccttggatggaatatgaattcagggtggtagctactaacaccttggggaggggtgaacctagtatcccctctaacaggatcaagacggacggcgctgctcctaatgttgccccttcagatgtcgggggtggtgggggacgcaacagagagctcacaatcacatgggctcccttgtcaagggagtatcactatggcaataacttcggatatatcgtggccttcaaaccattcgatggtgaggaatggaaaaaagttaccgtcactaatccagacaccggccgttatgttcacaaggatgaaaccatgtctccatcaaccgcgtttcaggtcaaagttaaggcatttaataacaagggggacggtccctattcattagtggccgtgataaacagcgctcaggacgcaccttctgaggcccctaccgaggtaggggttaaagtgctctcctctagtgagatttccgttcactgggaacacgtgcttgagaagattgtggagtcctatcagattagatattgggcagcccatgataaggaggaagcggctaatagggtgcaggtcacgagccaggaatactccgctcgcctcgagaatctgctgcctgatacccagtacttcatagaagtcggagcctgtaacagcgctggctgcggacccccatcagatatgatcgaggctttcactaagaaggccccacccagtcaaccccctcgaatcattagctccgtgcgatcgggatcccgctacattataacgtgggatcacgtggtggcccttagcaacgaatctacggtcacgggctataaggtcctctatcgtccagatggacagcatgacggcaaactctactcaacccacaagcatagcatcgaggttcctatacctcgggacggcgaatacgtcgtggaagtgagagcacactcagatggaggtgatggggttgtaagccaggtgaagatcagcggagctcccacattgtctcccagcctgctgggacttctgctccctgcattcgggatcttggtatatctcgagttttag

SEQ ID NO: 219176 - DNA, 1884 bp, synthetic construct
  misc_feature 1..1884: note = Description of Artificial Sequence: Synthetic coding sequence
  source 1..1884: mol_type = other DNA
atgaaaatgtggctgctggtctctcacctagtgattatatctatcaccacgtgcctcgctgagttcacgtggtatcgaagatacgggcatggcgtatccgaagaagacaagggattcggcccaatctttgaagagcagcctataaatacgatctacccagaagagtcccttgaggggaaggtttcattgaattgtcgagccagagcttctccttttcccgtgtataagtggcggatgaataatggagacgtagacctgacgtcagatcgatatagtatggttggcggaaatctggtaatcaacaatcctgacaaacaaaaagacgctggaatatattattgtctggcttccaacaattatggtatggtgagatccactgaagccacactttccttcgggtatctggacccatttccaccggaggagagacctgaggtaagagtcaaggagggcaagggtatggtactgttgtgcgatccaccatatcactttcccgatgatctatcttatcgatggctcttaaacgagttcccagtgttcattactatggataaaagaagatttgtgtctcagacgaacgggaatctttacattgccaacgtcgaagcaagtgacaaagggaactactcctgcttcgtttctagcccctctattacaaagtctgtcttttctaaatttatccctctcatccctatccctgagaggaccacaaagccataccccgcagatattgtggttcagtttaaagatgtgtacgctctgatgggtcagaacgtgacccttgagtgcttcgccctagggaatccagtccctgatatacgatggcggaaagtgctggagcccatgccatctacggccgagatctctacttcgggagctgtgctgaaaatcttcaatattcaactggaagacgaagggatttacgaatgcgaagcggagaacatcaggggaaaagataaacatcaagcacgaatttacgtgcaggcctttcccgagtgggtagaacacatcaatgacaccgaagttgacatcggatccgacctctattggccttgcgtagccactggtaagccaatccccacgatcaggtggttaaagaacggctatgcttaccacaagggtgagctcagattatatgacgttaccttcgaaaacgctggcatgtaccaatgtatcgcggagaacacatatggcgcaatatatgcaaatgcagaactgaaaatcttggctctggctccaacctttgagatgaatccgatgaaaaagaagattttggccgctaaggggggtcgggtgatcatcgagtgcaaacctaaggcagcaccaaagccaaagttttcgtggagtaagggaaccgagtggctggtcaactcctctagaatcctgatctgggaagacggctccctcgagataaacaacattaccaggaatgacggaggcatatatacctgctttgccgaaaacaaccggggaaaggctaactcaaccgggacgctcgtcatcactgaccccactcgaataatcttggcgcctattaatgctgatattaccgtgggcgaaaatgcgaccatgcagtgcgcagccagctttgaccctgcgcttgacttaacattcgtgtggtccttcaacgggtacgttattgattttaataaggaaaacatacattatcagagaaacttcatgttagacagcaatggagagctcttgataaggaacgcacaactgaaacacgcaggtcgctacacatgcacagctcaaacaattgtcgataactctagcgcaagcgccgaccttgtggtgagaggaaaaaacaggaaaggtggagaaaaaaatatggtggacagcttccttccagtatgcgcgagtttgccaccaacgtggtag

SEQ ID NO: 219177 - DNA, 1884 bp, synthetic construct
  misc_feature 1..1884: note = Description of Artificial Sequence: Synthetic coding sequence
  source 1..1884: mol_type = other DNA
atgaagatgtggctcctggtgtcccacctggtgatcatatccatcacaacatgtttagccgagtttacttggtaccggagatacggacacggggtgtcagaggaagacaagggctttggacctatctttgaggagcaacccatcaatacgatctacccagaggagagcctggaggggaaggtgtctcttaactgtagggccagggcttcacctttccccgtttataagtggaggatgaataacggcgatgtggatctcacgtctgaccgctacagcatggtggggggaaatctggtcatcaataaccctgacaagcagaaggatgccggaatttactactgtttggcaagtaataactatggaatggtgaggtccacagaggcgacacttagctttggatacctggacccattccctccggaggagcgacccgaggtacgggtaaaggaaggcaaagggatggtcctgctgtgcgaccctccgtaccacttcccggatgacctaagttatcgttggcttttgaacgagtttcccgtcttcatcaccatggacaagaggagattcgtgtcacaaaccaatggtaacctgtatattgctaacgtcgaggccagcgacaaaggcaactactcctgctttgtgtcatccccaagcattactaagagcgtgttctccaagttcataccacttatccctattccagagcgtacaacgaagccgtaccctgcagacattgtggtgcagttcaaagacgtttacgcgttaatgggacagaacgtcacactggaatgcttcgccttgggaaatccggtccccgatataagatggcggaaggtcctggagccaatgccaagtactgccgagatttctacctcgggtgccgttctgaaaattttcaacatccagctggaggatgagggtatatatgagtgtgaagccgagaatatcagaggaaaggacaagcaccaagctcgaatatacgtgcaggcattcccagaatgggtggaacacatcaacgacacagaagtggacattggaagtgatctgtattggccttgtgtagcaactggaaagcccatcccgacgatcagatggttgaagaatggctacgcctatcacaagggtgagctcagactgtatgatgtgacattcgagaatgctggaatgtaccagtgcattgccgaaaatacatatggtgctatttacgccaatgcggagctgaagatcctggccttagctcccacatttgaaatgaatcccatgaaaaaaaagatcttggctgccaaggggggaagggtgattatcgagtgcaagcccaaggcggcacccaagccaaaattctcatggagcaagggaaccgaatggctggtcaactcatccagaatcttaatctgggaggatggatcccttgaaattaacaacatcacccggaatgacgggggaatctacacatgctttgccgagaataatcggggaaaggccaattccaccgggaccctagtcattacagaccctacccggattatactggctcccatcaacgccgatattacagtcggcgaaaatgcgacaatgcagtgtgcagcatcctttgaccccgctctagatctaacctttgtctggtcttttaacggctatgtcattgatttcaataaagagaacattcactaccaaagaaacttcatgctggacagcaatggggagctgctaattcggaacgcccaactgaagcacgctggaaggtatacatgtacagctcagacaatcgtggataatagctccgccagcgctgacctggtcgtgcgcggaaagaatagaaagggaggagagaaaaatatggttgatagtttcttgccagtctgcgctagccttccacccacttggtag

SEQ ID NO: 219178 - DNA, 1884 bp, synthetic construct
  misc_feature 1..1884: note = Description of Artificial Sequence: Synthetic coding sequence
  source 1..1884: mol_type = other DNA
atgaaaatgtggctgctggtctcccacttagtgatcatttctataacaacctgcctggcagagtttacatggtatcgccgatacgggcatggagtctcagaagaagataagggattcggccctatctttgaagagcaaccgattaacacaatctaccccgaagagagcctggaggggaaggtttcgttgaattgtagagccagggcttctccttttcctgtgtataaatggagaatgaataatggtgacgtggacctgaccagcgaccgctattctatggtaggcggtaatctggttatcaataaccccgacaagcaaaaggatgccggtatctactactgcttggcctccaataattatgggatggttcggagcacggaggcaacactaagctttggctatttagaccctttcccacccgaggagagaccggaagtgcgcgtgaaagaagggaagggaatggttctgctgtgcgatccaccttatcattttcctgatgatctgagctaccgctggctcctaaacgagtttcccgtcttcatcacgatggataagcgcaggttcgtgtcgcagactaatggaaacctgtacattgccaacgtagaggccagtgacaaggggaattacagttgcttcgtatcttcacctagcattacaaagagcgtgttttccaagttcatccctctgatacctattcccgagaggaccacaaagccatatcccgctgacatcgtcgtgcagttcaaggacgtgtacgcattaatgggccagaacgtcactctagagtgctttgcactaggcaatccagtgccggatatcaggtggaggaaggtcctcgaaccaatgcctagcactgctgaaatcagtacctcaggcgcagtgttgaagatcttcaacatccagcttgaggacgaaggcatatacgaatgcgaggctgaaaacatcagaggaaaagataaacatcaagccagaatctacgtgcaggcgttccccgaatgggtagagcacattaatgataccgaggtggatatcgggagtgacctttactggccttgcgtggctaccggaaaaccaattcccacaataaggtggctgaaaaacggttacgcctatcacaagggagagcttcggttgtacgatgtcacctttgaaaatgcaggaatgtaccaatgcattgctgaaaacacctatggggctatctacgccaacgccgagctgaaaatcctggccctggccccaacattcgagatgaatcccatgaagaaaaaaatcctggctgccaaggggggtcgcgttatcatcgaatgtaagcctaaggccgcacccaaacccaaatttagttggtccaaagggacggagtggctggtgaatagttctcggatcctgatatgggaggacggaagcctcgaaataaacaatatcacccgaaatgatgggggaatatatacttgttttgccgaaaataaccgaggaaaggccaactcaactgggacactcgttatcacggaccccacacggataatactggccccaattaacgctgacatcacagtgggggaaaacgccacaatgcagtgcgctgcaagctttgatcctgctctcgaccttaccttcgtgtggagttttaacggatatgtgatagatttcaacaaggaaaatattcactatcagcgtaatttcatgcttgactcaaacggtgagctcctcatccgcaacgcccaactgaagcacgccggaagatatacatgcacagcacagacgatagtcgacaatagtagcgcttctgcggatttggtggtgcggggaaagaacaggaagggtggggagaagaacatggtggattcctttttgccggtctgcgcttcgctccctcccacttggtag

SEQ ID NO: 219179 - DNA, 258 bp, synthetic construct
  misc_feature 1..258: note = Description of Artificial Sequence: Synthetic coding sequence
  source 1..258: mol_type = other DNA
atgaaaatgtggctccttgtaagtcacctagtaatcatcagcataaccacgtgccttgctgaattcacttggtatcgtaggtacggtcacggcgtgagtgaagaggataagggctttgggccaatttttgaagagcagcccatcaacaccatctaccctgaagagtccctcgagggaaaggtttcattaaattgccgagcaagagcttctccattccctgtgtataaatggcgaatgaacaacggtgatgtcgattag

SEQ ID NO: 219180 - DNA, 3057 bp, synthetic construct
  misc_feature 1..3057: note = Description of Artificial Sequence: Synthetic coding sequence
  source 1..3057: mol_type = other DNA
atgaaaatgtggctgcttgtcagccacctagttatcattagcatcacaacatgtctcgccgaatttacctggtacagacgctatgggcacggcgtcagcgaagaggataaggggttcggcccaattttcgaagagcagcccatcaatacgatttacccagaggaaagcctggaagggaaagtgtccctgaactgtcgcgcacgtgcatcgccttttccagtttacaagtggaggatgaataacggcgacgtcgacttgacatctgatcgctattccatggttggaggcaacctggttatcaacaaccccgataagcagaaggacgccggaatctactattgcctcgcatctaacaactacggcatggtcaggagtacggaggccacactgtcgttcggatacttggatcctttcccccctgaggaacgccctgaggtgagagtgaaagagggaaagggcatggtcctgctgtgcgaccctccataccatttccccgatgatctgtcttatcggtggctcctgaacgagttccccgtgttcatcacgatggataaaaggcggtttgtgtctcaaactaatggaaacttgtacattgcaaatgtggaggcctccgataaaggcaattatagctgttttgttagtagcccatccattacaaagagcgtgttctcgaagttcatacctctgatccccatccctgaacggaccactaagccttaccctgccgacatagtggtgcaattcaaagatgtgtatgcccttatggggcagaatgtgacattggaatgcttcgctctgggaaatccagtgcccgatattagatggaggaaagttctggagccgatgccctcaactgcagagatttcaacttccggagctgtgctgaagatcttcaacatccaacttgaagacgagggcatctacgagtgtgaggcggaaaatatccgtgggaaggataagcaccaagccagaatctacgttcaggcctttccagagtgggtcgagcacatcaatgatactgaagtcgacataggtagcgatctctattggccatgtgtggctaccggaaagcctatacccacgattaggtggctgaaaaatgggtacgcataccacaagggcgagttaaggttatacgacgttacttttgagaacgcaggaatgtaccagtgtattgccgagaacacatacggagccatctacgccaacgcagaattaaaaatcctggccctcgcccctacatttgaaatgaacccaatgaaaaagaagatcctggcggctaaaggaggcagagttatcatcgagtgtaaacctaaagcggcaccgaagcccaaattctcatggtcaaaaggtactgaatggttggtgaatagctcccggatcctgatctgggaggacggcagcctggagattaataatatcactaggaatgacggcggaatctacacttgctttgccgagaacaacagaggcaaagccaactctaccgggactctggttattactgatccgacaagaatcatcctggctcccatcaacgccgatatcactgtgggtgagaatgccacgatgcagtgcgcggcttccttcgaccctgccttggatcttacattcgtttggtcctttaacgggtatgtcatcgacttcaacaaagagaacattcactaccaaagaaatttcatgcttgactcaaacggtgaattactcattaggaatgcacagctgaagcacgctggtcgatatacttgtacagctcaaactattgtggacaactcgagcgcaagcgccgacctcgtggtgcgcggtccacctggcccacccggaggactacggatcgaagacattagagccactagtgtcgccctgacgtggtcgcggggaagcgacaaccattcccccatatccaaatacaccatccaaaccaagacaattctgagtgacgactggaaggacgccaagacagacccccctattatcgaggggaatatggaggccgcaagagctgtagacctgattccatggatggaatacgagttccgggttgtcgccacaaacaccctgggcagaggggagcctagcattccatccaaccgcattaagacagacggggctgcaccaaatgtggctcctagcgatgtggggggaggcggaggtcgtaaccgggagctcaccattacatgggccccactgtccagagaataccattacggaaataactttgggtacattgtagcttttaagccattcgacggcgaggagtggaagaaggtgacagtgacgaacccggacactggtaggtacgtacataaggacgaaactatgagcccaagcacagcatttcaggttaaggtgaaagccttcaataacaaaggcgatgggccttattccttggttgccgtcataaactcagctcaggatgcgccaagtgaagcccctaccgaggtgggcgtgaaggtcctgtcttccagcgagatctccgtccattgggagcacgtgctggagaaaatcgtcgaaagctaccaaatcaggtactgggccgctcatgataaagaagaggccgctaacagagtccaggtcacatcccaggagtacagtgctagactagagaatctgctgccagacacccagtatttcatagaggtcggggcttgtaacagcgcaggttgcggcccaccttcggatatgattgaggcctttaccaaaaaggcacctccctcccaaccccctcggatcataagctctgtacgcagtggttctcggtacatcatcacctgggaccatgtcgtggccctgagtaacgagtccacagtaacaggatataaagtgctctatcggccagatgggcagcatgatgggaaactgtattctacccacaaacacagcattgaggtccctatccccagggatggcgagtacgtggtcgaggtcagagcccattccgacggtggtgatggggtggtctctcaggttaagatctcaggcgcaccgacactttccccttctctcctgggactgctccttcctgcttttggcattctcgtctaccttgaattttag

SEQ ID NO: 219181 - DNA, 192 bp, synthetic construct
  misc_feature 1..192: note = Description of Artificial Sequence: Synthetic coding sequence
  source 1..192: mol_type = other DNA
atgaagatgtggcttttggtctctcacctggttattatcagtatcaccacatgcctggccgagtttacttggtatcgcagatacggccatggcgtgagtgaggaggataagggtttcggccctatctttgaagaacagcccataaataccatttatcccgaggagtcactcgaaggtaaggtttctctgtag

SEQ ID NO: 219182 - DNA, 273 bp, synthetic construct
  misc_feature 1..273: note = Description of Artificial Sequence: Synthetic coding sequence
  source 1..273: mol_type = other DNA
atgaaaatgtggcttctagtgtcacacctcgtgattattagcataaccacctgtctggccgagttcacatggtatcgcaggtacggccacggcgtgtctgaagaagataaaggatttgggccaattttcgaggagcagccgataaacacaatttaccccgaagaaagcctcgagggcaaagttagccttaactgccgtgcgagagcctctcctttccccgtctacaagtggaggatgaataatggtgacgttgatctgacatccgatcggtag

SEQ ID NO: 219183 - DNA, 222 bp, synthetic construct
  misc_feature 1..222: note = Description of Artificial Sequence: Synthetic coding sequence
  source 1..222: mol_type = other DNA
atgaaaatgtggctccttgtcagtcacctggtgatcatttccatcactacctgccttgccgaatttacttggtatagacggtatgggcacggcgtttccgaggaggataaggggtttggccctatcttcgaggagcaaccaatcaataccatatacccggaagaatccctagaggggaaagtgtcgctcaattgtcgggctcgggcttcgccattcccatag

SEQ ID NO: 219184 - DNA, 3123 bp, synthetic construct
  misc_feature 1..3123: note = Description of Artificial Sequence: Synthetic coding sequence
  source 1..3123: mol_type = other DNA
atggggactgccacacgaagaaagccacatctgctgcttgttgctgcggtggccctcgtaagctctagtgcatggtcttccgcactgggcagccagactaccttcggcccagtcttcgaggatcagcccctctctgtgctgtttcctgaggagtctaccgaggagcaggtcctgctggcctgccgcgctagggccagccctcccgcaacctatagatggaaaatgaatggcacggagatgaaactggagcccggttcccgtcatcagctggttggaggtaacctagtcatcatgaaccccacaaaggcccaggacgctggggtttaccagtgtctggcttccaatccagtaggtaccgtggtgagccgcgaagcaattctgcggttcggctttctgcaggagttctctaaggaggaacgggaccccgtgaaagcccatgaaggatggggagtgatgttaccttgtaacccccctgcccactaccccggactgtcatataggtggctgctcaatgaattccctaacttcattcccactgacggaaggcatttcgtgtctcagacgactggtaatctctacatcgcaagaacgaatgccagtgacctgggcaattatagttgcctggctacaagtcacatggacttctctacaaagtctgtctttagcaagttcgctcagttgaatctggcagccgaagatacaaggttattcgcgccttcgataaaagccagatttccggctgagacatacgccttagtaggacagcaggtgaccttggagtgcttcgctttcgggaaccccgttccccgaatcaaatggcggaaggtcgatggttcactaagtccccagtggacaactgcagaaccaaccttgcaaatccccagcgtgtcttttgaggatgaagggacctatgaatgtgaggccgaaaattctaaaggaagggatacagtgcagggccgaatcatagttcaggctcagccggaatggcttaaagtgatcagcgataccgaggccgatatcggctctaaccttcgctggggctgcgcagctgcaggcaaacccaggccaactgtccgctggctgcgcaatggtgagcccctagccagtcagaatagagtcgaagtgctggccggtgatctcaggttcagcaaactgagccttgaggattctggcatgtaccaatgtgttgccgaaaataaacatggcaccatctatgcctctgcagagttggctgttcaggcattagctcccgactttcgcctgaacccagttagaaggctcatcccggctgcgagaggtggggagatcctgattccctgtcagcctagggcagctcctaaggctgtagtcctgtggagcaaaggtaccgagattctggttaactcttcccgggtcaccgtcaccccggatgggactctcatcatcaggaacatttcaaggagcgacgaggggaaatacacctgcttcgctgagaactttatgggcaaggcgaactccacaggaatcctgtccgtgagggacgcaaccaagattactctggctccgagctcggccgatataaacttgggcgataacctcaccttacaatgtcatgcttcacatgacccgacgatggacctcacatttacctggacattggatgattttcctatcgacttcgataagcccggaggccattacagaagaacgaacgtcaaagaaacaatcggggatttaacaatactgaacgcccagctgagacacggaggtaagtacacatgcatggcccagacagtcgtcgatagcgcctctaaggaagcaaccgtgctcgttagaggtccaccaggcccacccggaggggtagtcgtacgcgacattggagatacgaccatccagctttcctggtcaagagggttcgataaccactctcctatcgccaaatatacgctgcaggcgaggacccctcctgcagggaaatggaaacaggtgcgaaccaatccagccaacatcgaaggcaacgcagagacagctcaggtcttaggactgaccccatggatggattacgaattccgagtgattgcttccaacatattgggcactggcgaaccatcaggaccttcttctaaaattcgaacccgggaggcggcaccttccgtggcaccatccggcttgtccggtggtggcggagcgccaggcgagttgatcgtgaactggacgcctatgtctcgggagtatcaaaatggcgatggcttcggatatcttctttcattccgtagacagggatctacacactggcagacggcaagagtgccaggagccgatgcccagtacttcgtctactcaaacgagagtgtgaggccgtatacccctttcgaagtcaagatccgatcctacaatcgcaggggtgacggacctgagtctctcacagcgctcgtgtattctgccgaggaagagcctagagtagccccaacaaaggtttgggccaaaggagtatcctcatccgagatgaatgtgacctgggagcccgtacagcaagatatgaatgggatcctgctggggtatgagattcggtactggaaggccggtgataaggaagccgctgccgatcgcgtgaggacggcagggctcgacacgtcagcaagagttagtgggctgcaccccaatacgaagtaccacgttaccgttagagcctacaacagggcagggactgggccagcaagtcccagcgcaaacgctaccaccatgaagcctccaccgaggcgccctcctggcaacatatcctggaccttttctagctccagtctgagcattaagtgggatcccgttgttccctttagaaacgaatccgccgtgacagggtataagatgttgtatcagaatgacctgcaccttacgccaacattgcacctgacaggcaagaactggatagaaatccccgtccctgaggacatagggcatgctttagttcagatcaggacgactggtcctggcggagacggcatacctgccgaggtgcatatcgtgcgtaacggtggaacctctatgatggtagagaacatggctgtgcggcctgcaccacatccgggtacagtgatctcacatagcgtggctatgctcattctcatcgggtctttggagctatag

SEQ ID NO: 219185 - DNA, 3087 bp, synthetic construct
  misc_feature 1..3087: note = Description of Artificial Sequence: Synthetic coding sequence
  source 1..3087: mol_type = other DNA
atgatgttcccatggaaacagctaatactgctctccttcattggctgcctgggtggtgaacttctgttgcaaggccctgtgttcataaaggaacccagcaatagcatctttcccgtggggagcgaagataaaaaaatcactctgcactgcgaggcgagaggcaatccatccccacattatcggtggcagttgaacggctctgatatcgatatgtcaatggaacaccgatacaagctgaatggcggaaatctagttgttatcaatccaaaccggaactgggataccggcacgtaccaatgctttgccactaacagcttgggaactattgtgtcaagagaagccaaacttcagttcgcgtatttggaaaacttcaagacgaaaatgcgctctactgtgtccgtccgggaaggccagggcgtggtattgctgtgcggacccccaccccactccggagagctgtcctacgcatggatcttcaatgaataccccagcttcgttgaggaggattcacggcgtttcgtctcacaagagacaggacatttgtatatttctaaggtcgagccctcggatgttggaaattacacctgcgtggtgaccagcatggtgacaaatgcccgtgtacttggatctcccaccccgctggtactgcgcagcgatggagttatgggcgagtacgaacccaaaatcgaggtgcagttcccggaaaccttacccgctgccaagggcagcactgttaagctggagtgttttgccctcggcaatccaattcctcagatcaattggaggcggtcagacggcctgcccttcagtagcaagatcaagcttaggaagttttctggggttcttgaaatcccgaattttcagcaggaggatgcagggtcctacgaatgcattgcagaaaactccaggggcaagaacgtcgccagggggaggctgacctattatgccaagccgcattgggtacaattgatcaaggatgtagagattgccgtcgaagacagtttgtactgggagtgtagagcatccgggaaaccgaagccgtcatacagatggctgaagaatggagccgcactggtacttgaagaaaggactcaaatcgaaaacggggctctaacgattagcaacttgagtgtgacggatagcggtatgttccagtgtatcgcagaaaacaagcatggcctggtttatagctctgctgagctgaaggttgtcgcaagcgcccctgacttttccaagaatcctatgaaaaagcttgtccaggtgcaagttgggagcctggtcagtttggattgcaagcccagggcatcacctagggcactcagcagttggaagaagggtgatgtctccgtccaggagcacgagaggatctccctgttgaatgacggcggactaaaaatcgcaaacgtaacgaaggccgacgccggaacctacacttgtatggctgagaatcagtttggaaaggctaatggtactacccatctcgttgtgactgagcctacgagaatcacgctggccccatcaaacatggacgtgtcagtgggggagagtgtcattctcccatgtcaggtgcagcatgacccattgctggatattatcttcacctggtacttcaacggggcactcgctgattttaagaaagacggctctcatttcgagaaagtgggaggctcctcaagtggagaccttatgatccgaaacattcagctgaagcactctggcaagtatgtgtgcatggtgcagactggcgtggactccgtgtccagcgctgccgacctcattgtgagaggctcccccggtcccccagagaacgtgaaggtcgatgaaataacagacacaacggcacaactcagttggaaggaggggaaggataaccactcaccagttataagttattctatccaagctagaaccccctttagcgtgggctggcagaccgtaaccactgtccccgaggtcatcgacgggaagacccacacagccactgtcgtggagctgaacccgtgggtggagtatgaattcagagtcgtcgcgtccaataaaatcggtggcggtgagcccagcctccccagtgagaaggtaagaactgaggaggctgtcccagaggtcccccctagtgaggttaatggcggagggggatctaggagcgagttagtcattacatgggatcccgtgcctgaggagctacaaaatggtgaaggtttcggctacgtcgtcgcttttcgtccgttaggtgtaaccacctggattcagaccgtcgttacgtcacccgacaccccaaggtacgtttttcgcaacgaatctattgtcccgtactcaccgtacgaggttaaggtcggcgtgtacaataacaagggagaagggcctttctctcccgtaacgacagtctttagcgcggaagaagagccgaccgtggccccatcacaggtcagcgccaacagtctgagcagctcagaaattgaggtgtcgtggaacactattccctggaagctgtcaaacgggcacctgcttggatacgaagttcgctactggaatgggggaggtaaggaggaatccagttcaaagatgaaggtggctgggaacgaaacatctgccaggctgagaggcctgaagtcgaacttggcctactacactgcagttcgtgcgtacaatagcgcgggagcagggcctttttccgctaccgtcaacgtgacaacaaagaaaacacccccatcacagcctcccggtaacgtggtgtggaacgctactgacaccaaggttctcctcaactgggagcaagtgaaagcaatggagaatgagtctgaggtaacaggatacaaggttttctatagaacatcatcccagaacaatgtgcaggtgttgaatacaaataagacatctgctgaactcgtgctaccgattaaagaagattacatcattgaggtgaaagcaacaacagatggaggagatggaacctcgtccgaacagatccggattccccgaatcacttccatggatgcacgaggttccaccagcgcaatctcgaatgtgcaccctatgtctagctacatgcccattgtgctgtttctgattgtgtacgtgctgtggtag

SEQ ID NO: 219186 - DNA, 2424 bp, synthetic construct
  misc_feature 1..2424: note = Description of Artificial Sequence: Synthetic coding sequence
  source 1..2424: mol_type = other DNA
atgggagagtatgagcctaagattgaagtgcagttcccagagacagtcccaaccgccaagggagctaccgtaaaactggagtgtttcgcactaggcaaccccgttcctaccatcatttggcgcagagctgatgggaagccgattgccaggaaagctcggagacataaatccaacggcattttggaaatccctaatttccaacaggaggacgcagggctttatgagtgtgtagcggagaatagtcgaggtaaaaatgtcgcccgaggtcagctgactttctatgcccagcctaactggatacaaaaaataaacgatatccacgtggccatggaggagaatgtgttctgggagtgcaaggccaacggtcggcctaagcctacttacaagtggctcaaaaacggcgagcccctactcactcgggatcgaattcagatagagcagggtaccctcaatatcactattgtgaatctgtcggacgcaggtatgtaccagtgtctggccgaaaataagcacggggtcattttcagcaatgcggaactgtccgtgattgccgtcggccctgatttttcccgaacactactcaaacgggtcactctggtcaaggtgggaggcgaagtggttatcgaatgcaaacctaaggcttcccccaagcccgtttatacatggaagaaaggacgcgatatcttaaaggagaatgagagaataacgatttccgaggacggcaacttaagaatcattaatgtgaccaaatctgacgccggtagctacacgtgtatagcgacaaatcactttggaactgcaagcagcacaggcaacctggtggtaaaagatccaacgcgggtaatggtgcctccatcaagtatggatgttaccgtaggggaatcgatcgtgctcccatgtcaggtgacgcacgaccattccctggacatcgtctttacctggtcttttaacggacacttgatcgactttgatcgtgatggtgaccactttgaacgagtaggagggcaggattctgccggtgacctgatgattagaaatatccagctgaagcatgcagggaagtatgtctgcatggtccagaccagtgttgatcgtctgtccgctgcagccgacctgatagtgagaggccctcccggaccgccagaagctgtgactatcgatgaaataaccgacacaacggctcaattatcctggcgcccaggcccagacaatcatagtccgataaccatgtatgtcattcaggctcggaccccattctccgtaggatggcaggctgtgagtacagttccagaactcatagatggcaagacctttactgccaccgtggtgggcctcaacccatgggttgaatacgagtttaggacagttgcagccaacgtaataggcatcggagagcccagtcggccatcagagaaacgacgcacagaggaagcactgcctgaggtcactcccgctaacgtttccggagggggtggctcgaagtcagagctggtgattacttgggagacagtgcctgaggagctccaaaatggtagggggttcggctatgtggtggccttccgcccatacgggaagatgatctggatgctgactgtgttagcctcggccgatgcttcccgctacgtgtttcgtaatgaatccgtccaccctttcagtccattcgaggtgaaggttggcgtgtttaataataaaggtgaaggacctttttcccccacgactgtggtgtacagtgctgaagaggagcccacaaagcctccggcaagtatctttgccaggtccctgtcggccaccgatatcgaagtattttgggccagccctctagaaaaaaaccgcggacggatccagggctatgaagtgaagtactggcgccatgaggacaaagaagagaatgccagaaaaattcggacagtggggaaccaaaccagcactaagattacaaacttgaagggatccgttctttaccatctagccgtgaaggcctacaacagcgcgggtacaggaccttcatctgccacggtcaacgtgaccactcgtaaacctcctcctagccaaccaccgggaaatattatttggaattcctcagattccaaaattatcttgaattgggaccaggtcaaggctttggataatgaaagcgaagtgaagggatataaggtgctctaccgctggaaccgtcagtcttctacctcagtcatcgaaactaacaagacaagcgtggaacttagcctaccttttgatgaggattatatcattgagattaagccattcagtgacggaggggacgggtcctcgtctgagcagatcaggataccaaaaatttcaaatgcttacgccaggggtagcggagcctctacctccaacgcctgtacactctctgcgataagtactattatgatcagccttacagcccgtagctcgctgtag

SEQ ID NO: 219187 - DNA, 2097 bp, synthetic construct
  misc_feature 1..2097: note = Description of Artificial Sequence: Synthetic coding sequence
  source 1..2097: mol_type = other DNA
atggaggaaaacgtcttttgggaatgcaaggccaatggcagacccaaacctacatataaatggctgaagaatggagaaccactcctgacaagggatcggatacagatcgagcagggcaccttgaacataacgattgttaacctgagtgacgcgggtatgtaccaatgtctggctgaaaacaaacacggagttatcttttccaacgccgaactctcggtgattgctgtcgggccagatttctcgagaacactgctcaagagggtgacgctggtcaaggtgggcggagaggtcgttatagaatgcaagccgaaggcctctcctaaaccagtgtatacatggaagaagggccgagacatcctgaaggagaacgaacggataaccatttccgaggatggaaatttgaggatcatcaatgtgacgaaatctgatgcgggatcctacacttgcattgccactaatcacttcggaaccgcctctagcactggcaacctggttgtgaaggaccccacacgcgttatggtccctcctagcagtatggacgtcaccgtcggagaaagtattgtccttccatgtcaggtgactcacgatcatagtctggacattgtttttacatggagtttcaatgggcacctcattgactttgatagggacggagaccatttcgagcgagttggaggacaggactccgccggtgacctgatgatcagaaatattcagttgaagcacgcaggtaagtatgtgtgtatggttcagacttcagtggaccgactctcagccgctgccgatctgatcgtgaggggtccacccggacctcccgaggcggtcacaatcgacgagattacagatactacagcgcagctgagctggagaccaggccctgacaatcacagtcccattacaatgtacgtgattcaggctaggaccccattttccgttggttggcaggctgtgtcaacagtaccagaactgatcgatggtaaaacattcacagctacagttgtgggcctcaacccctgggtggagtacgagtttcgcacagtcgctgcaaacgtcataggcattggagagcctagtagacccagcgaaaagaggcgaactgaggaggcactaccagaggtgacaccagctaatgtgtcaggtggcggtggcagcaagtccgagttggtcatcacatgggagaccgtgccggaggagttgcagaacggcagaggcttcgggtacgtcgtcgctttccgcccatacggaaagatgatttggatgctgaccgtcctcgcaagtgcagacgcttctcgttatgttttccggaacgagtcagtgcatccattttccccttttgaggtcaaagttggtgtgtttaacaataagggagagggacccttctcccctaccacggtggtatactctgctgaggaagaacccacaaagcccccagcttccatttttgcccgatcactgtccgctaccgatatcgaggtgttctgggcgtctccgcttgaaaaaaatcgtggcagaattcagggttatgaggtgaagtactggaggcacgaagataaggaggagaatgcaagaaagatccgcactgtcgggaaccagaccagcaccaagattacgaatctaaaaggtagtgttctgtaccatctggcagtgaaggcatataattctgcaggtactggtccatcttccgcaactgtgaatgtgaccacacgtaaacctcctccatcacagcccccaggcaatattatttggaactcttccgattccaagataatcttgaactgggaccaggtgaaagctctggataacgagagcgaagtaaaaggatataaagtgctttaccgttggaatcgtcaatctagcactagcgtgatcgaaactaataaaacctccgttgagctgagcctgcctttcgatgaggattacattatcgagatcaagcccttcagcgatgggggtgatggctctagctcggaacaaattcggatccccaagatttccaacgcctacgccagagggagcggagcttcaacgtctaacgcttgcactctctccgctatcagcaccatcatgatctccctcacagcgaggtctagtctatag

SEQ ID NO: 219188 - DNA, 3081 bp, synthetic construct
  misc_feature 1..3081: note = Description of Artificial Sequence: Synthetic coding sequence
  source 1..3081: mol_type = other DNA
atgcgcctaccttgggagctgctggtgcttcagtctttcattttatgcctcgcagacgactccactctccacggacctatattcatacaagaaccttcaccagtaatgtttcctctggactcagaggagaagaaggtgaagttgaactgtgaggttaaggggaacccaaaacctcacataagatggaagttgaatggcaccgacgtggacaccggcatggactttcggtattccgtagtggaaggctccctgcttattaataatcccaataagacacaggacgctggcacataccaatgtaccgccaccaattctttcggaacaatcgtgagcagggaagcaaagttgcagttcgcttacctggacaacttcaaaacaaggacgcggtccactgtgtcagtgcgacgaggccagggcatggttcttttgtgcggtccccctccacattcaggcgagctgtcctatgcctggattttcaacgaatatccatcctaccaagataatcgccgtttcgtcagtcaagagactggtaatctgtacattgccaaagtggagaaatcagacgtgggaaattacacatgcgtggtgacaaataccgtcacaaaccacaaagtattgggaccacctaccccactgattctgcggaatgatggcgtcatgggtgaatatgagcccaaaatcgaagtgcagttccccgagaccgtgccgacggccaagggtgccacggtcaaattggaatgtttcgctctgggcaaccccgtgccgaccattatatggcgcagggcggacggtaagcctattgcacgcaaggctcgccgacacaaatccaatgggattctggaaatacccaatttccagcaggaggacgccggattatacgagtgcgtggccgaaaattctcgtggcaaaaatgttgcacgaggacagctaaccttctatgcgcagcccaactggatccaaaaaattaacgatatccacgtggcaatggaggaaaacgttttttgggaatgtaaggctaacggacgccctaaaccaacatataaatggttgaagaatggcgagcccctcctcacgcgggatagaatacaaatcgaacaaggcactctgaatataaccatcgtcaacctttctgatgcaggcatgtaccagtgcctcgccgaaaacaaacacggggttattttcagtaacgccgaacttagcgtcatagcggtgggacccgacttcagccggaccctcctcaagcgagtgactctggtcaaagtgggaggagaggtggtgatcgaatgtaagccaaaggccagccccaagcctgtctacacgtggaagaaaggccgtgacattcttaaagaaaacgaaagaatcacgatatcagaggacggcaacctcaggattattaatgtaactaaatccgatgctggttcctacacatgcatcgctactaaccactttgggaccgcctcaagcactggaaacctggttgtgaaggatcccactcgcgtgatggtccctcctagctccatggatgtaacggttggcgagtccattgtgctgccctgtcaagttactcacgatcattcactcgacatagttttcacttggagttttaacggccacctgatcgattttgaccgagacggcgatcacttcgaaagggtcgggggacaggactcagcgggtgatctaatgatccgcaacatacagttaaaacacgccggaaagtatgtctgcatggtccaaactagcgtggatcggctgtccgccgcagccgatcttatcgtccgtggtccacccggtcctccagaagccgtcacaatcgatgaaatcacagacacaacagcccagctatcttggcgccctgggccagacaatcacagccctatcaccatgtatgtgatacaggccagaacacccttctctgtaggctggcaggcggtttccactgtcccggagttgatcgacggaaagacctttaccgcaacagtggtcgggctcaacccctgggtggagtatgagttccgcaccgtggcagcgaatgtgatcggaattggtgaaccatcgagaccaagcgagaaacggagaacagaggaagctctgcctgaggtcacgccagccaacgtgtccggcggaggagggtcaaaatcagaactagtgatcacatgggagaccgtacccgaggaattacagaacggtcggggattcggttacgtggtcgcattccgcccatacgggaaaatgatttggatgctgactgtcctcgcatctgcggacgcttcccggtacgtgtttcgcaatgagtctgtacaccctttttcccccttcgaggtgaaagtaggagtgttcaacaataagggagagggacctttctcccctacgactgtggtctactctgccgaggaagagccgaccaaaccgccagcctccatttttgcaagaagtttgagcgctacggatattgaggtgttttgggcctcgccgttggagaagaacagaggaagaatccagggctacgaggtgaaatactggagacatgaggataaggaggaaaatgctcgtaaaattcgcacggtgggaaaccagacaagcactaagataacgaacctgaaggggtccgtcctgtaccacctagccgtgaaagcctataattccgccggtactggacccagctctgccaccgtgaacgtcactactaggaagcctccaccatctcagccccctgggaacataatctggaattcctccgattctaaaataatcctaaactgggatcaggtgaaggccctggacaacgaaagcgaggtaaaggggtacaaagttctttatcggtggaatcgtcagtcttccactagcgtgatagagacaaacaagacaagtgtggaactgagcctgccctttgatgaggattacatcatagagatcaaaccgttctctgacggtggagatggcagcagctcagagcaaatccggatcccgaagatcagcaatgcctacgcccgaggctccggtgccagtacttccaacgcttgcacactatccgctatttcaactatcatgataagcctgacggcccgaagttccctgtag

SEQ ID NO: 219189 - DNA, 3081 bp, synthetic construct
  misc_feature 1..3081: note = Description of Artificial Sequence: Synthetic coding sequence
  source 1..3081: mol_type = other DNA
atgaggctgccctgggagctgctggttcttcagtcattcattttatgtctggccgatgacagtacattgcacggacctattttcatccaggagccgtcccccgtaatgtttcccttggatagcgaagagaagaaggtgaaactgaactgtgaggtcaaaggtaacccgaagccccatattagatggaaattaaatggcaccgatgtagacacgggaatggatttcaggtactcagtagtggagggcagtctcctaataaataaccccaacaaaacccaggatgctggcacttaccaatgtaccgctactaacagttttggaaccatcgtctctcgagaagctaaactccagttcgcctatcttgacaattttaagacacgtactagaagcaccgtgtcagtgcgccgtggccaggggatggtcctactgtgcggacctcctccacacagcggggagctctcctatgcgtggatcttcaacgagtacccttcgtaccaggacaatcgacggttcgtgagtcaggagactggtaacctgtacatcgcaaaagtcgaaaaaagcgatgtcggcaattacacctgcgtcgtcactaatacggttaccaaccataaggtactcggaccacccacacctctgatcttgcgtaatgacggggtgatgggtgaatacgagccaaagattgaagtgcagtttccagagacagtgcccaccgccaagggcgcaactgtcaagctggaatgttttgcccttggcaacccagtgcccactataatttggagacgagccgatggcaagccaatagcaaggaaagcacgcagacacaagtccaatggcattcttgaaatcccgaactttcagcaggaggacgctggactctatgagtgtgtggctgagaattctagaggcaagaacgtggccaggggtcagctgaccttttatgcacagcccaactggattcaaaagatcaatgatatccacgtggcgatggaggaaaatgtgttctgggagtgtaaggctaatgggcgaccaaaaccaacctataagtggctgaaaaacggagaaccccttttaacacgggatcggattcagattgagcaaggaacgctaaacattactattgtcaacctctccgacgccggaatgtaccagtgtctcgcggaaaacaagcacggagtaatattcagtaatgcggagctcagcgttatcgcggtggggcctgattttagccgtaccttattgaagcgcgtgactctggttaaggtgggaggggaagttgtgattgagtgcaagcctaaggcttcccctaagcctgtgtacacctggaaaaaaggtcgggacattctgaaggaaaacgaaagaatcaccatttcagaagacgggaaccttagaattataaatgtgaccaaatccgatgcaggctcgtatacttgcattgccaccaatcatttcggtactgcaagcagcaccggcaacctggtggtcaaagaccccacgagggtcatggtcccaccaagctctatggacgtgaccgtcggagagagcattgtgctgccatgccaggttacccatgatcactccctcgatattgtgttcacctggtcgtttaatgggcatctcatcgatttcgaccgagacggggaccattttgagcgcgtgggcggtcaggactcggctggcgatctgatgattaggaacattcagctgaaacacgctggtaagtatgtttgcatggtgcagacttctgttgataggctgtcagctgccgctgacctaatagtacgcggacccccagggccaccggaggccgttaccattgatgagattaccgacacaactgcacagttatcctggcgccctgggccagataatcattcccccataaccatgtatgttattcaagctaggaccccattctccgtgggctggcaggccgtgtcgactgtgcccgagctcattgatggcaagacctttacagctactgtggtgggcctgaatccatgggtggagtacgagtttcgaacagtggcggcaaacgtgattggcattggtgaaccttctaggccttccgagaagagacgcacagaggaagcactgcccgaggtcacacccgctaacgtgtcagggggagggggttctaagagtgagctggtgatcacatgggagaccgtgccggaagaactgcaaaacggtagagggttcggctatgtcgtggcctttcgaccatacgggaaaatgatttggatgttaaccgttctggcgtcagccgatgcctccagatatgtttttcggaatgaatctgtgcatccattctctcctttcgaggttaaggtgggtgttttcaacaacaaaggcgaaggcccattctccccaaccaccgtcgtctactcagccgaagaggagccgaccaaacccccagcctccatatttgccaggagtctaagtgccactgacatcgaggtcttctgggcgtccccgctggagaagaatagggggcgtatccagggctatgaggttaaatactggcgacatgaagataaggaggaaaacgcgcgaaagatacggacggttgggaatcaaactagcaccaagatcaccaacctcaaagggtcagtgctgtatcacctggccgtgaaggcatacaactctgctggcacaggcccttcttccgctaccgtcaatgtgactacaaggaagcctcctccatcccagcctcctggcaatatcatctggaactcctcagattctaagattatcctcaattgggaccaggtgaaagccctcgacaacgaatcagaagtcaaaggatataaggtgttgtatcgctggaatagacagtctagcacttcggtgatcgagaccaacaagacttccgtcgagctatccctgccctttgatgaagattatattatcgagatcaagcccttctccgacggcggagatgggtcctcctccgagcaaattcgaattccaaagataagtaacgcctatgcaagaggcagtggcgcaagtactagcaatgcttgcacccttagcgccatatccactattatgatctctctgaccgcaagaagctcgctctag

SEQ ID NO: 219190 - DNA, 351 bp, synthetic construct
  misc_feature 1..351: note = Description of Artificial Sequence: Synthetic coding sequence
  source 1..351: mol_type = other DNA
atgagactaccttgggagctcctggtactccagtccttcatcctatgcctggccgatgattccaccttacatggcccaatctttattcaggagccttctcccgtgatgttccctttggatagcgaagagaagaaggtcaaactgaactgcgaggttaaaggcaatccgaaaccacatattaggtggaagctgaacggtaccgatgttgacacgggcatggacttcagatactcagtggtggagggaagtcttctgataaacaaccctaacaagacacaagacgccggaacttaccagtgcactgcgacgaactcttttggcacaattgtcagccgcgaggcgaagctatag

SEQ ID NO: 219191 - DNA, 3081 bp, synthetic construct
  misc_feature 1..3081: note = Description of Artificial Sequence: Synthetic coding sequence
  source 1..3081: mol_type = other DNA
atgaggctgccctgggaactccttgtgcttcagtctttcattctatgcctcgccgacgattccactctgcacggtccgatcttcatccaggagccttctcctgtgatgtttccgctggattccgaggaaaagaaggtcaagctaaactgtgaggtcaagggcaaccccaaacctcatataagatggaaactgaatggtaccgatgtggacaccggtatggattttcgatatagcgtcgtagaaggcagtctcttaatcaataaccccaataaaacacaggatgctggaacctaccagtgcaccgccacaaattccttcgggactatcgtctcaagagaggcgaaactgcagttcgcatatctggacaactttaaaaccaggacccggagcaccgtgagcgtcaggcggggacagggcatggttctattgtgtggcccaccgcctcacagcggtgagctcagctatgcttggatattcaacgagtaccctagttatcaggataatagacgctttgtgtcccaggagactggcaatctgtacatcgcgaaggtagagaagtctgacgtaggcaattacacctgtgtggtgacgaatacggtgacgaatcataaggtacttgggccaccgacacctctcatactgaggaacgatggtgtgatgggcgagtacgagccaaagatcgaggtccagtttcctgagactgtccctaccgcaaaaggagccaccgtcaagctggagtgtttcgccctgggaaacccagtgccaactataatctggcgcagggccgatggaaagccaattgctcgtaaagcgaggcgccataaatcaaatggaatcttggaaattccaaattttcagcaggaggacgcaggtctctatgaatgcgtcgccgagaattcccgaggaaagaacgttgctagaggacagctgacattctacgcccagcccaactggatccaaaaaattaatgatatccacgttgccatggaagagaatgtattctgggagtgtaaggctaatggcagaccaaagccaacttacaagtggctgaagaacggggagccgctattgactcgcgaccgaatccagatcgagcaggggaccctgaatattactatcgtcaacctgagcgatgcaggcatgtaccaatgtctggcagaaaacaaacacggggtcatattcagcaatgcggagctgtcggtgattgcggtggggccagattttagccggacactgttgaagcgggtcaccctggtgaaggtgggaggggaagtcgtcattgagtgtaaaccgaaagccagccccaagcctgtatacacgtggaagaaggggagagacatccttaaagagaacgaaagaattacaataagcgaggatggcaacttgcgcatcatcaatgtcactaaatccgatgccggtagctacacatgcattgcaacaaaccactttggcacagcaagttccaccggcaacctggtcgttaaagacccaaccagggtgatggtccccccatccagcatggatgtcaccgtgggcgagtctatcgtgcttccatgccaggtcacacatgatcacagcctcgatattgtgttcacctggtcgtttaacggacacctgatagacttcgatcgcgatggagatcacttcgagagggtcgggggacaggattctgcaggcgatctcatgattagaaacatccagcttaagcacgctggtaaatacgtatgcatggtccagactagcgtggacagactcagcgccgctgctgatctcattgtccgcggtccgcctggtccacccgaagcggtcactattgacgagataacagatacaacagcccaattatcttggcggcctggcccagataatcactcgcctataacgatgtacgtgatccaggcacgtactccctttagtgtcggatggcaagctgtgagtacagttcctgaactgattgacggtaaaacctttacagctacagttgtgggcctcaatccttgggtggagtacgaattccgtacagtagccgcaaacgttatcggcatcggtgaaccttcgcgtccctccgaaaaaaggagaacggaggaggcactcccagaagttacacctgcaaatgtctctgggggaggcggatcgaaaagcgagcttgtcattacctgggagactgtccccgaggagctgcagaatggtcgcggttttggttacgtggtagctttccgtccttacgggaagatgatatggatgctgactgttctggccagtgccgatgctagtaggtacgtctttcgaaatgaaagcgtacatcctttctcaccctttgaagtgaaggtgggagtttttaacaataagggtgagggccctttcagtcctactacggtcgtttacagcgccgaggaggagcctaccaagccaccagctagcatctttgctcggtccctgtcagccacagatattgaggtattttgggctagccccctcgaaaaaaatcgtggacgaatacagggttatgaggtaaaatactggcgacatgaagacaaggaggaaaatgcgcgaaagatccgtacggttggaaatcagacctccaccaagattactaacttgaaggggtctgttctgtaccatctcgccgtgaaggcgtataattctgcaggtaccggaccgtcatcagctactgtgaacgtgaccaccagaaaaccaccaccctcccagccacccggaaatattatctggaactccagtgattctaaaattatactgaattgggaccaggtaaaagcattagacaatgagtctgaggtgaaggggtataaagtgctgtacaggtggaatcgtcagtcaagtacgagcgtcatcgagacaaacaaaacctctgtagagttgtctctacccttcgacgaagactatattatagagatcaagccgttcagtgatgggggtgacggtagctcctctgagcagattcggatccctaaaatctcaaatgcatatgctaggggatcaggagcctctacaagcaacgcgtgcacactgagcgctataagcaccattatgatctcattaaccgcccgaagcagcctttag

SEQ ID NO: 219192 - DNA, 2097 bp, synthetic construct
  misc_feature 1..2097: note = Description of Artificial Sequence: Synthetic coding sequence
  source 1..2097: mol_type = other DNA
atggaggagaacgtcttctgggagtgcaaggcaaatggcaggcccaagccaacctataagtggcttaagaatggcgagccccttttgacaagagatcggatacaaatcgagcagggaactcttaacatcactattgttaacctatctgacgctggaatgtatcagtgcttggccgaaaacaagcatggagttatcttttctaacgccgagctgtctgtaatcgcagtggggccagatttctcaagaacactactgaaacgcgtgaccctggtgaaagttggcggtgaggtcgttatcgagtgtaaacccaaagcctctccgaaaccagtttatacctggaagaagggaagagacattctaaaagaaaatgagcgaattaccatcagcgaggacggaaatctgcggatcatcaatgtgacaaaatccgacgcgggttcctacacttgcatcgcgaccaatcatttcgggacagcttctagcactggcaatctggtggttaaggacccaacaagagtgatggtgcctccttcatccatggatgtgaccgtaggagagtctattgtgctgccgtgtcaggtgacacatgatcacagcctggatatcgtattcacctggtccttcaatggacatctcattgactttgaccgagacggtgaccacttcgaacgcgtgggcggtcaggacagtgctggcgatctgatgatcaggaacatccagttaaagcacgcaggcaagtatgtctgcatggtccagacatcagtagaccgcctctctgctgcggctgacttaatagttcggggtcctccagggccacccgaagccgtcacaatcgacgagataaccgacacgactgctcaactctcatggcgaccaggcccagacaatcattcccccattacaatgtatgttatccaggcgcgtacgcctttctccgttggatggcaggccgtgagtacagttccggaacttattgatggtaagacctttactgccacagtagtcggactgaacccatgggtcgaatatgagtttcgaaccgttgcggctaatgtgatcgggatcggagagccttcacgcccttctgaaaagcggcgtaccgaggaggccctccctgaagtaacacctgctaacgtgagcgggggaggaggttccaaatctgagttggtgattacatgggagaccgtgcctgaagaactgcagaacggtagaggatttggttacgttgtggccttccggccttacggaaagatgatctggatgttaacagtgctggcttccgccgacgcctcccgctatgtgttcaggaatgagagcgtccatccttttagtccatttgaggtgaaagtgggagtgttcaacaacaagggggagggacctttttctcctacaaccgttgtttattctgcagaggaggaaccaaccaaacctcctgccagcatattcgctcgctcattatcggctacagatatcgaggtgttctgggcctctcccctggagaagaatcgcggacgaatccaggggtacgaggttaagtattggcgacatgaggataaggaggagaacgccagaaagatacggacagttgggaaccaaacatcaaccaaaataactaacttaaaaggtagtgttttgtaccacctggcagtgaaggcttacaatagtgccggaacagggcctagttccgcaaccgtgaacgtaacaacacgaaagccacctccctcacagccccctggtaacattatctggaacagttctgatagcaaaataatcctgaactgggatcaagtgaaggccctggacaatgaatcagaggtgaagggttataaagttctgtatcggtggaaccgtcagagctctacatcagtcatagagacaaataagacatccgtcgagctctcactacccttcgacgaggattatatcattgaaatcaaacccttcagcgatggaggggacggtagcagctctgaacaaattaggatccctaagatttcaaatgcctatgcgagaggcagcggcgcaagcacatccaatgcttgcacattgtcagctatcagcacaatcatgatatcactcaccgccagaagttccctgtag

SEQ ID NO: 219193 - DNA, 165 bp, synthetic construct
  misc_feature 1..165: note = Description of Artificial Sequence: Synthetic coding sequence
  source 1..165: mol_type = other DNA
atgagactgccttgggaactgctggtcctccagtcttttattctttgtctagctgacgactccacgttgcatgggcctatcttcatccaggaaccatcccctgtgatgtttcctttagattctgaggaaaaaaaggtgaagctgaattgcgaggtgaaaggatag

SEQ ID NO: 219194 - DNA, 3303 bp, synthetic construct
  misc_feature 1..3303: note = Description of Artificial Sequence: Synthetic coding sequence
  source 1..3303: mol_type = other DNA
atggcctcatcatggaagctgatgctgttcctttctgtcaccatgtgcctgtctgaatactcgaagtctctgccgggattaagcacatcctatgcagcgctacttaggatcaagaaaagctcttcatctagtctcttcggatccaaaacacgacctagatactcttcacccagcctgggcacactctctgcctcttcccccagctggctaggcgctgcgcaaaactactatagccccatcaatctctaccattcgagcgacgcctttaaacaggacgaatccgttgactatggacccgtgtttgtgcaggagcccgatgacattatctttccaactgactccgacgaaaaaaaggtggccctgaactgtgaagttcgcggaaaccctgtcccatcttatcgctggttacgcaacggaacagagatcgacctggaatccgactatcgctattctttgatagacggcaccttcattatctcaaacccgtccgaagctaaggattccggacactaccagtgcctggcgaccaacacagtggggtccatcttgagccgtgaggcaaccttacaatttgcctacctgggcaacttttctggtagaacaagatccgccgtcagtgttagggaaggacagggcgttgttttgatgtgttctccccctccacactccccagagataatttattcatgggtcttcaatgagttcccatccttcgttgctgaggattctaggagatttatctcacaggagactggcaatctgtatatcagcaaagtgcaaacttctgatgtgggttcttatatctgcctggtgaagaacaccgtgaccaacgcgagagtcttgtccccccctaccccgctaacactacgcaatgacggcgttatgggggagtatgaacccaaaattgaagtgcacttcccctttacggtcaccgccgcaaagggaactaccgtgaagatggagtgcttcgccttgggcaacccggtgcctaccatcacatggatgaaggtcaacggttatattccgtctaaggccagactgcgcaaatcccaggccgtgctggagatcccaaacgtgcagctggacgatgcgggaatttacgagtgccgggctgagaactcacgagggaagaacagttttcgcggtcagttacaggtctacacctacccgcattgggttgaaaaactcaacgacacccagcttgactcaggctcccccttgcgatgggaatgtaaagctaccggcaaaccacgaccgacttacaggtggcttaagaacggtgttccacttagcccacagagccgcgtggagatggtcaacggagtgttaatgatccacaatgtgaaccagtccgatgccggaatgtatcaatgccttgccgagaacaagtatggcgctatttatgcatcagctgagctcaagatcctggctagtgctccaacgtttgcccttaaccagttgaagaaaactatcatcgtgactaaagaccaggaggtggtgattgagtgtaagccgcagggctcacccaagcctactatttcctggaagaagggcgacagagcggtgcgtgagaataaaagaatcgccatcctacccgatggatccctgaggatcctgaacgcatctaagagcgatgagggcaagtacgtgtgccgcggagagaatgtgttcggatcagccgagattattgctagtctgagcgtaaaggaacccacacgtatagaactgactcccaagcgaacggagctgactgtgggggagagcatcgtcctgaactgtaaggctatccacgatgctagtctggacgtaacattctattggaccctgaagggtcagccgattgactttgaggaggagggaggccattttgagtccattcgagctcaggcctcctcagccgatctgatgataaggaacattctgctcatgcacgctggcaggtatggatgcagggtccaaactaccgctgactctgtatctgacgaagctgagctactggtccgcggacccccaggcccaccgggtattgttatcgtggaagagattaccgaatccactgcaaccctgtcctggtctcctgcagctgataatcactcccccatttcctcatacaacctacaggctcggtcccctttcagcctaggatggcaaaccgtgaagacagtccctgaaatcatcacaggagacatggagagtgcgatggcagttgatctgaatccgtgggttgagtatgagtttcgcgtggtcgcaaccaatccaatcggaacaggagacccttctactccatcccgcatgattcgcactaatgaagcagttccgaagacggctcctactaacgtaagtggccgatccggcaggaggcacgaattggttatagcctgggaacccgtgagtgaagaatttcagaatggtgagggatttggatacattgtagccttcagacccaacggcacccggggatggaaggagaagatggtgacctcctccgaagcaagtaaattcatctaccgcgatgagagtgttccacctctcaccccatttgaagtaaaagtcggggtttacaacaacaagggcgatggccctttctctcagatagtggtgatctgttccgccgagggcgagccatccgccgctcctactgatgtgaaggccacatcggtgtctgtgagcgaaatcttggtggcctggaagcacataaaagagtcgttgggccgtccccagggcttcgaggttggttactggaaagacatggaacaagaagatacagccgagactgtgaaaactcgaggcaatgaaagtttcgtaatcctgacaggactggagggcaacacgttgtaccactttacagtcagagcttacaatggggcaggctatggtcctcccagctccgaagtgtcagccaccactaagaaatcccccccaagtcaggctccatcaaatctgcggtgggagcaacagggcagccaagtgagtctggggtgggaacccgttatccctctggccaacgaatccgaagtcgtcggatataaggttttctatcggcaggaagggcactcaaactcacaagtgattgagacgcagaagctgcaggccgtggtgcctctgcccgatgcaggagtatacattattgaggtacgggcttactcggaggggggagatggaacggcttcttcgcagatccgcgtgccctcctattccggcggaaaaatcacttcggcacagagcacactgcacagcctctctacaagcagctctagtgtgactctcctgctggccctgatgatccccagcacatcctggtag

SEQ ID NO: 219195 - DNA, 3081 bp, synthetic construct
  misc_feature 1..3081: note = Description of Artificial Sequence: Synthetic coding sequence
  source 1..3081: mol_type = other DNA
atggcttcttcgtggaagcttatgctttttctgtccgtgactatgtgtctgagcgagagcgtagactacggtcccgtgtttgtccaggaaccagatgatatcatctttcccacagactcggacgaaaaaaaagtcgctcttaattgtgaggtccggggtaaccccgtccccagctatcgatggctgcgaaacgggaccgaaattgacttagaatccgattacagatactcgctcatagacggcacatttatcattagcaatccaagcgaggctaaagactccggccactatcagtgcctggcaaccaatactgtgggatcaatcttgtcacgtgaagcgacacttcagtttgcctatctgggcaacttcagtggcagaacccgctccgctgtgtctgtgcgggagggccagggtgtggtcctgatgtgttctcccccaccacatagtccagaaatcatttatagctgggtgtttaacgagttcccgagctttgtggcagaagattccaggcgcttcatcagccaggagacaggcaacttgtacattagcaaagtccaaacgtctgacgtgggatcatacatttgcctcgtgaaaaatacagtgaccaatgcccgagttctgagtcctccaacacccctcactctgaggaatgacggtgtgatgggggagtacgaaccgaaaatagaagtgcattttccttttaccgttactgctgccaaagggaccacggtcaaaatggagtgctttgcattgggtaatccggtcccaaccatcacctggatgaaagtcaatggatacatcccaagcaaggcccgactgcgcaagtctcaagcagtactggagatccccaacgtccagttggatgatgctggcatctacgaatgtagagccgagaactccagagggaagaattctttcagaggacaattgcaagtctacacatatccacattgggtcgagaaattgaatgacacacagctggacagcggctcacccctgcgctgggagtgcaaagcgaccggaaaaccacgccctacctatcggtggctgaaaaacggagtccctttatctcctcaatcaagagtggagatggtaaatggcgtactaatgatccataacgttaaccagtcagatgcagggatgtaccagtgtttagctgagaacaagtatggagccatctacgctagcgccgagctcaagatcttagctagtgcacccaccttcgccctgaaccagctcaagaaaactattatagtgacaaaagaccaagaggtagtgatcgagtgcaagccccaggggtcccctaagccaaccatatcctggaagaagggagatcgcgcagtgcgagaaaataagaggatcgcaatcttacccgacggatcccttcggattctcaacgctagcaagtcggatgaagggaaatacgtttgtcgaggggagaatgtcttcggaagcgcggaaattatcgcatctctgtcggtgaaagaacctaccaggatagagctcacacccaaacgtaccgagcttacggtcggcgaaagcattgtgctcaattgcaaggcaatccacgacgcgtccctcgacgtgaccttctactggacactgaagggacagccaattgactttgaggaggagggaggacattttgagagcattagagctcaggctagctcagcagacctaatgatccggaacattctcttgatgcacgcagggaggtacggatgccgcgtgcagaccaccgccgacagcgtgagtgatgaggctgagttgctcgttcgcggaccgcctggccctcccggtatcgtgatcgtcgaagagataaccgaaagcacagcaaccctgtcgtggagccccgctgctgacaaccactctcccatatcctcatataacctgcaagctcgcagcccattcagtctgggttggcagaccgtgaagacagtgcccgagattataaccggcgacatggaatcggccatggctgtggacctgaacccatgggtggaatatgagtttagagtggtggccaccaacccaataggcaccggcgacccttctacaccttctaggatgatccgcacaaatgaggcagtgcccaagactgccccaactaatgtgtcagggaggtccggacgcagacatgaactggttattgcctgggagcctgtgtccgaggaatttcagaatggagaaggctttggctatattgtggcctttcgaccaaacgggacccggggttggaaagaaaaaatggtcacaagttcagaggcttccaagtttatctaccgcgatgagtcagtgccccctctgaccccatttgaggtcaaagtcggcgtctacaacaacaagggtgatggcccattttcacaaattgtcgtgatttgtagtgctgagggagagccatcagctgctccaaccgacgtcaaggcaaccagcgtgtctgtgtccgagatactggtagcatggaagcatattaaggaatccctgggacgccctcagggcttcgaagtgggctattggaaggatatggagcaggaggacactgcagagactgtaaaaacgcgcggaaatgaatctttcgtcatcctgaccggacttgagggcaacactctgtatcatttcacggtgagagcttacaacggggcagggtacggtccaccaagttcagaagtaagcgcaaccacaaagaaatcccctcccagtcaggccccttccaacttacgctgggagcaacaggggtctcaagtttcactcgggtgggagccagtgatccccttggcgaacgagagcgaggttgtgggctacaaggtgttctataggcaggaggggcatagcaatagccaggttattgaaacccagaaactgcaagccgttgtgcctctgccagacgcaggcgtgtacattattgaggttcgggcatacagcgagggaggcgatggaacagccagttctcaaatccgcgtcccgtcctactcgggcggaaagataacatctgcccagagcactctgcactcgctatcaaccagtagttctagcgtgaccctcctgctggctctgatgattccttccacttcgtggtag

SEQ ID NO: 219196 - DNA, 3303 bp, synthetic construct
  misc_feature 1..3303: note = Description of Artificial Sequence: Synthetic coding sequence
  source 1..3303: mol_type = other DNA
atggcctcatcctggaaacttatgctatttctctctgtgaccatgtgtctttctgaatactcaaagagcctccccggtctgagcacaagctacgcagctctgctgcgaatcaagaaatcttctagctcaagcttatttggtagcaagaccaggccacgctattcttccccctcacttggaacactctcagcctcatcccctagttggttaggggctgctcaaaattattattctccgattaacttataccactctagcgacgccttcaaacaggatgagtcagtcgactacggacccgtgttcgtccaggagcccgatgacattatttttcccacagacagcgacgagaaaaaggtggcgctcaattgtgaagtgcggggtaaccccgttcccagctatcgctggctccgcaatgggacagaaattgatctggaatcagattatagatattcactgattgatgggaccttcatcatctccaatccttccgaggctaaagattccggtcactaccaatgtttggcaactaacaccgtgggctctattctttcccgggaagcaacactccaattcgcctatctcgggaatttctccggcagaacacgatcagctgtgagtgtgcgcgaaggacagggcgtcgtgttaatgtgctcaccacctcctcactcccccgaaatcatctactcatgggtgttcaacgaattcccaagtttcgtggccgaggattcaaggcgcttcatatcccaggagactgggaatctctacatttccaaagtgcagacttccgatgttggcagttacatctgcctggtgaaaaatactgttactaatgcccgagtgctgagtccaccaactccgcttactctccggaatgacggtgtaatgggagagtacgagccaaagattgaggtacacttcccattcactgtgaccgctgccaaggggacaacagtgaaaatggagtgtttcgccttaggcaatcccgtgccaacaatcacttggatgaaagtcaacggctacataccctccaaggccagattgcggaagtcacaggccgtcctcgaaatcccaaacgtgcaattggatgacgcgggtatctacgagtgtcgagccgaaaattcacgaggcaaaaactcctttcgagggcaattgcaagtctatacctacccccattgggtggagaagcttaacgacacacaattagactcaggctcgccactgaggtgggagtgcaaagccaccgggaaaccacgcccaacttacagatggctcaagaacggtgttcccctttctccccagtctcgggtcgaaatggtgaatggggttctgatgattcacaacgttaaccagagcgacgcaggcatgtaccagtgtcttgctgagaacaagtatggcgctatttacgcatctgcagaacttaagatactcgcatccgccccaacctttgcactgaaccagcttaagaaaacaataattgttaccaaggatcaagaagtggtaatcgagtgtaagccacagggctcgcctaaaccaacaatatcatggaaaaagggtgatcgcgcagtgcgggaaaacaaacggatagcaattttgccagatggatccctgcgcattctgaatgcttctaagtccgatgaaggaaaatatgtttgcaggggtgagaatgtgtttgggtcggctgagatcatcgcctctcttagtgtaaaagaacccacaaggatcgagcttaccccgaaacggactgaactgaccgtcggggagtcaatcgtgctgaactgcaaggctatccacgatgctagcctcgacgtcacattctattggactctgaaagggcaaccaatcgactttgaagaggaaggcggacacttcgagtctattcgcgctcaggcatcttctgccgatctcatgattaggaacatcctgttaatgcacgcgggacgctatgggtgccgggtgcagaccactgctgactcagtgagtgatgaggccgagttactggtgcgtggtcctcctggtccgcctggtattgttattgtagaggagatcacagagtccactgccacactaagttggtctccagcagccgataatcacagcccaatcagttcctataatctgcaggcccgtagccctttctcattgggatggcaaactgtaaagaccgtccctgagatcatcaccggggatatggaatccgctatggccgtcgatctgaacccatgggtggagtacgagttccgtgtggtcgccactaacccaataggtacaggggacccaagtacaccgagccggatgataaggactaacgaggccgtccctaagaccgccccaaccaatgtctcggggagatctgggcgacggcacgagttagtgattgcatgggagcctgtatctgaagaattccagaacggcgagggatttggctacatagttgcattcagaccaaatgggacaagggggtggaaggagaagatggtgaccagtagcgaggcaagcaagtttatttatcgcgacgagagtgtgcccccattgaccccgtttgaagtgaaagtcggcgtgtataacaataagggcgatggcccattttctcaaatagtggttatatgctccgctgagggtgagccttctgccgctcccactgacgtcaaagctacatccgtaagcgtatcggagatcctggtagcttggaagcacatcaaagagtctttgggtcgccctcagggcttcgaggtcggctattggaaggatatggaacaggaagatacagccgaaaccgtgaagactcggggtaatgagagtttcgtgattctgactggactggaggggaacacactgtaccactttactgttagggcctacaacggcgctgggtatggccctccgtcctccgaggtctcggccacaacgaaaaagtccccacctagccaggctccgtctaatctccggtgggaacaacagggttcccaggtgtcgctcggttgggagccagtgattcctctggcaaatgaatctgaagtcgtgggctataaagttttttataggcaggaggggcatagtaattcgcaggtcattgagactcagaaactgcaggccgtggtcccacttcccgatgccggagtttacattatagaggttcgagcttatagtgaaggcggtgacggcaccgctagttctcagattagggtgccgtcttacagtgggggaaaaatcacatctgcacagagcacgcttcactcactgtctacatccagctcaagcgtcactctcctcctcgcacttatgataccgtcaacaagctggtag

SEQ ID NO: 219197 - DNA, 3303 bp, synthetic construct
  misc_feature 1..3303: note = Description of Artificial Sequence: Synthetic coding sequence
  source 1..3303: mol_type = other DNA
atggcttcctcttggaagcttatgttgtttttgtctgtgactatgtgtctgtctgagtacagcaagagccttccaggtctgtccactagctacgccgctctgctgagaattaaaaagtccagctctagtagccttttcggtagcaaaaccagaccacgctattcctccccgtcacttggaaccctaagtgcctcctccccctcctggctgggtgctgctcagaactactattctcccataaacttatatcactcctcagatgcctttaagcaggatgaatccgtggactacggaccagtgttcgtgcaggagccagatgatattattttccctaccgattccgatgagaagaaggtagccctaaattgtgaagtccgcggaaatcccgtaccaagctatcgatggcttagaaacggaacagaaatagatttagagtctgactacagatattcattgatcgatggcacatttatcatctcgaatccgagtgaagccaaggattccggtcactaccagtgtttagcgaccaacaccgtgggctccattctgagtcgtgaagccactctccagttcgcatacttgggaaatttttctggccgaacacgcagcgccgtctccgtgagagaaggccagggggtggtcttgatgtgttccccaccccctcacagcccggaaataatctactcctgggtgttcaacgaatttccctcatttgtcgctgaggactctagacgctttatctctcaggagactggaaacctgtatatatccaaggtgcaaacatcggatgtcgggagctacatttgtttagtgaaaaatacggtcaccaacgcaagagtactttcgccacctacaccccttactctgcgcaatgatggagtcatgggagaatatgaacccaaaatagaagtccactttcccttcacagtcaccgccgctaaaggaaccaccgtgaagatggaatgttttgcactcggaaatcccgtacctactattacatggatgaaggtgaatggatatatccccagcaaggctcgtttgagaaagagccaggcggtgctcgaaatccccaatgtgcaactcgacgatgcaggaatttacgaatgcagggcagaaaattcacggggaaaaaattcattcagaggccagcttcaggtttacacgtacccgcactgggtggaaaagctgaatgacacccagctggattcgggctccccactgagatgggaatgcaaagccaccggtaaaccgcgaccaacttataggtggcttaagaatggcgtgcccctgtccccccagtctagagtggaaatggtgaacggagttctcatgatacacaacgtaaatcaatctgacgccggaatgtaccagtgcttggcagagaacaaatatggcgctatatatgcctcagctgaactgaagatccttgcgtccgctccgaccttcgctctcaatcagctcaagaaaaccattatcgttacgaaagaccaggaggtggtcattgagtgcaagccccagggctctcccaagccaaccatttcctggaaaaagggcgaccgggcagtgagggagaacaagcgcatcgccatcctgccagatggatctttacgcatcctcaacgcgtccaaatccgatgagggcaaatacgtttgcaggggagaaaacgtctttggttcggccgagatcatcgctagcctgtccgtcaaggaacccacccggatcgaactgacacctaagagaactgagctcactgtgggcgagagtatagtgctaaattgtaaggccatccatgacgccagcctagacgttacgttttactggaccttaaaaggccagccaattgacttcgaagaggagggagggcatttcgagagcatccgggcacaggccagttctgccgatcttatgattaggaacattttgctaatgcacgctggcaggtatggatgtcgggtccagacaacggccgattccgtgagcgacgaagccgaactccttgttcgtggacctccaggacctccgggtattgttattgtggaggagattaccgagtcgactgccacgttgtcatggtctcctgccgctgataaccactcaccgatatcatcttacaatctgcaagcgaggagcccttttagtctgggatggcagacagtaaagaccgtgccggaaatcattacgggtgatatggagtctgcaatggctgtggacctgaacccttgggtcgagtacgagtttagggtcgtcgccactaaccccattggtacgggagacccatctacaccttcccggatgattcggacaaatgaggctgtgcccaagactgcaccgactaatgtcagcggaaggtcggggcgtcgccacgaactggtgatcgcgtgggagcccgtgtcagaagagtttcaaaacggcgaaggctttggatatattgttgctttccgccctaatgggacacggggttggaaggagaagatggtcacgagctccgaggctagcaagtttatctacagggacgagtccgtcccgccacttactccgtttgaggtgaaggttggggtttataataataagggggacggccctttttcacagatcgtggttatatgctccgcagagggcgagcctagcgccgctccgactgatgtcaaagctaccagcgtgtcagtgagcgaaatcctggtggcctggaagcacataaaggagtcactggggagacctcagggttttgaagtcggttattggaaggatatggaacaggaggatactgcggagacagtgaagacaaggggaaatgaaagctttgtgatcctcaccggcctcgaaggcaatactctctaccattttaccgtgcgggcatataacggggctggttatggaccaccatccagtgaggttagcgccacaaccaaaaagtcaccccctagtcaggccccttctaatctgcggtgggagcagcagggcagtcaggtgagtcttggctgggaacctgtgatacctctggccaatgagtccgaagtggtgggctacaaggttttttatcgccaggagggtcactccaacagccaggtgatcgaaactcagaaattacaggccgttgtaccgcttcctgatgccggtgtttacattattgaggtgagagcatactctgagggaggagacggcaccgcctcttcacagatccgggtgccgtcctacagcggagggaagattactagcgcacagtccacgctgcactcactgagcacctcctcctcatcagtgacactcttgctggctctcatgatcccatcaacaagctggtag

SEQ ID NO: 219198 - DNA, 2736 bp, synthetic construct
  misc_feature 1..2736: note = Description of Artificial Sequence: Synthetic coding sequence
  source 1..2736: mol_type = other DNA
atggcttcaagctggaagcttatgctgttcctctctgtcactatgtgcctgagcgagtactctaaaagcctccctggtctgagtacatcctacgccgcactgctgagaataaagaaaagctccagcagttcactgtttggatccaaaacaagacctcgctactcaagcccatcgctgggaacactgtccgcctcgagcccatcatggttgggggcagcccagaattattactcaccaattaatctgtatcatagtagcgacgcgttcaagcaggatgaaagcgttgattacggaccggtgttcgtgcaggagcctgatgatatcatctttcctactgacagcgatgagaaaaaagtggctctgaactgtgaagtgaggggcaatcccgtgccttcttatcgctggctgaggaacggaactgagattgaccttgaatctgactatagatactccctgatcgatggtacctttatcatctcaaatccctccgaggctaaggactcagggcactatcagtgtttggctacaaacacagttgggagtatcctctctcgagaggcgacgctccagttcgcatatctgggtaatttttctggaagaacccgcagtgcggtctctgtgcgcgaggggcagggagtggttctcatgtgctctcccccaccacactcaccagagatcatttattcttgggtcttcaatgagttcccgtccttcgtggcagaggattctaggagattcatttcacaggagacaggcaacctgtacatcagcaaagtccaaactagcgacgttggctcatatatatgtctggtgaagaatacggtgacaaacgcgagggtgttgagccctcccacacctctgaccctccgaaatgacggggttatgggcgagtatgaacccaaaatcgaggtgcacttccctttcactgtgactgcggctaaaggcaccactgtaaaaatggagtgtttcgcccttgggaacccagtgcccaccatcacatggatgaaggttaacggctacatcccaagcaaggctcgtcttcgaaagtcccaggctgttctggagattccaaatgtacagttggatgatgctggaatctatgagtgccgtgcagagaactcacgcggaaaaaactctttccgagggcagctccaagtgtacacatatcctcactgggtggagaaactgaatgacacacagctcgatagcggtagcccgcttcgatgggaatgcaaggcgaccggtaaacctaggcccacctaccgatggctgaagaacggcgtcccactctcccctcagtccagagtggagatggtgaacggtgtgctgatgatccacaacgtgaaccagtcagatgcgggaatgtatcaatgccttgctgagaacaaatatggtgctatttacgcctccgctgaactgaagatcctagcttctgctccgacttttgccctcaaccagctcaaaaagactatcatagtgacaaaagaccaggaggtggtgatagagtgcaaaccacagggctcacccaagccaaccatatcttggaagaagggggatagggccgtgagagagaacaagagaatagcgatcctacctgacgggagcctcagaatactgaatgcttctaagtccgacgaaggaaaatacgtctgtaggggggagaatgtgtttggctcagcagagattatcgcatcactgagtgttaaagagcccactaggatcgagctgacccccaaacgtaccgagctcactgttggggagtctatagtcctgaattgtaaggccatccatgatgcatcccttgatgtgactttctattggaccctgaaaggccagcccatagacttcgaggaagaaggcggacacttcgaatcaatcagagcacaggcctccagcgcggacctgatgattcgcaatatcctcctaatgcatgccggtcggtacggatgcagagttcaaactaccgcagatagtgtctctgatgaggctgagttgttggttcgcggacctccaggtcccccaggtattgtgatagtggaggagattaccgagagcaccgcaacactgtcctggagccccgcagctgataatcacagtccaatttcatcttacaacctccaggccagatctcctttctctctggggtggcagaccgttaagacggtgccagagatcatcacgggagacatggaaagcgccatggccgtggatctcaacccttgggtggaatacgagttccgcgttgtggcaaccaatcctatcggtacaggtgacccaagcaccccttcccgcatgatcaggactaatgaggccgtgcccaaaacggcaccaacgaacgtatcgggcaggagcggtcgccgtcatgaattagtgatcgcttgggaacccgtgagcgaagagtttcagaacggcgaaggtttcggatacatcgtggcgtttcgtccaaacggcacgagggggtggaaagagaagatggttacttctagtgaggcatcaaagttcatctacagagacgaaagtgtgcctcctcttaccccattcgaagtaaaggtgggggtgtataataataaaggcgacggacctttcagccagattgtcgtcatttgttcagcggagggcgagcccagcgcagcgccaacagacgtaaaagccacttcagtgagcgtgagcgaaatcctcgttgcatggaaacatatcaaggagagccttgggaggccacagggcttcgaggtgtag

SEQ ID NO: 219199 - DNA, 3087 bp, synthetic construct
  misc_feature 1..3087: note = Description of Artificial Sequence: Synthetic coding sequence
  source 1..3087: mol_type = other DNA
atgcgcttgctgtggaaactcgttatcctgctccctctcatcaatagcagtgcaggcgatggcttattgtctaggcccatattcacccaagagccacacgacgtgatctttcccttagacctgtctaaaagcgaagtaatattaaactgcgcggcaaatggctacccaagcccacactacaggtggaagcagaatgggacagacatcgactttacaatgtcctaccactaccggctcgacggaggcagcttggccattaattctcctcacaccgaccaggacatcggcatgtaccagtgcttggccacaaatcttttgggcaccattttgtctaggaaggcaaagctccagttcgcctatatagaggacttcgagacgaagactcgatctacggtctctgtccgggaaggccagggcgttgtcctactctgcggcccacctccacacttcggcgacctgagttacgcttggacttttaacgacaacccgctttatgtgcaagaggataacagacgctttgtcagccaggagaccggaaatctgtatatagcaaaagtggaaccaagtgacgtgggcaactacacctgtttcattactaacaaagaggcccagaggtcggtgcaaggcccaccaacgccacttgtgcagaggaccgacggcgtgatgggagagtacgagcctaaaattgaagtgaggttcccagaaaccattcaggctgcaaaggactcatccgtgaagctggaatgtttcgctctcggaaatcccgtacctgatataagctggcgccgactggacggcagtcccctgcccggtaaggtcaagtatagtaagagccaagcgattctggaaatccctaatttccagcaggaggatgaggggttttacgagtgcattgcttcaaacctgcgcggaagaaatctcgcgaaaggccaacttattttctacgctccccctgaatgggagcaaaagatccaaaacacccacctttccatctacgacaatctgctgtgggagtgtaaggcctccggcaaacccaacccttggtatacatggctcaagaacggcgaacgcttaaatccagaagaacgtattcagatagagaatggaacgctgattatcacaatgttgaacgtgtccgattccggcgtgtaccagtgtgcggcagaaaacaaatatcagatcatctatgccaacgcagagctcagggtcttggcgtctgctccggatttttctaagtcacccgttaagaagaaaagctttgtacaagttggaggcgatatcgtgatcggatgcaagccaaacgcctttcctcgtgccgctatttcttggaagcgtggcacggaaactcttagacagtctaagcgtatctttttgctggaagacggcagtctgaagatctacaacatcacccggtccgacgccggttcttacacttgcatagccacgaaccagtttggcacagcaaagaacaccggctccctgatcgtaaaggaaagaaccgtaattacagtgcctccaagtaagatggatgtcaccgtaggagagagcattgtgctgccatgtcaagtgagccacgacccttcaattgaagtggtttttgtgtggttctttaacggtgatgtgattgacctgaagaagggcgtcgctcactttgaacgaatcgggggagagagcgtgggagacctgatgataaggaatattcagctccatcactccggcaaatatttatgtacggtccaaaccactctggagtctctgtctgccgtggccgacataattgtgcgcggaccacccggaccacctgaggatgtgcaagtcgaggacatctccagtacaacaagccagctgtcatggcgagcagggcctgacaataacagcccgatccagatctttactatccagacaagaacacccttctccgtcgggtggcaagccgtggccaccgtgccagaaatcctgaatggcaaaacctacaatgctactgtagtggggctgagcccatgggtggagtacgaattcagggttgtagccggtaacagtatcggaattggcgaacccagcgagccctccgaattgttgcggactaaggcgagcgtgcctgtcgttgccccagtgaatattcacgggggaggaggctcccggtcggagcttgtgatcacctgggagtccatccctgaggagctgcagaatggggaaggctttggctacatcatcatgtttaggcccgtcggatctacgacctggtccaaggaaaaggtgagctcagttgaatcgagtaggttcgtctatcgcaatgaaagcatcatccccctgtcgccattcgaggtgaaggttggggtgtataataacgagggcgaaggctccctgagtactgttaccatagtgtactccggggaggatgaaccccaactcgcccctcgaggcacaagtcttcaaagtttctcagcatccgagatggaagtgagctggaatgccatcgcctggaatcgaaacactggacgtgtgctgggttacgaggtgctgtactggactgacgactccaaggaatccatgattgggaaaattcgcgtgagtggaaatgtgactacaaaaaacattacgggtctgaaggccaataccatctactttgccagcgtgagggcatataataccgccggtacagggccttcgagcccgcctgtgaatgtcaccacgaaaaagtcacctccaagtcaaccccctgccaatattgcctggaagttgaccaactccaagctgtgcctgaactgggagcacgttaagactatggaaaatgagtctgaagttctggggtacaagattttatataggcagaaccgccagtcgaaaactcacatcctggaaactaataacactagtgctgagctgctggttccctttgaggaggattacctcatcgagataaggacagtgagcgatggcggagacggcagtagcagtgaggagatccgcattcctaaaatgtcgagcctgtcttcccggggaattcaattcctagaaccaagcacccactttcttagcatcgtcatcgtcattttccattgttttgctatccagcctctgatatag

SEQ ID NO: 219200 - DNA, 3087 bp, synthetic construct
  misc_feature 1..3087: note = Description of Artificial Sequence: Synthetic coding sequence
  source 1..3087: mol_type = other DNA
atgcgtctgctgtggaagttggtgatcctgctgcccctaatcaacagcagcgcaggggacgggctcttgtctcggccaatctttacacaggagcctcatgatgtgatattccccttggacctgtctaagagtgaggttatcctcaactgcgctgcaaatggatatcccagtccacattatagatggaagcagaacggaacagatatcgatttcacaatgagctaccactacaggctggatggagggtccctagctataaactccccccacaccgaccaggacatagggatgtaccaatgcttggccactaacctgttggggaccatcttgtcacggaaggccaagcttcagtttgcctacatagaggattttgaaacaaaaactcggtctactgtctctgtgcgcgagggccagggcgttgtgctgctgtgtggacctcccccacattttggtgatctgagctatgcctggacatttaatgataatccactgtacgtgcaagaggacaatcgtcgattcgtgagtcaggagacaggtaacctctatattgccaaggtcgaaccttccgacgtcggtaattacacctgctttatcactaataaggaggctcagaggtctgtgcagggtcctccaactccgcttgtgcaacgcaccgatggagttatgggcgaatatgagcctaaaattgaagtgagatttccagagactattcaggccgctaaggacagctcagtgaagctcgagtgtttcgccttgggaaatcccgtgccggatatttcctggaggagactggatggatctccactcccaggaaaggtaaaatactccaaatctcaggctattttggagatccctaacttccagcaggaggatgagggcttctacgagtgtattgcttccaacctgaggggacgcaacctcgcaaaaggtcagttgattttttacgctccacctgagtgggagcagaagatacagaacactcatctctcaatctacgacaatttactctgggagtgtaaggcatccggaaagcccaatccttggtacacatggctgaaaaacggcgagcgcctgaatccagaagaacgaatccaaatcgagaacggcaccctgatcatcactatgctcaacgtcagtgattcaggagtgtatcaatgtgctgcagaaaacaaataccagattatctacgcaaatgcagagctgcgcgtgttagcctccgcaccagactttagcaaatctcctgtaaaaaaaaaaagtttcgtgcaggtgggcggagacatcgtgattgggtgtaagcccaatgcttttccgcgagcagccatttcttggaaacgcggaactgagacactacgtcagtctaaaaggattttcttactcgaggacggatccctgaagatttacaacattaccagaagcgatgcgggatcatatacttgcatcgctaccaaccagttcggaacagcaaagaatacaggatcactcattgttaaagaacggacggtcattaccgtgccaccctcgaagatggatgttactgtgggcgagtcaattgtgctgccctgccaggtgtcacacgacccctctattgaggtggttttcgtttggttctttaatggcgacgttattgatctaaagaaaggcgtggcccatttcgagaggatcgggggtgaatctgtcggcgacctgatgatccggaatattcagctccaccatagcggaaagtatctctgcactgtacagacaaccttggaatctctgagtgccgtggcggatattattgtgaggggccctcccggtcctcccgaggatgtgcaggtcgaagatatttcttcaaccacatcccaattatcttggcgagccggaccagataataacagcccgatccagatattcacaatacaaacaagaaccccgttcagcgtggggtggcaggccgtcgctaccgtgcccgagatactcaacggaaaaacctataatgccaccgttgtggggctatccccatgggtggaatacgagttccgagtggtggccggaaattccattggcatcggcgagccaagtgagccttcggaactgcttcgcactaaggcctccgtaccagtggtggcacccgtcaatattcacggcggtgggggatctcggtctgaactggtcattacctgggagagcatcccggaagagctgcaaaacggggaggggttcggctacatcattatgtttaggccagtgggaagcacaacatggtccaaagaaaaagtgtcttctgtagagtcctccaggtttgtgtataggaacgaaagcatcataccgctttcgccttttgaggtgaaagtcggcgtatacaacaacgaaggagagggaagtctatctaccgttacaatcgtgtacagcggtgaagacgaacctcagctggccccaagaggaacttctctgcagtcattcagtgcgtcagagatggaggtgtcctggaatgccatcgcatggaatcgtaacacggggcgagtactgggctatgaagttctctactggacagacgactccaaggagagtatgatcggcaaaatccgcgtcagtgggaatgtcacaaccaaaaacattacggggctaaaggctaacacaatctacttcgcaagcgtgcgcgcttacaacacagcaggtactggtccatcctccccccctgtcaacgtgactaccaagaagagtcctccctcccaacctcctgccaacatcgcttggaagcttacgaactccaagttatgtttaaactgggagcatgtgaagactatggagaatgagtccgaagttctagggtacaaaatcttataccgtcagaaccgacagagcaagacccatatcctcgaaaccaataatacttcagccgagctgctggttccatttgaggaggactatctgattgaaatcaggaccgtgtccgacgggggagacggatccagtagcgaagaaattcgcatccccaaaatgagctccctaagctcacggggtatccagtttctcgaaccaagcacacacttcttgagcattgtaattgtgatttttcactgtttcgccatccagcccttaatttag

SEQ ID NO: 219201 - DNA, 2871 bp, synthetic construct
  misc_feature 1..2871: note = Description of Artificial Sequence: Synthetic coding sequence
  source 1..2871: mol_type = other DNA
atgagctatcactataggctggatggagggtctttagccataaatagcccccatacagatcaggatataggtatgtaccaatgtctggccactaatctgcttggtaccattctgtccagaaaggccaaactccagtttgcctacatcgaagattttgagacaaagacccgctcaacggtttcggttagagaagggcaaggggtggtgctgctgtgtggtcctccccctcacttcggagacctgtcctacgcgtggaccttcaacgataacccgctctatgtccaggaagacaacagaagatttgtgagccaggagactggtaacctgtacattgctaaagtggagccctctgatgttggcaactatacatgtttcatcactaataaggaggcccagaggtctgtgcaaggccctccaaccccccttgtccagcggactgacggcgtgatgggcgaatatgaaccaaagattgaggtgcggttcccagaaaccatccaggccgcaaaggattcatcagtgaagctggaatgcttcgctctcggcaatcctgtcccggatatcagctggcggagactagatggcagccctttgcccggtaaggtgaaatacagcaaaagccaggcaatactggagattcctaactttcagcaggaggacgaaggtttttatgaatgtattgcctccaatctaaggggcagaaatcttgccaaggggcagttgatcttctatgcccctccagagtgggaacagaaaattcagaatacgcacttatctatttatgacaatctcttgtgggagtgtaaggcttcggggaagcctaatccctggtatacctggttgaaaaacggcgagaggctaaatccagaagagaggattcagattgaaaacggcacactcatcattaccatgctcaacgtcagtgactctggtgtgtaccaatgtgcagccgagaacaaataccagatcatctacgctaatgccgagctacgggtgttggcctcagcccctgatttctccaagtctcccgtgaaaaagaagtccttcgtgcaggttgggggagacattgtgatcggatgtaaacccaacgctttcccacgcgcagccatttcatggaaaaggggcaccgagacacttcgccagagtaaacgtatctttctgctcgaggacggttcgttgaagatatacaacatcaccagaagcgatgccggatcatatacgtgcatcgccacaaaccagtttggcactgctaaaaataccggctcactcatagtgaaagagaggaccgttattactgtgcctccgagtaagatggatgtgaccgtgggcgaatcgatagtactgccttgccaggtgtcacatgatccctcgatcgaggttgtcttcgtgtggttttttaacggggatgttatcgatctgaagaaaggcgtggcgcacttcgagcgaatcggaggggagagcgtgggggacttaatgatacgaaatattcagctgcatcattccggtaaatacctctgcactgtgcagactaccctggaaagcctttcagcggtggctgacatcatcgtaaggggtcccccagggcctcctgaggacgtgcaagtcgaggacatcagctccactacctcgcagttatcatggcgggctgggccagacaacaactcgcccattcagatatttaccatccagacaaggacacctttttccgtcggctggcaagccgtggcgacagtccccgagattctgaatggtaagacttataacgcgactgtggtcgggctgtccccatgggtcgaatatgagttcagagtcgtagcgggaaactccataggtatcggggagccttccgaacctagcgaattacttaggacaaaagcctctgtacctgtggtcgccccagtgaacattcacggagggggaggctcccgatccgagctggtgattacctgggaatccatccctgaagagctgcagaatggggagggattcggatatattatcatgttccgccctgttggaagtacaacctggtcaaaggagaaggtatctagtgtcgagtcatctcgctttgtttaccgaaacgagtcaatcataccactgtcaccatttgaagtgaaagtgggcgtgtataacaatgagggagagggtagcctttctactgtgacgattgtatatagtggggaagacgagccccagttagctcctcgcggtacgtccctgcaatcgttctccgcttcagagatggaagtctcctggaacgccattgcgtggaatcgtaacacagggagggtgcttggctacgaggtgctttattggacagacgatagcaaagaaagtatgatcggaaaaattcgggtgtccggcaacgtgaccaccaagaacattactggcctgaaggctaataccatctattttgcgtctgttcgggcttataatacggctggcaccggaccgtctagtcccccagtgaatgtcaccacaaagaaatctccaccctcgcaaccgcctgctaatatagcatggaaactgaccaatagcaagctttgcttaaactgggaacatgtgaaaaccatggagaatgaaagcgaggtcctgggctacaagattctgtataggcaaaaccggcagagcaaaacccacatactggaaactaataacaccagtgctgagctcctggttccattcgaggaggattatcttatagagatcaggaccgtctctgacggtggcgacggctcctctagcgaggagatccgaattccaaagatgagctccctctcctcaagagggatccagtttctcgagccctccacgcatttcttgtccatcgtgatcgttattttccactgctttgccattcagcccctcatctag

SEQ ID NO: 219202 - DNA, 3996 bp, synthetic construct
  misc_feature 1..3996: note = Description of Artificial Sequence: Synthetic coding sequence
  source 1..3996: mol_type = other DNA
atgcaggccgctccacgggctggctgtggcgctgcgctgctgttgtggatcgtgtcgagctgcctgtgccgcgcatggaccgcgccatctacctcccagaagtgtgacgagccgctcgtgtctggactccctcatgtcgcattcagctccagttctagtatctccggatcctattcgcccggttatgccaaaattaataagcggggtggcgcaggaggctggtccccatctgattctgatcattaccaatggcttcaggtggacttcggaaacagaaaacaaatttctgcaatcgctacccagggcagatattcatcctctgattgggtgacccaatatcggatgttatactctgacactgggagaaactggaaaccgtaccatcaggatggcaacatctgggcgttccctggaaatattaactctgacggagttgtcaggcacgaattgcagcatcccattatcgcacgatatgtgcgaattgtgcccttggactggaatggtgaaggtaggatcggcctgcgcatagaggtgtatgggtgctcttactgggcagacgtgattaactttgacggccacgtggttttgccatatcggttcaggaacaagaaaatgaagacactgaaagatgtaattgcgctcaactttaagacttctgagtcagagggcgtgatcctgcatggcgaggggcagcagggggattatattacactggagctgaaaaaagccaaactagtgctgtctcttaacctgggatccaaccaactgggacccatctacggtcacactagcgtaatgaccggaagcttactcgacgaccaccattggcacagtgtagtgattgagaggcaaggcaggtcaatcaatctgacattagacagatctatgcagcacttcagaaccaacggtgagttcgattacctagatctcgattatgaaatcactttcggcggtatccctttctctggtaaaccgtcaagtagctcacgcaagaatttcaaaggctgcatggaatccatcaactataatggcgtcaacattaccgatctagctcgacgaaagaagctggaaccaagtaatgttggaaacctgagtttttcatgcgtggagccctacacggtgccagtcttctttaatgctacctcatatttagaggtcccaggacggctaaatcaagacctgttcagcgtgagcttccagtttcgcacttggaacccgaatggactcctggtgtttagccacttcgccgataatcttggcaacgtggaaatcgatcttaccgagtccaaggttggcgtccacatcaatattacccaaactaaaatgagccaaatcgacatctcgtcaggcagcggtttaaacgatggccaatggcatgaggtcagatttcttgccaaagagaattttgcaatcctcacaatcgatggggatgaagcgtccgccgtcaggaccaactccccgctgcaagtcaaaaccggcgagaaatactttttcggaggtttcctcaatcagatgaataatagctcccactcggttcttcagcccagtttccaggggtgtatgcaactcatccaggtggacgatcaactggtcaacctgtacgaggtcgcccagcgaaaacccggatcatttgctaacgtaagcatcgacatgtgcgctatcatcgatagatgtgtcccaaatcattgcgaacacggcggaaagtgtagtcaaacatgggacagtttcaaatgtacctgtgacgagactggatattccggggctacgtgccacaattccatttacgagccttcttgtgaagcatacaagcatctgggacagacttccaactactattggatcgatcctgatggcagcgggcctctgggaccactcaaggtatattgtaatatgaccgaagataaggtttggaccatcgtgagtcacgacctgcagatgcaaacacctgtggtcggctacaatccggaaaagtacagcgtcacccagctcgtgtacagcgcgtcaatggatcagatttccgcgattaccgatagtgctgagtactgtgagcaatatgtctcctacttttgtaagatgtctagactgcttaataccccagatgggagcccttatacttggtgggtgggcaaggctaatgagaaacactattactggggaggctcagggccaggtatccaaaagtgcgcttgcggaattgagaggaattgtaccgacccaaagtactactgtaactgtgacgcagattataaacagtggcgcaaagacgccggattcctgagttataaagaccacctgcctgtatctcaagttgtcgtaggcgacactgatcgacagggttcagaggccaagcttagtgtagggcctttgaggtgccagggagataggaattactggaatgccgcaagctttcccaacccttcttcataccttcacttttccactttccagggggagacaagcgcagacatttcattctacttcaagacattaacgccgtggggtgtgttcctggagaacatgggcaaggaagacttcataaaactggagctgaaaagcgcaacggaagtgagtttttcatttgacgttggtaacgggcctgtggaaatcgtggtgcggagtcctacccccttaaatgacgaccagtggcaccgtgtgaccgcagaaagaaatgtcaagcaagcatctctgcaggtggacagactaccccagcagatccgaaaggcccctaccgagggccatacccggttggagctgtatagccagctgtttgtggggggtgccggtgggcagcaaggatttcttgggtgcatcagatctttgagaatgaacggagtgacacttgacctggaagaaagagccaaggtcaccagtggatttatttctgggtgctcaggccattgcacatcgtacgggaccaattgcgagaatggcggaaaatgcctggaacggtatcacgggtattcctgcgactgtagcaatacagcctacgatggaacattctgcaataaggatgtcggggcattctttgaagagggtatgtggctgcgttacaacttccaggcacccgctaccaatgccagggatagcagctccagggtcgacaatgccccagaccagcagaactcacacccagatctggctcaggaggagatcagattctccttcagcacaactaaggctccatgtatcctgctttacatttccagctttactaccgatttccttgccgtgctcgttaaacctaccggttccctgcagattagatataacctcggcggtaccagggaaccgtataatatcgatgtggaccatcgtaacatggcgaacgggcagcctcattctgttaatatcacgcgtcacgaaaagacaattttcctaaaattagaccactatccatctgtctcctaccacctcccctcaagctccgacacattgtttaattcccctaaatccctcttcctcggcaaggttatagagaccggcaagatcgatcaggagatccataaatacaatactccaggattcaccggttgcttgtctagagtgcaattcaatcagatcgcacctctgaaggccgcactgcgacaaacaaatgccagtgctcatgtacacatccagggtgagctggttgaaagtaactgcggcgcaagccctctcaccctgtcacccatgtcaagtgccactgatccttggcatcttgatcatctggattcagcctcggccgattttccatacaatcctggccaggggcaggcaatacgcaacggcgtgaacaggaattctgctattatcggtggcgtgatagcagtggtgatattcactattctttgtactctcgttttcctaattcgctatatgttccgacataaggggacctatcacactaacgaggccaagggtgctgaatcggcagagtcagccgacgccgctataatgaacaacgatcccaatttcaccgaaactatcgacgagtccaaaaaggagtggctgatatag

SEQ ID NO: 219203 - DNA, 1173 bp, synthetic construct
  misc_feature 1..1173: note = Description of Artificial Sequence: Synthetic coding sequence
  source 1..1173: mol_type = other DNA
atgaatggcgtgactctagatctggaagaaagagccaaggtgacttccggattcataagcggctgcagcggtcactgcacctcttacggtaccaattgcgaaaacgggggtaaatgcttggaacggtaccacgggtactcgtgcgattgttccaacactgcttatgatgggactttttgtaataaggatgtcggtgctttttttgaagaggggatgtggctgcggtataacttccaagccccagccaccaacgctagagacagttcttcaagagtggacaacgctccagatcaacagaacagtcaccctgacttagcccaggaggaaatccggttctcattctctactaccaaagcaccctgcatcctcctgtatatatccagcttcactaccgatttcctggcagttcttgtcaaacctaccggcagccttcagatcaggtacaaccttggagggacccgagagccgtataacatcgatgtagaccaccggaatatggcaaacgggcagcctcattcagtaaatatcacacgacacgaaaaaacaatttttctcaagctggaccattacccctcggtgtcataccatcttcctagctcctctgacaccttgttcaatagtcccaaaagtttgttcctgggtaaggtcattgagactggcaaaatagatcaggagattcacaaatacaacaccccaggctttacgggatgtctatcccgggtacaatttaaccagatagcaccgctgaaggccgcacttcgtcagaccaacgcatcagcgcatgtgcacatacaaggggaactggtggagagtaattgtggtgcgtcgccgctgacactctcacctatgagcagtgctaccgacccttggcaccttgatcacctggatagcgcttccgccgatttcccctacaatcccggacagggccaagccatccgtaatggcgttaatcgtaacagtgccatcatcggcggtgtgattgccgtggtgatcttcacgatcttgtgcactctggtgttcctaattaggtacatgtttcgtcataagggaacttatcatacgaacgaggctaagggcgcagaaagtgcggagtctgcagatgcagctatcatgaacaatgacccaaactttactgagaccatcgatgagtctaagaaagagtggctgatttag

SEQ ID NO: 219204 - DNA, 1353 bp, synthetic construct
  misc_feature 1..1353: note = Description of Artificial Sequence: Synthetic coding sequence
  source 1..1353: mol_type = other DNA
atgtccgatatggaagatgacttcatgtgtgacgacgaggaggattatgatttagaatacagcgaggattctaacagtgaacccaacgtcgacctggagaaccaatactacaactccaaagctcttaaagaggacgaccccaaggccgcactgagcagtttccagaaagtgctggagctcgagggcgagaagggtgagtggggcttcaaagcacttaagcagatgataaagattaattttaaactgaccaattttcctgaaatgatgaaccgctataagcaactgctgacttatatcagaagtgcagttacccggaactattccgagaaatccatcaacagtatccttgattacatttcaacatcaaagcagaattctgattttctgtgtcagatggacctcctgcaggagttctacgaaactaccctggaagccctcaaagatgctaagaacgaccgtctgtggtttaaaaccaacaccaagttagggaaactgtaccttgaacgggaagaatacggaaaattgcaaaagattctacgacagttacaccagagctgccagaccgacgacggagaggatgatctgaaaaagggtacccagctgctcgaaatctatgccctcgagattcaaatgtacaccgcacagaagaataacaagaagctgaaggccttgtacgagcagagcctacacataaaatcggccatccctcacccgctcatcatgggggtcatacgtgaatgcgggggaaaaatgcacctgcgggagggcgaattcgagaaagctcacaccgacttctttgaagcattcaaaaattatgacgagagcggatcacctagacggaccacctgtctgaagtacttagtacttgccaacatgctgatgaagtcagggatcaatcctttcgactctcaggaggccaaaccctataagaatgatccggaaatcctggcgatgacaaatttggtgagcgcttatcagaataacgatattactgagttcgagaaaattctgaagactaaccactctaacatcatggatgacccattcattagagagcacatcgaggagctcctacgaaacattagaacgcaggttctcatcaagctaattaagccctacacacgcattcacataccctttattagcaaagagctaaatatcgatgtggccgacgtcgaatctctgctcgtacagtgcattctggacaataccatccacggtcgaattgatcaagtcaatcagcttttggaactcgaccaccagaaaagggggggagcccgatataccgctttagacaaatggactaaccagttaaatagtttgaaccaagctgtggtctctaagctagcctag

SEQ ID NO: 219205 - DNA, 1332 bp, synthetic construct
  misc_feature 1..1332: note = Description of Artificial Sequence: Synthetic coding sequence
  source 1..1332: mol_type = other DNA
atgagcgatatggaagacgactttatgtgcgatgatgaagaggactatgatcttgagtacagtgaggactcgaactcagagcctaatgtcgacctggaaaaccaatactacaattccaaagcattgaaagaagacgatcccaaagctgctctgagctccttccaaaaagtccttgaactggaaggcgagaagggagagtggggctttaaggccctaaagcaaatgatcaagattaacttcaagctcactaactttccagagatgatgaacagatacaagcagctattgacatacatcaggtcagccgtaacccgcaattatagcgagaagtccatcaactcaatcctcgactatatatcaacgagtaaacaaatggaccttttgcaagagttctacgaaacaacgctggaggccctgaaggacgcaaaaaacgatagactgtggtttaagacaaataccaagttagggaagctgtacctcgaacgagaagaatacgggaagctgcagaaaatcttaagacagctgcatcagtcatgtcagaccgacgatggcgaggacgacctcaaaaagggtacccagttactggaaatctatgctttagaaatccagatgtacaccgcccaaaaaaacaacaagaaactaaaggcactgtatgaacagtccctgcacatcaaatccgctatcccacacccattgattatgggcgtcatcagagaatgtggtggcaagatgcatctcagagagggggagttcgagaaagcccacactgactttttcgaagcctttaaaaactacgatgaatcggggagcccgcgtcgaacaacctgtctcaaatacctggtcctggccaacatgctcatgaaaagcggaattaacccttttgattcacaggaggcaaaaccctataagaatgatcctgagattttagccatgaccaacctcgtaagcgcataccagaataacgacataacagaatttgaaaagattttgaaaactaatcactccaatatcatggatgatccatttatccgggagcatatcgaagaattgctccgcaatatccgaactcaggtcctgatcaagcttatcaaaccgtacactaggattcacattccctttatctccaaggagttaaacatagacgtggctgatgttgaatccctcctcgttcagtgcatactggataacactatccatggacggatagatcaagtgaatcaactcttggagcttgaccaccagaaacgcggaggagcgaggtacaccgcccttgataagtggactaatcaactgaattccctgaatcaggcggtggtgtctaagctggcctag

SEQ ID NO: 219206 - DNA, 1272 bp, synthetic construct
  misc_feature 1..1272: note = Description of Artificial Sequence: Synthetic coding sequence
  source 1..1272: mol_type = other DNA
atggcaagcgccctggaacagttcgtgaattcagtgcgccagctaagcgcccagggacaaatgacccagctgtgcgagcttattaacaagagtggggaattgctggccaaaaatttgtcgcacctggatactgtcctgggagccttagacgtgcaggaacactccctgggagtcctggctgtcctctttgtgaagttttccatgccttctgtccccgattttgaaactctgtttagccaagtgcagctgttcatcagcacttgcaatggcgaacacataaggtacgccactgatacttttgctggactttgccatcaacttaccaatgccctggtggaacgcaagcaacccctcagaggtataggaatcctcaaacaggctatcgataaaatgcagatgaacactaatcagctgacttcaatccacgcggacctctgccaactgtgtttgttggctaaatgttttaagcctgcactgccttaccttgatgtcgacatgatggacatctgcaaagagaacggggcatacgacgccaagcattttctgtgttattactattacggtggcatgatatataccgggttgaagaactttgagagagccctctatttctatgaacaggctatcacgaccccagcaatggccgtgtcacacattatgctagagtcttataaaaaatatatcctggtgagcctgatcctactggggaaagtgcagcagctgccgaagtataccagccagatcgtcgggagatttataaaacctttatccaatgcctaccatgaactcgcgcaggtttatagcactaacaaccccagcgaactacggaatcttgtcaacaagcattccgaaacctttactagagacaataacatgggcctcgtaaaacagtgtcttagtagcctgtataagaaaaatatccagcggctgaccaagacattccttacactgtctctgcaggatatggcttcccgtgtgcagttaagtggccctcaggaagcggagaagtatgttctccacatgattgaggatggagagattttcgcaagcatcaatcagaaggacggcatggtaagcttccatgataaccctgagaagtacaacaatcctgccatgctgcacaacatcgatcaggagatgctgaaatgcatcgaattagacgagaggctcaaagctatggatcaggagatcaccgtgaatccacaatttgttcagaaatccatgggctcccaagaggacgattctgggaataagccctcatcttattcttag

SEQ ID NO: 219207 - DNA, 960 bp, synthetic construct
  misc_feature 1..960: note = Description of Artificial Sequence: Synthetic coding sequence
  source 1..960: mol_type = other DNA
atggcgtccgctcttgagcagttcgtcaatagtgttagacaactatctgcacaggggcagatgactcagttgtgcgagctgatcaacaaaagcggagaattgctcgccaagaatttgagtcacctcgatacagtgctcggggctctcgatgtgcaggagcattccctcggggtcttagcggtgctgtttgtgaagttttctatgccttctgtgcccgatttcgaaactctgtttagtcaggtgcagcttttcatttccacatgtaatggggaacatatcagatatgccaccgatacctttgccggtctttgtcaccagctaacaaatgcgctggtggaacggaagcagccgctgcggggaatcggaattctgaaacaagccatagataagatgcagatgaacacaaaccagcttactagcattcatgccgacctttgccagctctgccttctggccaaatgcttcaaaccagcacttccttatctggacgtggacatgatggatatatgcaaagagaacggggcttacgatgccaaacacttcttgtgttattattactatggcggaatgatttacactgggcttaagaactttgaacgtgcgctatacttttacgagcaggcgatcacaactcctgccatggccgtttcacacatcatgttggagtcttacaaaaaatatatcctggtgagtctcattcttctaggaaaagtccaacagctgcccaaatacacaagccagatcgtcgggcgttttataaagagacagtctctggccatgctggctagacttgtcttgaacagttggccccaagctgtgctgctgagactgccacccagggtgctcggccttcagcccctgagcaatgcttaccacgagctagcccaggtctatagcacaaacaatcccagcgagctgcggaatctggtgaacaagcactccgagaccttcactcggtag

SEQ ID NO: 219208 - DNA, 834 bp, synthetic construct
  misc_feature 1..834: note = Description of Artificial Sequence: Synthetic coding sequence
  source 1..834: mol_type = other DNA
gcttcacccttttgggtgagctggttgtacggctcccccctgcctgctccaccacttcctgggggagcaaggagtggcacctgcgcccctatcctggtgttgcagaacgctgccgaggctttggccagacaaatgacgcagctctgtgaactgattaacaagtcaggcgagctgcttgctaagaatctgagccatttggacactgtacttggcgcactggacgtacaggagcatagtctcggagtgcttgctgtcctgtttgttaagttctcaatgccttcggtgccagacttcgaaaccctattcagccaggtgcaactctttatctccacgtgcaacggcgagcatatccgttacgcaactgatacattcgccggattatgccaccagttaaccaatgcactggtcgaacgaaagcagccactgcgagggatcggcattctaaaacaggcgatagataagatgcagatgaacaccaaccagctcacctcaatccacgccgatctgtgtcaattatgtttactggcaaagtgttttaagccggcactgccatatctggatgtggatatgatggacatctgtaaagagaacggcgcttacgacgctaagcactttctctgttattactactacggcggtatgatttacaccggcctcaagaacttcgagagagccctgtacttttacgaacaggcgattactacccctgccatggcagtctctcatattatgctggaatcctataaaaagtatatactggtgtctctgatcttgctcggcaaggtgcaacagttgcctaagtacacctcgcaaatagtcggcaggtttatctag

SEQ ID NO: 219209 - DNA, 1212 bp, synthetic construct
  misc_feature 1..1212: note = Description of Artificial Sequence: Synthetic coding sequence
  source 1..1212: mol_type = other DNA
atgactcagctgtgcgagctgatcaataagagcggtgaactcctagccaagaatctcagtcatttagacactgtgttgggggcactcgatgtgcaggagcacagtctgggagttctcgccgtgctgtttgttaagtttagtatgccatcagtgcctgattttgaaacgctgttttcacaggtgcagttgtttatttctacgtgcaatggagaacatatccggtacgcaacagacacatttgccggtttgtgtcatcagcttacgaacgccctggtggagagaaagcaacctctccggggaattgggatccttaagcaggcaattgacaagatgcaaatgaacaccaaccagctcacaagcattcacgccgatttatgtcagctgtgcctgttggcaaagtgcttcaagcccgcacttccctacctagatgttgacatgatggacatctgtaaggaaaatggggcatacgatgccaagcatttcctatgctattactactacggtggtatgatctacacaggactgaagaactttgaaagggccctgtacttctatgagcaggcaatcaccacccccgcaatggcagtgtctcacatcatgctggagagctacaagaagtatattttggtatcactgattctgctgggtaaggtgcagcagctgcccaaatacacaagccagatcgtgggcagattcattaagcccctgtccaatgcctatcacgaattagcccaggtctattcaacaaataatccttccgagctcagaaatctggtgaacaagcattcagagactttcaccagagataataacatgggcctggtgaagcagtgcctcagctcgctgtataaaaaaaatatccagcgactcaccaaaaccttcctgaccctgtccctgcaagatatggcatcccgagtgcagctcagcggtccacaagaagcagagaaatatgtattgcacatgattgaggacggggagattttcgcaagcatcaaccagaaggacggtatggtgtcatttcacgacaacccagagaaatataacaaccccgctatgttacataacatagaccaagagatgctgaaatgtatcgaattagacgagcggctgaaagccatggatcaggagataaccgtgaacccccagtttgtgcaaaaatcaatggggtctcaggaggacgactctggcaacaagccatccagttactcgtag

SEQ ID NO: 219210 - DNA, 1614 bp, synthetic construct
  misc_feature 1..1614: note = Description of Artificial Sequence: Synthetic coding sequence
  source 1..1614: mol_type = other DNA
atggctgcccagtgcgtgaccaaggtggccttaaacgtctcatgcgctaacctactcgacaaagacatcgggagtaagtctgacccattgtgcgtgctgttcctaaacacttccggtcaacagtggtatgaagtagagcggaccgagaggatcaagaattgccttaaccctcaattctctaagacattcataattgactactactttgaagtggtgcagaagctcaagtttggcgtgtatgacatcgataacaagacaattgagctgagcgacgatgatttcctaggcgaatgtgaatgcacactgggtcagattgtgagttcaaagaagctgacaaggccactggtgatgaagacaggtagacctgcgggtaagggttcaatcacaatatccgctgaggagatcaaagacaatagggtagtgctgttcgagatggaggctcgtaagctagataataaagacctgttcggcaagagcgacccatatctcgaattccataagcagaccagtgatggcaactggctgatggttcataggaccgaggttgtaaaaaacaatctcaatccagtgtggaggcctttcaagattagtctcaatagtctgtgttatggagacatggacaagaccatcaaggtagaatgttacgactatgacaacgatggctcacatgatctgattggtacgttccagacaaccatgaccaagctcaaagaagctagcaggtccagccccgttgagttcgagtgtattaatgagaaaaagagacagaaaaaaaagtcttataagaattccggagtcatctccgtgaaacagtgcgagatcaccgtggaatgtacttttctcgactacatcatgggcggttgccagctgaactttactgtcggggtggattttacaggatctaatggtgatccaagatctcctgacagcttacactatatctcaccaaacggggtgaacgaatatctgactgctctctggtccgtgggtctggtgatccaggattacgacgccgacaagatgttcccggcatttggcttcggcgcacaaatccctccacaatggcaggttagccacgagtttcccatgaatttcaacccaagtaatccctactgtaatggcatacaaggtatcgtggaggcctaccgcagctgtctccctcaaataaaactttatggcccaaccaacttttcacccatcattaaccacgttgctagatttgccgctgcagctacccaacagcagaccgctagccagtactttgtgctgctgatcataaccgacggagttatcacagatctcgatgagaccaggcaggctattgtgaacgctagccggttgcctatgtcaataattattgtgggagtgggcggagccgacttctctgcgatggaattcctggatggagacggagggtcccttagatcccccctgggagaggtggccatccgggacattgtgcagtttgtcccctttcggcaatttcagaatgctccaaaggaagccctagcgcaatgtgtactggctgagataccccagcaagtggtcggctactttaacacctacaaactcttaccaccaaaaaaccccgctactaaacagcagaagcagtag

SEQ ID NO: 219211 - DNA, 420 bp, synthetic construct
  misc_feature 1..420: note = Description of Artificial Sequence: Synthetic coding sequence
  source 1..420: mol_type = other DNA
atggcagctcagtgcgttacaaaagtggctcttaacgttagctgtgccaatcttctcgataaggacattgggagcaaaagcgaccccttgtgtgtcctctttttgaacaccagtggccagcagtggtatgaagtggagagaaccgagcgcattaaaaattgtctgaacccacagttctctaaaaccttcatcattgactactatttcgaggtcgtgcagaaactgaagtttggagtctacgacatcgacaacaagaccattgaactgtccgacgacgatttcctgggggagtgcgaatgcaccctgggccagattgtcagttctaagaaactcactaggccgctcgtaatgaagacagggagacctgccggaaaaggcagcatcaccatcagtgctgaggagatcaaggataatcgctag

SEQ ID NO: 219212 - DNA, 30 bp, synthetic construct
  misc_feature 1..30: note = Description of Artificial Sequence: Synthetic coding sequence
  source 1..30: mol_type = other DNA
atggccgctcagtgcgtaaccaaagtgtag

SEQ ID NO: 219213 - DNA, 1614 bp, synthetic construct
  misc_feature 1..1614: note = Description of Artificial Sequence: Synthetic coding sequence
  source 1..1614: mol_type = other DNA
atggccgctcagtgcgtcacaaaagtggcattgaacgtgtcatgcgcgaacctgttagataaggacatcggatctaagagtgatccactgtgtgtgttgttccttaacacatccggccagcagtggtatgaggtggaaaggactgagcgcataaagaattgcctcaaccctcagtttagcaagacctttatcattgattactacttcgaggtcgtccagaagctaaagttcggggtgtacgacatcgataataagactatagaactcagcgacgacgacttcctgggtgagtgtgaatgtactctgggccagattgttagcagtaagaaacttacgaggcctctggtgatgaagaccggaaggcctgccggtaagggatcaatcaccatatcagcagaagaaatcaaggataatcgcgtggtgctgtttgagatggaagccagaaaactggataacaaagatctctttggcaaaagcgacccgtacttagaatttcataagcagacttctgatggcaattggctgatggtgcacagaaccgaggtggtaaagaacaatctgaatccagtctggcggccatttaaaattagcctcaactctctgtgttatggcgacatggataagaccattaaggtagagtgttacgattatgacaacgacggctcccatgaccttattggtaccttccagacaaccatgacaaaactcaaagaggcatcaaggtcttcccccgtcgagtttgagtgcatcaacgagaagaaaagacagaagaagaagagttataagaactctggagtgatcagtgtgaaacaatgtgaaattacggtggaatgtaccttcctggattacataatgggcggatgccagctgaattttactgtcggcgttgacttcacagggtcaaatggggatccgagaagcccagactcattacattacatcagccccaacggggtcaacgagtatctgaccgccctgtggagcgtcggcctggttattcaggattatgatgctgataaaatgtttcctgcattcggcttcggcgctcaaatccctcctcagtggcaagtgagccatgagtttcccatgaattttaacccttcaaacccctactgtaacgggatacaggggatcgtcgaggcctaccgcagctgcctgccacagataaagctgtacggtcctaccaactttagccctatcatcaaccacgtcgccaggtttgccgctgcggctacacagcagcaaaccgcctcccagtacttcgtcctgctaatcatcactgacggtgtaataacagatcttgacgagaccagacaggccatcgtgaatgccagtcggttaccaatgagcattatcatcgtgggtgtcggcggagctgatttctctgctatggagtttttggatggggatgggggatctctccgctcgcctctgggtgaggtcgcaattcgcgatatcgtgcaattcgtccctttccgtcagttccagaatgctccaaaggaggcattagctcagtgtgttctcgccgaaattccccagcaggtggtcggctacttcaatacttataagctgttgcctcctaagaacccggcaaccaagcagcagaaacagtag

SEQ ID NO: 219214 - DNA, 240 bp, synthetic construct
  misc_feature 1..240: note = Description of Artificial Sequence: Synthetic coding sequence
  source 1..240: mol_type = other DNA
atggctgcccagtgtgtcaccaaagtcgcactcaatgtctcctgcgcaaatctgttggacaaggacatagggtcaaaatcggaccccctgtgcgtgctgttccttaatactagtgggcagcagtggtacgaagtggagaggacagagagaatcaagaactgtctcaatccccagttttctaagacttttattattgattactatttcgaagtggttcaaaagctcaagttcggagtctag

SEQ ID NO: 219215 - DNA, 408 bp, synthetic construct
  misc_feature 1..408: note = Description of Artificial Sequence: Synthetic coding sequence
  source 1..408: mol_type = other DNA
atggctgctcagtgtgttaccaaagtcgctctcaatgtgtcatgcgctaatttgctggataaggacattggttccaagtcggaccctctatgtgtgctgtttctgaatacatccggccagcagtggtacgaggtggagagaaccgaacgcattaaaaattgcctgaatccacagttttccaagacatttatcatcgactactactttgaggtcgtgcagaagctcaagttcggagtgtatgacattgataataagactatagagctgagcgatgatgacttcctcggcgagtgtgaatgcacgttaggacagatcgtgtcatccaagaaattgactcgaccactggtcatgaagaccggaaggcccgcaggcaaaggctccattacgattagcgctgaagagatttag

SEQ ID NO: 219216 - DNA, 705 bp, synthetic construct
  misc_feature 1..705: note = Description of Artificial Sequence: Synthetic coding sequence
  source 1..705: mol_type = other DNA
atggcagcccagtgtgttacgaaagtggcgctcaacgtcagctgcgccaacctgctggataaggacatcggcagtaagtccgaccctctgtgcgtgttgttccttaatacttccggccagcagtggtacgaggttgagaggaccgaacggattaagaattgtctgaatccacaattttccaaaacgtttatcatcgactactactttgaagtagtccaaaagctcaagttcggggtctacgacatcgataacaagactattgagctctccgacgacgatttcttaggagaatgcgaatgcaccctcgggcagatagtgagtagcaagaagctgacacgacccctggtgatgaaaaccggtaggcctgccggaaaaggctccataaccatctctgccgaggaaatcaaggataaccgagtagtattgttcgaaatggaagcgaggaagctagataataaggacctgttcggtaaaagtgacccttatctggagttccataaacagacctccgacggtaattggttaatggtccacagaacggaagtggtcaagaataacctaaatccagtgtggagaccgttcaaaatttccctgaactcactgtgttatggggatatggacaaaacaataaaagtggagtgttacgactatgataacgacggcagccatgatctcatcggaacatttcagaccactatgacgtag

SEQ ID NO: 219217 - DNA, 462 bp, synthetic construct
  misc_feature 1..462: note = Description of Artificial Sequence: Synthetic coding sequence
  source 1..462: mol_type = other DNA
atggcggctcagtgtgtcaccaaggtggcactgaacgtctcttgcgccaacctcctggacaaggatattgggtctaagagtgaccctctgtgtgttttatttttaaatacaagcgggcagcaatggtatgaggttgaacgtacagagcggattaagaactgcctaaatccacaattttcaaaaaccttcattatcgactattactttgaggtggttcaaaaactgaagttcggcgtttacgatatcgacaataagaccattgagctgagcgatgatgattttttgggcgagtgcgagtgcactttagggcagattgtttcttctaaaaaactaaccaggcctttggtcatgaaaacagggagacccgctggcaaaggttctatcaccataagcgctgaggaaataaaggacaacagagtagttcttttcgagatggaggcaagaaaattagataacaagtag

SEQ ID NO: 219218 - DNA, 1782 bp, synthetic construct
  misc_feature 1..1782: note = Description of Artificial Sequence: Synthetic coding sequence
  source 1..1782: mol_type = other DNA
atggaacagccagaggatatggctagcctgtcagagttcgattcgctcgccggttcaatccccgcaacaaaagtcgagattactgtcagttgcagaaatcttctggacaaggacatgttttccaagtctgacccgctttgcgtaatgtatacacagggaatggagaacaagcaatggcgggaatttggaaggaccgaggtaattgataacacgttaaatcccgatttcgtgcgcaaattcattgttgactacttttttgaggagaaacagaatcttcgattcgatctttacgacgttgactcaaaaagccccgatctcagtaaacacgattttctcggccaggccttctgtactctgggagagatcgttggctcgcccggttctcgccttgagaagcctctgaccatcggcgcatttagcctgaacagccgcacaggtaaacccatgccagccgtcagcaatggaggcgtgccgggtaagaaatgcgggacgatcatcctatccgcagaagaactcagtaattgcagggatgtagcaacaatgcagttttgtgccaacaagctggataaaaaagatttcttcggaaaatccgatcccttcctggtattctataggtcgaacgaagacgggaccttcaccatatgtcataagacagaagtgatgaagaacactctcaatccagtttggcagaccttcagtataccagtccgcgcactctgtaacggggattacgatcggaccatcaaggtcgaggtgtacgactgggaccgcgatggctcacacgacttcatcggggagtttactactagttatcgcgaactcgccagaggccagtcccagttcaacatctacgaggtcgtgaatccaaaaaagaaaatgaagaaaaaaaaatacgtgaactccggaacagtgactctgctcagctttgccgtggagtccgagtgcactttccttgattacattaagggaggaacgcagatcaattttaccgtggcgatcgactttacagcatccaatgggaacccctcccagagcacctcactccattatatgtccccctatcaactgaacgcctatgccttggccttgacagccgtcggggagattatccaacactacgactcagacaagatgtttccagccctgggctttggcgctaagcttccccctgatggaagggtgtcccacgaattcccactgaatgggaaccaggagaatcccagttgttgcggaattgacggaattctggaagcctaccatcggtcccttaggaccgtgcagttatacgggccaacaaattttgcaccggtggttacacacgtggctcgcaacgccgcagccgtgcaggatggtagtcagtactctgtgctgctgattataaccgatggggtaatttctgatatggcccagacgaaggaggcaattgtgaacgccgcaaagctgccgatgtctattataatcgtgggagtcggacaagccgagtttgacgccatggtggaattggatggggatgacgttcgcatcagctctagggggaagctggctgagcgcgatattgtgcagttcgtccctttccgagactacgtggaccggacaggtaaccatgtcttgagcatggcgaggcttgccagagatgtcctcgcagagattcctgatcagttagtaagttatatgaaggcccaggggattagaccacggccaccccctgcagctcctacacactcaccaagtcaatctccagcaagaactccaccggcatcaccattgcatacgcacatttag

SEQ ID NO: 219219 - DNA, 906 bp, synthetic construct
  misc_feature 1..906: note = Description of Artificial Sequence: Synthetic coding sequence
  source 1..906: mol_type = other DNA
atgaaaaaaaagaagtacgtcaatagcgggactgtcacactgctgagctttgcagtggaaagtgaatgcacattcctggactacattaaaggtggtacacagatcaatttcaccgttgctattgactttacagcctccaacggcaacccctcccagtcaacgtccctacactacatgtccccctatcagttaaatgcatacgctttggctctgacagccgtcggagagataatccagcattatgattccgataagatgttcccagccctgggttttggggcaaaactgccacctgatggcagggtgtcccacgaattcccgctgaacggcaatcaggaaaacccctcttgctgcggaatcgacggaattttagaagcttatcatcgcagcctcaggactgttcaactgtatgggcctactaatttcgcccctgttgttacacacgtggcacgaaatgcagctgcagtgcaggatggaagccagtactctgtgctcctgatcattacggacggcgtgatctccgatatggcccagacgaaggaagctatcgtcaacgctgccaaactgcctatgtcaattataatcgtgggtgtaggacaggctgagttcgacgctatggtggaactggacggggacgacgtgaggatctcgtccagaggcaaactggcggagagggatatcgtgcaatttgtcccttttagggactatgtggatagaacaggtaaccacgtgttatcaatggccaggcttgccagggacgtcctggctgagatccccgaccagctcgtgagttatatgaaagcacagggcatccgacccaggccacccccagccgcaccaacacatagcccatcccaatcccctgcgaggactcctccagctagccctctgcacacccacatttag

SEQ ID NO: 219220 - DNA, 1515 bp, synthetic construct
  misc_feature 1..1515: note = Description of Artificial Sequence: Synthetic coding sequence
  source 1..1515: mol_type = other DNA
atggttctggccgacctgggacgcaaaattaccagcgcacttagatctctctctaatgcaaccattattaacgaagaggtgttaaacgctatgctcaaggaggtgtgtacagctctgcttgaagccgacgttaacatcaaactggttaagcagttacgggagaacgtaaaaagtgctattgacctcgaggagatggcttccggactgaataagagaaagatgatacagcacgcggtgtttaaggagctcgttaagctggtggatcctggtgtcaaggcctggacacccactaagggaaagcagaatgtcatcatgttcgtaggcctgcagggaagcggaaaaactacaacctgctccaagctggcctactactaccaaaggaagggttggaagacctgtcttatctgcgccgatacgttccgtgcaggagcgttcgaccagctaaagcagaatgctacaaaggctcgcattcctttctatggcagctacactgagatggaccctgtgatcatcgccagcgaaggggtggaaaagttcaagaatgagaatttcgaaatcatcatcgttgatactagtggcagacataaacaagaggattctttgtttgaggagatgctgcaggtcgccaatgccattcagccagacaacatagtctacgtcatggatgctagcattggccaggcatgtgaggcccaagcaaaggcttttaaggataaggtggatgtcgcttcggtgattgtcacgaagctagatggccacgcaaagggtgggggagcactgtctgccgtcgccgcaacaaagtccccgattatattcataggcacgggagaacatatcgacgatttcgagccctttaagacacaaccctttatcagcaagctccttgggatgggtgatatcgagggtctaatagacaaagttaacgagcttaagttagacgataacgaagccctgatcgaaaaacttaagcatggacagttcacgctgagagacatgtacgagcaatttcagaacattatgaagatgggacctttcagtcagattcttgggatgataccagggtttggaaccgactttatgtctaaaggcaacgaacaagagagtatggctaggcttaagaaacttatgaccataatggactcgatgaatgaccaagagctcgacagtacagatggcgcaaaagtttttagcaaacagcccggtagaatccagcgcgtagcgaggggaagtggagtttccaccagagacgtacaggagctcttgacacaatacacaaagtttgcccaaatggtgaaaaaaatgggtggcattaagggactctttaaggggggtgacatgagtaaaaacgtgagtcagagtcagatggctaagctgaatcagcagatggctaaaatgatggaccctagagtgctgcaccacatggggggaatggccggtttgcagtctatgatgaggcaatttcagcagggtgccgctgggaacatgaaaggaatgatggggtttaacaatatgtag

SEQ ID NO: 219221 - DNA, 1674 bp, synthetic construct
  misc_feature 1..1674: note = Description of Artificial Sequence: Synthetic coding sequence
  source 1..1674: mol_type = other DNA
atgtctgacccagaaatgggctgggtgcctgaaccaccaactatgaccctgggtgcatccagagtagagcttagagtctcctgccacggcctcctagacagagatactctgactaagccccatccctgtgttctgctgaaactctactctgacgagcagtgggtagaggtggagagaacagaggtcctcaggagttgtagtagccctgtttttagcagggttctggctttagagtactttttcgaggagaagcagccactacagttccacgtattcgatgcagaagacggggcaacaagccccagaaatgacacattccttggctccactgaatgcactttgggccagattgtgagccagaccaaagtgaccaagcccctgctgctgaaaaacggcaagacagctggaaaatctacaatcacaatcgtggccgaggaggtgtccggcaccaacgactacgtccagctcacctttcgagcctacaaattggacaataaggatttgttctctaaatctgatcctttcatggaaatttataagacgaatgaggaccaaagcgaccagttggtgtggcgtacagaggttgtcaagaataaccttaacccttcatgggagccttttagactgtccctgcactctttatgctcctgcgatgtccaccggccacttaagttcctggtgtacgactacgatagtagtggcaaacatgattttatcggggagtttacctccaccttccaggagatgcaggagggtacagcaaatcctggtcaggaaatgcagtgggactgcatcaacccaaaatatagggataaaaaaaagaactataaatcttccggaactgtggtgttagcacaatgtactgtggagaaagtacacacatttttagattatataatgggcggatgtcagatcagcttcacagtcgcgatcgatttcactgcaagcaatggagatcccagatctagtcaaagtctgcactgtttaagtcccaggcaaccgaaccattaccttcaggccctgcgggcagttgggggaatatgccaggattacgattctgacaaacgattccctgcttttgggtttggggctaggatccctcccaactttgaggttagccatgacttcgctatcaattttgatcctgaaaatcccgaatgtgaggaaatctcaggagtcatagcctcatataggagatgcctgccacagatccagttgtatggtccgactaatgtggcgccaataataaatcgtgtagcagagccagctcagcgagaacaaagtacaggacaagctacgaagtattccgtgctcctcgtacttaccgacggggttgtgtctgatatggccgagacccgtacagccattgttcgtgcaagtcgtctgccaatgtcaattatcatcgtcggggtcggcaatgctgatttttcagacatgaggttgctggacggggatgacgggccattgagatgcccccgaggcgtgccagccgctcgggacatcgtacaatttgttcctttcagagacttcaaagatgccgctcccagtgccttggcaaagtgtgttcttgcagaagtcccaagacaggtcgtcgaatactatgctagccaagggattagtccgggagcaccacgcccttgcactctggccaccaccccatccccttcaccatag

SEQ ID NO: 219222 - DNA, 1839 bp, synthetic construct
  misc_feature 1..1839: note = Description of Artificial Sequence: Synthetic coding sequence
  source 1..1839: mol_type = other DNA
atggccttcaaagaacacggcaagattaccagctgctgcataccgggaccaattaactcatcccgtgccggtgccggtgctggcgcatccgggtggagctcaaaaggagtgcgagccagagccagggagcctgagaggggcgcacccgaccgggaaccatctgatatgtcagatccagaaatggggtgggtccccgagcctcccaccatgacgctgggggctagcagggtcgagttgagggtctcgtgccacggactccttgacagggatacgttgaccaagccccacccatgcgtgctcttgaagctgtattctgacgaacagtgggtagaggtggaacggaccgaggttcttcggagctgctcctcacctgtcttcagccgtgtgctcgcactcgaatatttttttgaggagaagcagcccttgcaatttcatgtgtttgatgccgaagatggcgcaacctcgcctcggaatgatactttcctcggatctacggagtgcaccctaggtcagatagtttctcagacaaaggttaccaagcctctgctgttgaagaacggaaaaactgcagggaaatccaccattacaatcgtggccgaggaggtgagcggcacaaacgactacgttcagcttactttccgagcttacaaactggataataaggacttattcagtaagtcggacccattcatggaaatttacaagaccaacgaagaccaatcggatcagcttgtctggagaacagaggttgtgaaaaataatctaaacccgagctgggaacccttccgtctgtctctgcactctctctgcagttgcgacgttcaccgccctttaaaattcctggtctatgactacgattcatccggtaaacatgacttcatcggcgagtttacatcaaccttccaggagatgcaggagggtactgccaaccccggacaagagatgcagtgggattgcatcaatcctaagtatcgggacaagaaaaagaattacaaatcatccggaactgtggtgttggcccagtgcaccgttgaaaaagttcatacttttctggactatatcatgggaggatgccagatcagcttcaccgtggcaatcgactttaccgcgagtaacggcgaccctcgctcctcacagagtctccactgtctcagtcctcgtcagcctaatcactaccttcaggccctacgcgcagtaggaggtatttgccaggactacgactccgataaacgatttccagctttcggcttcggtgccaggattcccccaaattttgaggtttctcatgacttcgcgattaactttgatccagagaatccagagtgtgaggagatcagcggcgtgatcgctagctacagacggtgtctgccgcagatacaactgtacggtccgacaaatgtggctcccatcatcaatcgagtcgctgaacctgctcagcgagaacaatccaccggccaggcaacaaaatacagcgtactcctcgtcctgactgacggagtggtgagtgacatggcggagactcggaccgctattgtccgggcttcccgacttcccatgtctattattattgttggtgtcggtaatgcagacttctcagacatgcgccttcttgacggagatgacgggccactgcggtgtcctagaggagtccccgcagcacgcgatattgtccagttcgtgccgtttagggatttcaaggacgccgctcccagtgcccttgccaaatgcgtgctggccgaggttccacggcaagtggttgaatactacgcaagccaagggatttctcctggcgcaccacggccttgtacactcgccactactccgagtccatctccctag

SEQ ID NO: 219223 - DNA, 159 bp, synthetic construct
  misc_feature 1..159: note = Description of Artificial Sequence: Synthetic coding sequence
  source 1..159: mol_type = other DNA
atgtccgacccagagatgggatgggttccagagccgccaaccatgacgttaggtgcgtcacgcgtggaacttagagtcagctgccacggactgttagacagagatactcttacaaagccccatccctgcgttctgctgaagctgtactcagatgaatag

SEQ ID NO: 219224 - DNA, 396 bp, synthetic construct
  misc_feature 1..396: note = Description of Artificial Sequence: Synthetic coding sequence
  source 1..396: mol_type = other DNA
atgtctgatccagaaatggggtgggtgcctgaacctcccactatgacgcttggcgcttctagagtcgaactgcgcgtctcttgccacggcctactggatagggatacccttaccaaaccacatccttgtgttcttctcaagctctattccgacgaacagtgggttgaagtagaaaggaccgaagtgctgcgctcatgctcatcccctgtcttcagtcgggtcctagctctggagtacttcttcgaagaaaaacaacccctgcagtttcacgtgtttgatgccgaagacggtgcaaccagccctagaaacgacacatttctcggtagtactgagtgcacgttgggacagattgttagccagacaaaagttacaaaacctctcctgctgaaaaactag

SEQ ID NO: 219225 - DNA, 681 bp, synthetic construct
  misc_feature 1..681: note = Description of Artificial Sequence: Synthetic coding sequence
  source 1..681: mol_type = other DNA
atgtccgatcccgagatgggatgggtgccggaacccccaacaatgactctgggagcatcgagagtggaactacgtgtgagctgtcatgggctcttggatagggacaccctgactaagccccacccgtgtgttctgctcaaactgtacagcgacgaacaatgggtggaagtcgagcgcactgaggtgttgcgctcttgctcatcacctgttttttctagagtgcttgccttagagtacttctttgaagaaaagcagccacttcagtttcacgtcttcgacgccgaagatggggctacatccccaaggaacgacacattcctgggctccaccgagtgcacgctggggcaaattgtctcccagaccaaggtcaccaagcccctgcttttaaagaacgggaagaccgccggtaagagcaccatcaccattgtcgccgaagaagtgagcggcacaaatgattatgtgcagctgacattccgcgcttacaagctggataacaaagatctgttttccaaatctgatccctttatggaaatctacaagactaatgaggatcagtccgatcaactggtctggcgaacggaggtggtgaagaataatctaaacccaagctgggaaccatttagactgtcccttcacagcttatgcagttgcgacgtgcatagaccgctaaagttcctttag

SEQ ID NO: 219226 - DNA, 318 bp, synthetic construct
  misc_feature 1..318: note = Description of Artificial Sequence: Synthetic coding sequence
  source 1..318: mol_type = other DNA
atgagtgacccagagatgggatgggtgcccgaacccccaactatgaccctcggcgcatccagagtggaactacgcgtgtcctgtcatggcctcttagaccgcgataccctcacaaagccccatccatgcgttttactcaagttgtattcagacgaacaatgggtcgaggtggaaaggactgaagtgctgagaagttgtagcagtcccgtgttttcccgggtgctggccctggagtatttttttgaggaaaaacagcctctccaatttcatgtgttcgatgccgaagacggagctacttcgcccagaaacgacacatag

SEQ ID NO: 219227 - DNA, 426 bp, synthetic construct
  misc_feature 1..426: note = Description of Artificial Sequence: Synthetic coding sequence
  source 1..426: mol_type = other DNA
atgagtgatcccgagatgggttgggtgcctgaaccgcctactatgaccttgggagcctcaagggtcgaactcagggtttcctgccacggtctcctggatcgcgataccttgaccaagcctcacccgtgtgtactgctgaagttgtacagtgacgagcagtgggtcgaagtcgagcggacagaagtgctgagatcttgctcttccccagtcttttctcgcgtgctggccctggaatatttctttgaggagaaacagcctctgcagttccacgtgtttgacgccgaagatggagctacaagtccaagaaacgatacatttctggggtctactgagtgtacactggggcagattgtatcccagaccaaggtgacaaaaccactgttgcttaaaaacgggaaaacagcaggtaagagcactataacgtag

SEQ ID NO: 219228 - DNA, 450 bp, synthetic construct
  misc_feature 1..450: note = Description of Artificial Sequence: Synthetic coding sequence
  source 1..450: mol_type = other DNA
atgtccgatcccgagatgggctgggtaccagagcctcctactatgactttaggagcctcgagagtcgaattacgggtttcctgtcatggccttttggatcgggacacacttacaaagccgcacccttgcgtgctgttgaaactgtattctgatgagcaatgggtagaggtggagcgcaccgaggtgctccgctcctgctccagtccggtttttagccgagtcctggcactggagtatttctttgaagagaagcagccgttacagttccacgtgtttgatgctgaggatggagccaccagtcccaggaacgataccttcttgggttcaaccgagtgtactctcggacagatcgtctctcagacaaaggtgaccaagccactacttcttaagaacggtaaaactgctggaaaaagcacgattacaatcgtggccgaagaggtatctggttag

SEQ ID NO: 219229 - DNA, 1902 bp, synthetic construct
  misc_feature 1..1902: note = Description of Artificial Sequence: Synthetic coding sequence
  source 1..1902: mol_type = other DNA
atgtccgcaggctcggaacgcggagcggctgccaccccagggggtctgcctgcaccctgcgccagcaaagtggagctaagacttagttgtagacacctcctggatagggatccactgacaaagtctgacccctctgtcgccctcctccagcaggcccaggggcagtgggttcaggtgggtaggactgaggtggtcaggagcagcctgcacccagtatttagcaaagtgttcactgtggattattattttgaagaagtgcaaagactgaggttcgaagtgtacgatacccatggacccagcggcttcagctgtcaggaagatgattttcttgggggaatggagtgtacacttggccagcctgcccaaaaatggctcctgcaggtggtcatgcgggtctcagtcgacgtattagggcctgccggacactgcgccaagcactttctctgctgcacagaatcgagccatctggctcgaacaggcccttccttccttctgagatacgacgacctttgcctcccatgggctaccgcgggtgccgtccgatggtggacatgtcgagggggacatacgcaaggttggcagatcgtcgcccagaaaaaagtgactcgcccactgctgctgaagtttgggcgtaatgcaggcaagagcaccatcaccgtgattgcagaggacattagtggcaataacgggtacgtcgaattgagctttagggcgaggaaattggacgataaggacctcttctctaagagcgatccattcctagaattgtacagggtgaatgacgaccaaggcttgcagctagtgtaccggacagaggtcgttaagaacaatctcaatcccgtgtgggaagcattcaaggtgagcctgagttcgctctgctcttgcgaggagactaggcccctcaaatgcctcgtttgggactatgatagcaggggtaagcacgacttcattggggaatttagcacgacctttgaggaaatgcagaaggcgttcgaagaagggcaggcccaatgggattgcgtaaacccaaagtacaagcaaaaaagacgcagttacaagaattcaggagtggtcgtcctggcagatctcaagtttcatcgagtgtactcgttcttggactatattatggggggttgccagatccactttaccgtggccattgattttaccgcttcaaacggcgaccccaggaatagttgctctctacattatatcaacccatatcagcctaatgaatacttgaaggctttggtaagcgttggcgagatatgccaagactacgactctgataagcggttcagtgccctgggatttggggcacgtatcccacccaaatacgaagtatcacatgacttcgccatcaactttaacccagaggacgatgaatgcgaaggaatacaaggagtcgtagaggcctatcagaactgtctgccacgggtgcagctgtacggtccaaccaacgtggctcctatcattagtaaggtggctcgcgtggcagcagcagaggaatctactgggaaagccagccagtactatatactactgatactgaccgatggagtagttacagatatggcggatacacgggaagcgatagttagggcctcccgcttgcccatgtcgattatcatcgttggggtgggcaatgctgacttcaccgatatgcaggtcctcgatggcgatgacggagtgttgcgtagtcccagaggggagcctgcgctgcgggacatcgtgcaatttgttcccttccgagagttgaaaaatgcgtcacccgctgccttggccaagtgcgtccttgccgaggttcctaaacaggtggtggaatattattcccacaggggattgccgcctaggagtctaggagtccctgccggagaagcctcgcctggctgcaccccctag

SEQ ID NO: 219230 - DNA, 1677 bp, synthetic construct
  misc_feature 1..1677: note = Description of Artificial Sequence: Synthetic coding sequence
  source 1..1677: mol_type = other DNA
atgagcgcagggtcagaaagaggggctgcggctacacccggaggactgccagctccgtgcgccagtaaagttgaactgcgattaagttgcagacacctgcttgatcgggatcctctcaccaagagcgatcctagcgtcgccctgctccagcaagcacaaggccagtgggttcaggtgggtaggaccgaggtcgtgcggagctcacttcatcctgtgtttagtaaagtgtttactgtcgactactattttgaagaggttcagcgcctgcgcttcgaggtctacgatacacatgggccttccgggttctcctgccaagaggacgatttcttaggcggtatggagtgcaccctgggccagatagtcgctcagaagaaggtgacccgacctcttctgctgaagttcggaagaaacgcaggtaaatccaccattacagtgatcgccgaggatatctcgggcaataatggttacgtcgagctctcatttcgggcaaggaagctggacgacaaggacctgttctctaagagcgacccatttctagagctttatcgagtcaacgatgaccaggggctgcagctggtgtatcgcacagaggtcgtaaagaataacctcaaccccgtctgggaagctttcaaagtctcactgagctcactgtgttcctgtgaagagacgcgccctctgaagtgcctcgtgtgggactatgacagcaggggtaaacatgatttcatcggcgaattttctactacattcgaggaaatgcagaaagcatttgaggaaggtcaggctcagtgggattgtgttaatccaaaatacaaacaaaaacgcagatcatataaaaattccggtgtggtggtgcttgcagatctcaaatttcaccgtgtgtatagctttctcgactacatcatgggagggtgtcagatccacttcacggtcgccatcgatttcacggcatccaatggggacccgagaaactcatgctcccttcactatatcaacccatatcaacccaacgagtacttgaaagcgctggtctcagtcggagaaatttgccaggattacgactcagacaaacggttcagcgctctggggtttggcgcacgaatcccaccaaaatacgaggtctctcatgactttgccattaactttaatcccgaggacgacgaatgtgagggcatacagggggtggtcgaggcctatcagaactgtttgcccagagtgcagctgtacggcccaacaaatgttgcaccaatcatctccaaggttgctagggtggcggctgccgaagagtcaacggggaaggccagtcagtactatatcctgctgatcttgactgacggcgtagtgacagatatggccgacacacgggaagccatcgtgcgggcatccaggctgcccatgagcatcattatagtgggggtggggaatgctgatttcactgatatgcaggtactggatggtgatgatggggtacttcgttcccctaggggtgaacccgctcttagggatattgttcagtttgtgcccttcagagaactgaagaatgccagtcctgctgccctggccaaatgtgtccttgccgaggtccccaagcaagtggtggagtattacagccatcggggactgcctcctaggagtctcggagtaccggcaggagaggccagtccagggtgtaccccatag

SEQ ID NO: 219231 - DNA, 825 bp, synthetic construct
  misc_feature 1..825: note = Description of Artificial Sequence: Synthetic coding sequence
  source 1..825: mol_type = other DNA
atggcctccgactctggaaaccaaggaaccctgtgtaccctggagtttgccgtccagatgacttgtcagagttgcgtcgatgcagtcaggaagagcctgcagggtgtcgctggcgtgcaggacgtggaggtccatctagaggaccaaatggtcctggtgcatacaactctgccctcacaggaggttcaggctctgctggaaggaactgggcgtcaggcggttctgaaaggcatgggctcaggccaattgcagaatcttggcgcagccgttgccattctgggagggcctggcacagttcagggggtagtccggttcttacagttgaccccagagcgatgtctcattgaagggacaatcgatgggctggaacctggcctacatggccttcacgtacatcaatacggcgacctgaccaacaattgcaacagttgtggaaatcatttcaatccggacggagcctctcatggtggccctcaggactcggatcggcaccgaggcgatctgggcaacgtgagggccgacgccgatggacgggcaatcttcagaatggaggacgagcagttgaaggtatgggatgtcattggcagatccctgattatcgacgagggcgaggacgatctgggccgaggcggtcatcccctatcaaaaattacaggcaacagcggggaacgcctggcatgtggaatcatagccaggtcagcgggactcttccagaaccctaaacagatttgttcgtgtgacggactcaccatttgggaagagagaggcaggcctatcgccggtaagggcaggaaggaaagcgcccaaccccctgcacacctgtag

SEQ ID NO: 219232 - DNA, 1365 bp, synthetic construct
  misc_feature 1..1365: note = Description of Artificial Sequence: Synthetic coding sequence
  source 1..1365: mol_type = other DNA
atggcgctgcagttgggacggctatcatcaggtccctgttggcttgtggcaagaggaggttgtggcggacccagagcgtggtcacagtgcggagggggtggtctgcgcgcatggtcccaaagatctgccgcaggcagagtctgcaggccccctggacctgcagggacagagcagtccagaggcctagggcatggatctacctctaggggcggaccctgggtaggtacagggctggcagccgcactcgcagggttagtgggtctggctacggccgcttttggacatgttcagcgcgcagaaatgcttcctaagacctccggaaccagagccaccagtcttggtagacctgaggaggaagaggacgagctcgctcaccgctgctcatcatttatggccccacctgttacagacctcggggagcttagacggcgacctggtgatatgaagaccaaaatggagcttctgattcttgagacccaagctcaggtgtgtcaggctctggctcaggtggacgggggagcaaattttagcgtggaccgctgggagaggaaggaagggggaggcggaatctcctgtgttctgcaggacggatgcgtgtttgagaaagctggagtctcaatctccgttgtgcatggaaacttgagtgaagaggccgctaaacaaatgcgatccagaggcaaggtgctcaagaccaaagatggtaagctgcctttctgcgcaatgggcgtctcgtcggtgatccatcctaaaaacccacacgcacctaccattcacttcaattatcgatactttgaagtggaggaagctgatgggaataagcagtggtggttcgggggaggctgtgacttgacacccacctatcttaaccaagaagacgcagtacatttccacaggacactcaaggaagcttgtgatcaacacgggccagacttgtatccgaaattcaagaagtggtgtgacgactattttttcatagctcatcgcggagagcgaaggggtattggaggaatattttttgatgatttggacagtccaagcaaggaggaggtgttccgctttgtgcagtcctgtgccagagccgtggtcccttcatacatccctctggttaagaagcattgtgatgacagctttacaccccaggagaaactgtggcagcaactccgtcgaggtcgctacgtcgaattcaacttgttatatgatagaggaaccaaatttggcctcttcactccaggctccaggatcgagtccattctcatgtcgttacctctgactgctcgatgggaatacatgcatagtcctagtgagaacagcaaagaggccgaaattttagaggttctgcgccatcctagggattgggtccgctag

SEQ ID NO: 219233 - DNA, 1026 bp, synthetic construct
  misc_feature 1..1026: note = Description of Artificial Sequence: Synthetic coding sequence
  source 1..1026: mol_type = other DNA
atgggggtagcgaccaccctccagccacctaccacctccaaaactttgcagaagcagcacctggaagccgtgggagcttatcagtatgtgctcacgttcctgttcatggggccatttttctccctgctcgtgtttgttctccttttcacaagtttgtggcccttttctgtcttttatcttgtatggctctacgttgattgggatacacctaatcaggggggtcggcgtagtgaatggattcgaaatcgagcaatctggcgtcagttacgagactattaccctgtgaagcttgtgaaaacagccgaactgccaccagatagaaactacgtgctgggagcgcacccccacgggattatgtgtaccgggttcttgtgtaacttttccacagagtccaatggattttcacagttatttccaggcctccgaccttggcttgctgtgctggccggattgttctatctgcctgtatacagggattacatcatgtctttcggactctgccccgtgagccggcagtcactggacttcatcctcagccagcctcagctggggcaggccgttgtgataatggttggaggagcgcatgaagccctgtactccgtcccaggagaacattgtctcacgctgcagaagagaaaaggattcgtgcggctggcactccggcatggagccagtctggtccccgtctactccttcggtgaaaacgatatcttcagactaaaagcgttcgcgactggttcatggcagcattggtgtcaacttacctttaagaagctcatggggttcagcccttgcatattttggggacgcggactgttctccgctacctcttggggattgctgccctttgctgtgcccattactactgtggtgggcaggcctatccctgtgccccagagactacatcccacagaggaggaggtcaaccactaccacgccctctatatgaccgccttagagcagctctttgaggagcataaggagtcttgcggagttccagccagtacttgtctgacattcatctag

SEQ ID NO: 219234 - DNA, 930 bp, synthetic construct
  misc_feature 1..930: note = Description of Artificial Sequence: Synthetic coding sequence
  source 1..930: mol_type = other DNA
atggccagtaagagttggcttaactttcttacttttctctgcggctccgctatcggatttctgttgtgctcacagctgttcagcatcctgctgggtgagaaggtggatacccagcccaatgtgctgcacaacgatccacatgcccgacacagcgatgataatggtcaaaatcatttggaaggccagatgaatttcaacgccgactcctctcagcataaagacgaaaacacagatatcgctgaaaacctctaccagaaggtccggatactgtgctgggtgatgacaggacctcagaatctcgagaaaaaggcaaagcatgtaaaggcaacatgggcacaaagatgtaataaggtgctcttcatgtcatccgaggaaaataaagacttcccagcagtggggctgaaaacgaaagaaggaagagatcagctctattggaaaactatcaaggcgtttcagtacgtgcatgagcactatctcgaagacgctgactggttcctgaaagccgacgacgacacctacgtaattttggataatctcaggtggctactttctaaatacgacccggaagagcccatctattttggtagaaggttcaaaccctacgtgaaacagggctatatgagcgggggtgccggatacgtcttatctaaagaggccctgaaaaggtttgtcgatgccttcaaaacggataaatgtactcatagttcatccatagaggacttggctctcgggcgatgcatggaaatcatgaatgtggaagctggcgatagtcgagatacaattggaaaggagactttccacccatttgtacccgagcaccacttgattaaagggtacctccccaggactttctggtattggaactacaactattacccgccagtggaggtgagcctggagatcttattgttgtgtcagtacctagactag

SEQ ID NO: 219235 - DNA, 303 bp, synthetic construct
  misc_feature 1..303: note = Description of Artificial Sequence: Synthetic coding sequence
  source 1..303: mol_type = other DNA
atggcctctaaatcatggctcaattttttaacttttctttgcgggagcgccattggctttctgctctgttcccagttgttttcaattctgcttggggaaaaggttgacacacaaccaaatgtgctacacaatgatccacatgctcggcattcagacgataatggacagaatcacctggaggggcaaatgaatttcaacgccgactcttcacaacataaggacgaaaacaccgatatcgccgaaaatctttatcagaaagtgagaatcctctgctgggtcatgactggcccacagaatctgtag

SEQ ID NO: 219236 - DNA, 396 bp, synthetic construct
  misc_feature 1..396: note = Description of Artificial Sequence: Synthetic coding sequence
  source 1..396: mol_type = other DNA
atggcctccaagagttggctcaattttcttactttcctgtgtggatccgccatcggcttcctgctctgcagtcagctgtttagcattctcctcggcgagaaagtggatacccagccaaacgtcctgcacaacgatccccacgcccgtcacagcgacgataatggtcagaaccacctggagggacaaatgaattttaatgcagactcctcccaacataaagacgaaaacaccgatatcgccgagaatttgtatcaaaaagtgaggattctatgctgggtgatgactggccctcagaacctggagaaaaaggcgaaacacgtcaaggccacatgggctcagcgctgtaacaaggtgctgttcatgtcatctgaagagaataaggacttcccggcttag

SEQ ID NO: 219237 - DNA, 1092 bp, synthetic construct
  misc_feature 1..1092: note = Description of Artificial Sequence: Synthetic coding sequence
  source 1..1092: mol_type = other DNA
atggcatccaagagctggctcaactttttgacttttctctgcggaagcgccatcgggttcctcctttgttcccagttgtttagcattttgctgggtgagaaggtcgacacgcagccaaatgtgctccataatgacccacacgccaggcattccgacgataatgggcagaatcacctagaaggtcagatgaactttaacgccgactccagccagcataaggacgaaaacacagatattgcagagaatctgtatcagaaagtgcgcatcctgtgctgggtgatgacgggaccccagaatctggagaagaaagcaaagcacgtgaaagccacatgggcacaaagatgcaacaaggtgctttttatgtcttctgaagaaaataaagacttcccagccgtgggtctgaagaccaaagaaggtcgcgatcagctctactggaaaacaatcaaggctttccagtacgtgcatgagcactaccttgaggatgccgactggttcctcaaggctgatgacgacacgtatgtcatactggacaacctgagatggcttctgtccaagtacgaccccgaggagccgatctatttcggtcgacgttttaagccatatgtgaagcagggatacatgagcgggggtgccggatatgtcttgagcaaagaagctttgaagaggtttgtggacgcatttaagaccgataagtgtacacactcttcatccatcgaagacctggcactgggacgctgcatggaaattatgaatgttgaggctggtgattcaagagacacgattggtaaagaaacatttcatccatttgtgcctgaacaccacctgatcaaaggatatctgcctaggactttctggtattggaactataattattatccgccagtcgaaggtcccggatgttgttcagatctagccgtttctttccactacgttgatagcaccactatgtacgaactggagtacctcgtgtaccacctacgtccatacggatatctctatagataccaacccaccctccctgaaaggatacttaaggagattagccaggcaaataaaaatgaagacacgaaagtgaagctgggcaatccctag

SEQ ID NO: 219238 - DNA, 549 bp, synthetic construct
  misc_feature 1..549: note = Description of Artificial Sequence: Synthetic coding sequence
  source 1..549: mol_type = other DNA
atgcctcgggtcgtgcctgaccagagaagcaagtttgagaacgaagagttcttcaggaaactttctcgtgaatgcgagatcaaatatactggtttccgcgatcgccctcatgaggagcgtcaggcccgttttcaaaatgcttgccgggatgggaggagtgaaattgcgttcgtggccaccggtacgaacctttcattgcagtttttccccgctagctggcaaggcgagcagcgccagacgccaagccgggaatacgtggatctcgagagggaggccggaaaggtttatcttaaggcgccaatgatcctgaatggcgtctgcgtgatctggaagggatggattgaccttcagagactggatggaatggggtgtttagagttcgacgaggaacgcgcacagcaggaggatgccctggcccagcaggcattcgaggaggcgagaaggaggaccagagaatttgaagaccgtgataggtcacaccgcgaggagatggaggtgagggtctcacaattactggccgtgacaggcaagaaaaccaccagaccctag

SEQ ID NO: 219239 - DNA, 564 bp, synthetic construct
  misc_feature 1..564: note = Description of Artificial Sequence: Synthetic coding sequence
  source 1..564: mol_type = other DNA
atgccacgcgttgtgcccgatcaaagatccaaatttgaaaacgaggaattcttcaggaagctaagtcgggaatgtgaaattaaatacactggcttcagggatcgccctcacgaagaacgtcaggctcgcttccaaaatgcgtgtagagatggcaggtctgagattgcttttgtggctaccggaacaaacctgtctctgcagttctttcctgcatcctggcagggtgagcaacgacagacacctagcagggaatatgtggacctggagcgagaggcaggcaaggtgtacctgaaggctcccatgattctgaacggcgtgtgcgtaatctggaagggatggatcgaccttcagaggctcgacgggatgggttgcttggaattcgacgaggagcgcgctcaacaagaggacgcgctggcccagcaggcgtttgaggaagcacgaagacgaacgcgcgagttcgaggacagagatcggtcccatcgggaggagatggaggccaggcgacagcaggatccttcccccggaagtaatttgggagggggagacgatcttaagttaagatag

SEQ ID NO: 219240 - DNA, 1788 bp, synthetic construct
  misc_feature 1..1788: note = Description of Artificial Sequence: Synthetic coding sequence
  source 1..1788: mol_type = other DNA
atggtcggagttcctggcgctgcagccttccagctgggtccagagaaacgcgttccagccatgccgggttccccagtagaggtgaagatacagagcaggagcagtccacccaccatgccaccactcccccctatcaaccccggtggtcctagacctgtttcttttactcctaccgccctgtctaatggcattaaccacagtccccctaccctcaacggagctcctagccctcctcaaaggttctcgaacggtcctgcctctagcacctcatcagcattaacaaatcaacagctccccgcaacctgcggggctcgacagctatcaaagttgaagcggtttctcaccactttacaacagtttggcaatgacatctcccctgagatcggagagaaggtgcgcactctcgtactggcccttgtcaatagtactgtgacgattgaggaattccactgcaagctgcaagaagccaccaatttccccctgcgcccatttgttattccatttctcaaagccaacctccctctgctgcaacgcgagcttctgcactgcgctagggccgctaaacaaactccaagtcaatacctcgcacagcacgagcatttattgctgaacacctctatagcctctccagctgattcatccgaactgctgatggaggtgcatggtaatggtaaacgcccaagcccagagcggagggaggagaactcctttgatcgggatacaatcgcccctgaaccccctgctaagcgcgtgtgtaccatttccccagcacctaggcattcacccgctctgaccgtgcctctgatgaacccagggggacagttccacccaacccctcccccacttcagcattataccctagaggacattgccaccagccacttatatcgcgaaccaaacaagatgctggaacatcgggaggtgagagaccgacaccattccttgggtcttaacgggggttaccaggacgagcttgtagaccataggttaacggaaagggagtgggcagacgagtggaagcacctggaccatgctctgaattgcattatggagatggtggagaagaccagacgaagcatggcggtcctgcgccgttgccaggagtcggacagggaggaactgaattactggaagcgcagatataacgagaataccgaactgaggaaaaccgggaccgagttggtgtcacgccagcactcacccggttcagcggactctctcagtaatgacagccagcgcgagtttaattcgcgccctggaaccgggtacgtccctgtggaattttggaaaaagacggaggaggccgtgaacaaggtgaagatccaggctatgagcgaagtgcagaaagccgtagccgaggcagagcagaaggcattcgaagtgatagctacagagcgcgctcgcatggaacaaacaatagcagacgtaaagcggcaagcagctgaagatgccttcctcgtcataaatgagcaggaagaatctacagagaattgttggaattgtggaaggaaagccagtgaaacatgttcaggatgtaatatagcccgttactgcggcagcttctgtcagcataaagactgggagcgtcatcatcgcctctgtggacagaatttacacgggcaatcccctcacggacaaggtaggcctctccttcctgtgggccgaggctcttcggctcgatcggctgattgttctgtgccatcacctgctttggacaagacttctgcaacgactagcagatcgtcaacaccagcatctgtcactgctatcgacaccaacggtttgtag

SEQ ID NO: 219241 - DNA, 1815 bp, synthetic construct
  misc_feature 1..1815: note = Description of Artificial Sequence: Synthetic coding sequence
  source 1..1815: mol_type = other DNA
atggccaaggagtcagggatctccctgaaagaaatccaagttctggcccgacaatggaaagtgggaccagaaaagagagttcctgctatgcctggttcacctgtggaagtaaaaatccagtcgagaagtagcccgccaacgatgcccccattgcctcccattaaccctgggggacctagaccggtctccttcaccccgacggcgctctctaacggcataaatcactctccacccactctgaacggagcaccatcaccgcctcagagattttctaacggccctgcatcttcaactagtagcgctctgacgaaccaacaattaccagctacatgcggcgctcggcagctcagtaaattaaaacgctttctgaccactctgcagcaattcggcaatgatatcagcccagaaataggcgagaaagtccgaaccctggtgcttgccttggtgaactccaccgtgaccatcgaagagtttcactgcaagctgcaggaggcaactaacttcccactccggcctttcgtgatccccttcttgaaagcaaatctccccctgcttcagagggaactgctacactgcgctagagccgctaagcagacgccaagccaatatctcgcgcagcatgaacatcttttgctgaatacttcaattgcttcacctgcagactcaagcgagttgctcatggaagtgcacgggaacggaaaaagaccgagcccagagcgcagggaggagaattcttttgacagagataccattgctccagagcctccggcaaagcgtgtctgtacaatatccccagcgccaagacatagtcctgcgttgactgtcccactgatgaaccctggcggacagttccacccaacacctccgccactgcagcattataccttggaggatattgctacatcacatttataccgcgagcctaataagatgcttgagcacagggaagttcgagacagacaccatagtctggggctgaacgggggatatcaggacgaactggtggatcaccggctgaccgagcgagagtgggccgacgagtggaagcacctcgatcacgcgctgaactgcatcatggaaatggtggagaagacgcgcagaagtatggctgtgctgaggcgttgccaggaatccgacagggaggaactgaactactggaagcgtcggtacaatgagaatactgaactgcgaaagaccggcacggagcttgtctctcggcaacatagccctggttcagccgacagccttagcaatgactctcagcgagagtttaattcacggccaggtaccggctatgtgcctgtagagttttggaagaaaactgaggaggccgtaaataaggtgaagatccaagctatgtctgaggtccagaaagccgtcgctgaagctgaacaaaaggcattcgaagtcatcgccaccgagcgcgcacgcatggaacagaccattgccgacgtgaagagacaggcggctgaggacgcatttcttgtgatcaacgaacaggaagagtcaaccgaaaactgctggaactgcgggaggaaagcctcagagacgtgttccgggtgtaatatcgcgaggtactgcggcagtttctgccagcacaaggattgggagagacaccaccggctctgtgggcaaaacctgcatgggcagtcacctcatggtcagggcagaccactcctgccagtggggagggggagcagtgccaggagtgctgactgcagcgtgccttctccagcccttgataaaacatccgcaaccacaagcaggtctagcacacccgctagcgtcactgctatagacactaacggtttgtag

SEQ ID NO: 219242 - DNA, 1815 bp, synthetic construct
  misc_feature 1..1815: note = Description of Artificial Sequence: Synthetic coding sequence
  source 1..1815: mol_type = other DNA
atggcaaaggagagtgggatttccctcaaggagatccaggtgcttgctagacagtggaaagttggcccagagaagagagtgccggcaatgccaggcagcccagtggaggtaaaaatccagagccgtagtagtcctcccacaatgcctccgcttcctccaattaaccccggtggcccacggccagtgagtttcactcctaccgcactgagcaatgggattaaccattctcctccaaccctcaacggggcaccatcaccacctcaacgcttttctaacggtccagccagttccacttcctcggcattgactaatcagcagctcccagccacgtgtggggctcgacagttgtcaaagttaaaaaggttcctgacaacattgcagcagtttggcaatgacatctctccggaaattggtgagaaggttcggactttggtgctggctctcgtgaacagtaccgtgacaatcgaagagtttcactgcaaactgcaggaggcaacgaacttccctttacgaccttttgtgatcccttttctgaaggctaatctgccccttctacagagagagctgctacattgcgctagggctgccaaacagacaccctctcagtacctcgcacagcacgagcatctcctcttgaacactagcatagcgagtcctgcggactcatctgagcttctgatggaggttcacgggaatggtaaacggccatcacctgagcggagggaggagaatagcttcgatcgggacacaattgccccagagcctcccgctaagcgtgtgtgtaccatctcaccagcccctagacattcgcctgcactgactgtgcctctcatgaatccaggaggacagttccacccgacacccccaccgttgcaacactatacattagaggacattgcaacaagccacctatacagagagcccaataaaatgctagaacatcgcgaggttcgcgatcggcaccactcgctgggcctgaatggcggatatcaggatgaactggtagatcacaggttgaccgagagagagtgggctgacgagtggaagcatctggaccatgccctaaattgtattatggaaatggttgagaaaactcggaggagtatggctgtgctaagacgctgccaggagagtgatagggaagaactcaactactggaaacgcaggtataacgagaacactgagctgaggaagacaggaaccgagctcgtgtcgcggcaacactccccgggttcggctgactccctgagcaatgatagccagcgtgagttcaattctaggcctgggaccggctacgtgcccgtggagttctggaaaaagaccgaggaagcggtgaacaaggttaagattcaggctatgtccgaagtgcaaaaagcagttgcagaagcagaacagaaggcatttgaagttatagccacagagcgagctagaatggaacaaacaattgctgacgtgaaacggcaagccgcagaagatgctttcttggtcatcaatgagcaggaagaatccacagagaattgctggaattgcggacgtaaagctagtgagacatgctctggatgtaacatagctcggtattgtgggtccttttgccaacataaagactgggaacggcatcaccgcctgtgtggccagaatctccacggccagtccccacacggccaaggaaggccgctcctgccagtggggcgaggctcgtccgccagatcagccgattgttcggttccatcacctgctctggataaaacctcagccaccacatcaaggagcagcacccccgcttctgtcacagcgatcgataccaacggcctctag

SEQ ID NO: 219243 - DNA, 792 bp, synthetic construct
  misc_feature 1..792: note = Description of Artificial Sequence: Synthetic coding sequence
  source 1..792: mol_type = other DNA
atgcctggaagccctgtggaggtgaagatacagagccggtcttccccccctactatgcccccattgccccctatcaaccccggaggaccgcgaccagtgagttttactcctaccgctctctctaacgggatcaaccattcccctcccactttaaacggcgcaccgtcccctcctcagcgatttagcaacggacccgcatcatccacctcttctgcactgactaatcagcagttgccagccacctgtggagcacgacagctttccaaactcaagcgtttccttactaccctccagcagtttgggaatgacataagccccgagataggcgaaaaagtacgcacacttgtgctggctttagtgaatagcaccgtcaccattgaggaattccattgcaagctgcaagaggccactaatttcccattgcgcccttttgtaataccattccttaaagcaaatctcccgctccttcagagagagctgctgcactgtgccagggccgctaaacagactccttctcagtatcttgcccagcacgagcacttgttgctaaacacatccatcgcttcacccgcagattctagtgagctgctgatggaagtgcacggaaacggaaaaagaccctcacccgagtcatgcattattcaccttaaatcgatgggtgtcgcttctagacacgagtatttttccggcaccctccagatgcctgcccaccctgtcagaaactccacactggaaaatctctgggtggactgctctcgcagcctgaggtcgaccgtcttaccattcccctag

SEQ ID NO: 219244 - DNA, 1728 bp, synthetic construct
  misc_feature 1..1728: note = Description of Artificial Sequence: Synthetic coding sequence
  source 1..1728: mol_type = other DNA
atgcccggaagccccgtggaagtgaagatccagagtcgtagcagtcctcccactatgcccccactgcctcccatcaatcccggaggacccaggcccgttagctttacgccgacagccctgagtaacggaatcaatcactcgccaccaactctcaacggagccccatcgccccctcagagattctccaacggcccagcaagttctactagcagtgcccttactaatcagcaacttccagccacatgcggagctaggcagctatccaagttaaagcggttcttgacaacccttcagcagtttgggaacgacatatctcctgagatcggggagaaggttaggaccttggttcttgccctggtgaacagcactgttactatcgaggagtttcattgcaaactgcaggaggctacgaatttccctctccggcctttcgtgatcccctttttgaaagctaacctacctctgctgcagcgggagctgctccactgcgcacgggcagccaaacaaacccccagtcaatacctggcacagcacgagcatcttctgctgaacacctccatcgcgagccccgctgacagcagtgaactgctgatggaagtgcatgggaatggaaagcgacccagcccagagcgcagagaagaaaattcatttgatcgcgatacgatcgctccagagccgcctgcgaaaagggtctgcactatcagtccagccccaagacactctccagcgctgacagtaccattgatgaatcctgggggacagtttcatcccactcctccgccactgcagcattacactctggaggacatagcgacaagccacttgtatcgggagcccaataagatgctcgaacaccgcgaggtcagagatcgccaccactctctcggcctgaatggcggttaccaggacgagctggtggaccaccggctcactgagagggagtgggccgatgaatggaagcacctggaccatgccctgaattgtattatggaaatggttgagaagaccagacgaagtatggcagtgcttcgcaggtgccaggaatctgatagggaagagctgaattactggaagcgacgctacaacgaaaacacggagctccgcaaaactgggaccgagctggtgagtaggcaacatagcccaggatctgctgactcactgtcaaatgactcccaaagagagttcaatagcaggcccggaactggctacgtacccgttgagttctggaagaagacagaggaggccgtcaataaggtgaaaatacaggctatgtccgaggtgcagaaggccgtagcggaggcggagcagaaagccttcgaggtgattgcaacggaacgcgctagaatggaacagaccatcgcagacgtaaagcggcaggccgcagaagacgccttcctcgttattaacgaacaggaagagagcactgagaactgctggaactgcgggaggaaggctagtgagacttgcagtggttgtaatattgctcgctactgcggttccttctgtcaacacaaggactgggaaaggcaccacagactgtgcggccagaatctacacgggcagtcacctcatggccagggtaggccactgttaccagtgggcaggggctcttctgcaaggagcgctgattgttcagtgccatcacccgctctggacaagacaagcgctactactagcagatcttccacaccggcttctgtgaccgcgatcgacactaacggactctag

SEQ ID NO: 219245 - DNA, 1137 bp, synthetic construct
  misc_feature 1..1137: note = Description of Artificial Sequence: Synthetic coding sequence
  source 1..1137: mol_type = other DNA
atggaggtacatggtaatggcaaacgccctagtccagagcggagggaagaaaatagctttgacagggatactatcgcgcctgagccccctgcgaagagagtgtgtaccattagcccggcaccacgccattctccagccctcacagttcccctcatgaaccctggcggtcagtttcatcctaccccaccgccactccaacactacacacttgaggatattgccacctcccatctgtacagagaaccgaacaagatgcttgaacaccgagaggtacgtgaccgacaccactctttagggctgaatggcggttaccaggacgagttggtggaccaccgtctgaccgagagagagtgggccgacgagtggaagcatctggatcacgcactcaactgtatcatggagatggtggagaagactcgtcgctcaatggccgtacttcgtaggtgtcaggagtctgatagagaggaactcaactattggaaacgacgatacaacgaaaatacagagctgaggaagactggcacggaactcgtgtctaggcagcattcccctggatctgcggacagcctcagtaatgacagtcagagagaatttaattctcgccctggaaccggatacgtgccagtggaattctggaagaagacagaagaggccgttaacaaagtgaagatccaagcaatgtccgaggtgcagaaggctgttgccgaagcagagcaaaaagcctttgaagtaatcgccacagagagggccagaatggaacagacgattgctgatgtgaagagacaagctgctgaagacgcttttctggttatcaatgagcaggaagaaagtaccgaaaactgctggaactgtgggaggaaggcatccgagacatgctctggttgtaacatagcacgctattgtgggagcttttgccaacacaaggattgggagcgccaccacaggttgtgtggacagaacctgcatggacagagcccacatggccaggggaggcccctactgccggttggacggggatcttctgcccgttcggccgattgttcagttccaagtcctgccttggacaaaacttctgcaacaacgagtcgttcttcaacgcccgcatctgtaactgccatcgacactaatggcctgtag

SEQ ID NO: 219246 - DNA, 546 bp, synthetic construct
  misc_feature 1..546: note = Description of Artificial Sequence: Synthetic coding sequence
  source 1..546: mol_type = other DNA
atggtaggggtgcctggggcagcagccttccagctgggccctgaaaaacgtgtgccggcaatgccaggaagccctgttgaggtgaagatacaaagccggtctagccctccaacaatgccgccactccctcctatcaatcctggtggccctcggccagttagttttaccccaacagctttgtccaatgggataaatcatagcccaccaactctcaacggtgccccaagccctccccagcgatttagtaatggccctgccagctcaacttcttccgcgttgaccaaccaacagttgccggcaacttgcggagcaaggcagctatccaaactaaaaaggttcctaaccacattacagcaattcggaaacgatatctcaccagagatcggggagaaggtgagaacactggtgctggccctggtgaactctactgtcacaatcgaagagtttcattgcaaattgcaagaagctacgaacttccccttgcgaccctttgtaataccttttctaaaagcaaaccttccactgctgcagagagagctgctgtag

SEQ ID NO: 219247 - DNA, 243 bp, synthetic construct
  misc_feature 1..243: note = Description of Artificial Sequence: Synthetic coding sequence
  source 1..243: mol_type = other DNA
atggctaaagaaagtgggatctcgctgaaggagatccaggtgctggctaggcagtggaaggtgggaccggaaaaaagggtcccagctatgccaggatcccctgttgaagttaagatccagagcaggagtagcccacccaccatgccaccactgccccctatcaatcctggcggacctcggcctgtgtcgttcacacctaccgccctgtctaacgggatcaatcacagccctcctactctgtag

SEQ ID NO: 219248 - DNA, 459 bp, synthetic construct
  misc_feature 1..459: note = Description of Artificial Sequence: Synthetic coding sequence
  source 1..459: mol_type = other DNA
atgtctgaggtgcaaaaggcagttgctgaggctgaacagaaagcctttgaagtaatcgccaccgagagggcacggatggaacagacaatcgctgatgtgaaacggcaggcagctgaggacgccttcctcgtcatcaacgagcaggaggagagcaccgaaaattgctggaattgcggacggaaagctagcgagacctgctccggctgtaacatcgctaggtattgcggaagcttttgtcaacataaagactgggaacgtcaccatcggctgtgcgggcagaacctgcatgggcagtcgccacacggacagggacgccctctgctccccgtggggagggggtcaagcgcacggagcgcggactgttccgtacctagccccgcattggataaaaccagcgcgacaacttcccgctcctcgacacccgcaagcgtgaccgctattgatactaatggcctatag

SEQ ID NO: 219249 - DNA, 1962 bp, synthetic construct
  misc_feature 1..1962: note = Description of Artificial Sequence: Synthetic coding sequence
  source 1..1962: mol_type = other DNA
atgcccgcttcaaggttaagggatcgggctgcctcctctgcctccggtagtacatgtggatctatgtctcagacacaccctgtacttgaaagcggcctcctcgcctctgctggttgcagtgcacccaggggccctaggaaaggcggtccagctcccgttgataggaaggctaaggcaagtgcaatgcccgatagtcccgctgaagtgaagacgcagcctcgatccacaccccctagcatgcctcccccaccaccagctgcatcccagggagccacaaggcccccttccttcacgccccatacccacagggaagatggcccagcgactctcccacatggccgattccacggttgtctcaagtggagcatggtatgcctcctgatgaacggctcttcccactcccctacggctattaacggcgctccctgcacccccaatggattcagtaacggtccggcaacttcttccactgccagtctctctacccagcacctgcctcccgcttgcggcgcaaggcaactatccaaactcaaaagattcttaactacccttcagcagtttggctccgacatttcgcctgagattggcgaaagagtcaggactctcgtgttagggctcgtgaatagcaccctgactatagaagaattccattcgaaactgcaggaagcgacaaatttccctttgcgccctttcgtgattccgtttttgaaagcgaatctgcctcttttgcagagagagctgctgcactgtgcccgactcgccaaacagacacccgctcaatacttggcccaacacgagcagctgttacttgatgcctccgcctcctcccctatcgacagttctgaacttctgcttgaggtgaacgagaacgggaagcgaagaacgccagacagaacaaaggagaatgggtccgaccgcgacccattacatcctgaacatttatcaaaacgaccgtgcaccctcaaccccgctcagaggtatagcccttctaacggcccacctcaacccacacctccaccccactaccgtttggaagacatcgctatggctcaccatttcagagatgcatacagacatccagatcctagagagctcagggagcgccacagaccactggtcgtgccaggctcacgtcaggaagaagtgattgatcataagctgaccgagcgggaatgggccgaagaatggaaacacctgaacaacctgctgaactgcattatggacatggtcgagaagactaggcgtagtcttacagttctgcggcgatgtcaggaggccgatagagaagagttaaatcactgggcccgtcgctattccgacgcagaggatacgaaaaagggtcccgctcctgctgccgcacgccctaggtcttcaagtgctggaccagaaggcccacagctggatgtgcccagagagttcctgccaagaaccctgacagggtatgtgccagaggatatttggagaaaggcagaagaagcggtgaatgaggtgaagcggcaggccatgagtgagctgcagaaggcggtgtccgatgctgaacgcaaggctcatgagctcatcacaactgagcgagccaaaatggaacgggctcttgctgaggcaaaaaggcaggcaagcgaggacgccctcactgtaatcaaccaacaagaggatagctccgagagctgctggaattgtggtagaaaagcatcagaaacctgctccggttgtaacgctgccaggtactgcggttccttttgtcaacaccgggattgggaaaagcatcaccacgtgtgcgggcagtctctccagggacctacagcagtagttgccgaccccgtgcccggacccccagaagctgctcattcgctcggtcctagtctaccagtgggagccgcatccccatcagaggctggaagtgcaggtccgtctaggccgggttctccaagtcctcccggaccactggatactgtacccaggtag

SEQ ID NO: 219250 - DNA, 1704 bp, synthetic construct
  misc_feature 1..1704: note = Description of Artificial Sequence: Synthetic coding sequence
  source 1..1704: mol_type = other DNA
atgcccgatagtcctgcggaagttaagactcagccgagatcaacaccaccttccatgccgcctcctccccctgcagcgtctcaaggtgcaacacgtccaccttctttcacacctcatacattgatgaacgggtctagccattcccccactgcgatcaacggagcaccctgcacgcctaacggcttctcaaatggacccgcaacttcgagtactgcctcactgagcacgcagcatctgcctccggcttgcggtgctcgccaattaagtaaactgaagaggtttctaacaaccctgcagcagttcggatctgacatctcgcctgagataggggagagagttcgtactctggtgttgggcctggtgaactctaccttaacaattgaagagttccattcaaagctgcaagaggctacgaatttccctctccggccattcgtgattcctttcctgaaagccaaccttcctctcctccagcgggaactcctgcactgtgcccgtttggcaaaacagacaccagcgcagtacctggcacagcatgagcaactgctgctggacgcctccgcctccagtcctattgacagctccgagctgctgctcgaggtaaacgaaaacggcaagaggcgaacaccagacaggacgaaagaaaatggttccgacagggaccccctgcacccggaacatctgtctaaacgcccttgtacgctgaatcccgctcaacggtattcgccgtccaacggaccgcctcaaccgaccccaccccctcactatcggcttgaggacatagccatggcacaccactttagagacgcttatagacaccctgacccccgtgagctgagagagaggcacagacccctggtcgtgcccggaagccgtcaggaggaggttattgaccacaaattgacagaacgtgagtgggccgaagaatggaagcatttgaataatttgttaaattgtataatggacatggtggagaaaactaggcgctccctcactgtcctgagacgctgtcaggaagctgacagggaggagttaaaccattgggcaagacggtacagcgatgctgaagacaccaagaagggtccagcacctgcggctgcacggcctaggtcctcttctgccggtcccgaggggcctcagcttgacgttcctagggagttccttcctagaaccttaactgggtacgttccagaagatatttggcggaaggccgaggaggctgtaaatgaagtgaagcggcaggccatgtcagagttgcagaaggcagtgagtgacgcggagaggaaggcacatgaattgattacaacagagagagctaagatggaacgcgcactcgccgaggccaagcgccaggcctctgaagatgctctgaccgtaatcaaccagcaggaggattcctcagagtcatgttggaattgcggacgtaaagcctcagagacctgttctggctgcaatgctgcgcgatactgtggatctttctgtcagcatcgggactgggaaaagcatcatcacgtctgtggccagtccctccaaggcccaacggccgtcgtcgctgatccggtgcctggcccaccagaagcggctcacagcctgggcccatcgctaccagttggcgctgcctcaccttcagaggctggaagcgcgggtccctcaagacctggctctcccagccccccaggcccactggacactgtccccagatag

SEQ ID NO: 219251 - DNA, 1704 bp, synthetic construct
  misc_feature 1..1704: note = Description of Artificial Sequence: Synthetic coding sequence
  source 1..1704: mol_type = other DNA
atgcccgatagcccggcagaagtaaagacacagccacggagcacccctccatcgatgccgcctccaccccctgccgcttcacagggcgctacgcgccctccttcgtttacccctcacaccttaatgaacggatcatcacactcccctacagccatcaatggggcaccctgtacacctaatgggttctccaacggaccagctacaagctccacagcatcgctgagcacacagcacctcccacctgcttgtggcgctcggcaactatcaaaacttaagaggttcctaaccacgctgcagcagttcgggagtgacatctccccggagataggggagagagtgcgaaccctagtcttggggctggtgaactcaacccttactattgaagaattccactcaaaactgcaggaagccacaaacttccccttgcggcctttcgttataccatttctcaaagcgaatctgcccctgctgcaacgggagcttctgcactgtgcgagacttgcgaagcaaactcctgctcagtaccttgcgcagcacgagcaattactacttgatgctagtgcctcgtcaccaatcgatagttccgagctcctcctggaggttaacgagaatggcaagcggcgaacccccgatagaactaaggagaacggctcagacagagacccacttcaccccgaacacctgtccaagaggccctgtaccctcaatcccgctcagcggtacagccccagcaacggtcctccccagcccacccccccaccgcactaccgcctggaggatatcgccatggcccaccattttagggatgcctataggcaccccgatcccagagagctgagagagcgccatcgacctctggtcgttcctggctccaggcaggaagaagtgatagatcataagctgactgagcgagaatgggcggaagaatggaagcatcttaacaacctgctgaattgtattatggacatggttgagaagaccagaagatccctgaccgtgctccggagatgtcaggaagctgaccgagaagaactgaaccactgggctcggaggtatagcgacgcggaggacactaaaaagggccctgccccagccgctgcccgaccccgttcaagctcagccggtcccgaaggcccacagttggatgttcctagagaattcctgccccgaactctgacaggatatgttccagaggacatctggcggaaagcagaagaagccgtgaatgaggtaaagcggcaggccatgagtgagcttcagaaggccgtgtcggatgctgagagaaaggctcacgagcttatcaccacagagcgcgctaaaatggaacgcgcattagcagaagccaagaggcaggctagtgaggacgccctgaccgttattaaccagcaggaggatagctctgagtcctgctggaattgtggacgcaaagccagcgaaacatgctccgggtgcaatgctgccaggtactgtggcagcttctgtcaacaccgcgactgggagaaacaccatcacgtgtgtggtcagagcctccaaggccctacagccgtagtcgctgaccctgttccaggaccacctgaggcagcgcatagccttggcccttctctgccagtgggcgctgctagcccgagtgaggccggatctgccggtcccagccgacctggatctccatcacccccaggcccattagatacggtgccaaggtag

SEQ ID NO: 219252 - DNA, 1848 bp, synthetic construct
  misc_feature 1..1848: note = Description of Artificial Sequence: Synthetic coding sequence
  source 1..1848: mol_type = other DNA
atgcctgctagtcgcctgcgcgatagagccgctagtagcgcatctggcagtacttgtggatctatgagccagacgcaccccgttctcgaatcggggttgcttgcttctgccggatgctccgctcccagaggaccaagaaagggcggtcccgcacccgtggaccggaaggccaaggcctctgccatgcctgatagcccggctgaagtcaagactcagccaaggtctacaccaccctccatgcctccaccgcctcctgctgcttcccagggagccacccggccacctagcttcaccccccacaccctgatgaacggaagttctcacagccctactgccattaatggtgcaccctgcacccccaacgggttttcaaacggaccagccacatcgagcaccgcatctctaagcacacagcacttgccccctgcctgtggagcccgacagctgtctaagcttaaaagattcctgaccacgttgcaacagtttggaagcgacatctctccagagattggggagcgggtaaggactctggtgctcggccttgtgaactcaactttaactattgaggagttccatagtaaactgcaggaggcaacgaacttccctctgcgtccttttgtgatacctttcctaaaggcaaacttgcccctgctgcaacgggagctcctgcactgtgctcgccttgcaaagcagaccccagcccagtatctcgcccagcatgagcaacttctactggatgcatcggcctcttcgcccattgactctagtgaactcttgctggaggtgaatgaaaatggaaagcgccgtacaccagaccgtactaaagaaaacggctctgatcgcgatcccttgcaccctgaaaggtacagccctagcaacgggccacctcagccaactcccccaccccactatcggctggaggatatcgcaatggcccatcacttcagagatgcctatcgtcatcccgatccacgggagctgcgggaacgacacagaccattagtggtgcctggttctagacaggaagaagtgattgaccacaagctgacagagagggagtgggctgaagaatggaaacatctcaataacctactgaactgcattatggacatggtggaaaagaccagaagatcattgaccgttctgcggagatgccaagaagccgaccgggaagaactgaaccactgggcgcgtaggtactcagatgccgaagatactaagaaaggcccagcccctgcggcagcacgacctagatcctcctccgccggaccagaggggcctcagctggacgtgcctagggaattcttgccgcgaaccttgacgggatatgtgcccgaggacatctggagaaaagcggaggaagccgtcaatgaggtgaaacgtcaggcaatgtcggaattgcagaaggccgtcagtgatgctgagcgcaaggcccatgaactgattaccacagaacgagctaagatggaaagagctttagccgaagccaaaagacaggccagcgaagacgccttaaccgttatcaaccagcaggaagattcttccgagagctgctggaactgtgggcgaaaagctagtgagacatgcagtgggtgcaatgccgctagatattgtgggtctttttgccagcatagagattgggagaaacatcaccacgtctgcggacagtccctccagggcccaacagcagtggtggccgaccccgttcccggtccccctgaggccgctcattccttgggacctagtcttcccgtaggcgctgcatccccttctgaggctgggagtgctggtccgtcccgcccaggctctcctagccccccaggtccactggacaccgtgcctcgctag

SEQ ID NO: 219253 - DNA, 1734 bp, synthetic construct
  misc_feature 1..1734: note = Description of Artificial Sequence: Synthetic coding sequence
  source 1..1734: mol_type = other DNA
atgcccgcatcaaggctgcgcgaccgtgcggcatcctcagccagcggttcgacatgtggctccatgtctcagacacatcctgtgttggaaagtggtctgctcgcaagcgccggatgctctgccccacgcggacccagaaagggaggccctgtaatgaatggttcttcccacagccccaccgctattaacggcgctccatgtacacctaatggcttcagcaatggacccgctacttccagtaccgctagcctgtccactcaacatctgcctccggcatgcggcgctcgccaactctctaagctgaaacgctttctgacaaccctgcaacagtttggttcggacatttcgcctgaaattggtgaacgtgttcggacgttggtcttggggctcgtcaatagtactctcaccattgaagaatttcatagtaaacttcaggaagctacaaatttccccctaagaccattcgtgatcccatttctgaaggccaatttaccacttctccaacgcgagctgttacactgtgcaagactcgccaagcaaaccccggctcagtatcttgcccagcacgagcagctgctgctcgacgccagcgcaagcagccctatcgatagctccgaactcctccttgaggtcaacgaaaacggcaaacgaaggacccctgatcgaaccaaggaaaacggatccgacagggatccactacacccagagcatctcagtaagcggccatgcacccttaatcccgctcaaaggtactctccctccaacggccctcctcaaccgactcctccacctcactaccgcctggaggatatagccatggcccaccactttcgtgatgcatacagacaccccgatcctagagagctgcgcgaacgtcacaggcctctggtagtccccggatcaaggcaggaagaggtgattgaccataaactgacagaacgggaatgggccgaagagtggaagcatcttaacaacttattaaactgcatcatggacatggtcgagaaaacaagacggtcactcaccgtcttacgacgatgccaagaggcagaccgtgaagagttgaatcactgggccagacgctattcagacgcagaggacacgaagaagggccctgctccagctgcagctagaccccgaagttcaagtgccggaccagagggccctcagcttgacgttcctcgagaattcttacccagaaccctaaccggatatgtgccagaagatatatggcgcaaggccgaagaagcagttaacgaggtgaagagacaggccatgtcagaactgcagaaggcagttagcgacgcagaacggaaggcacatgaactaatcacaaccgaacgcgctaagatggagagagcactagctgaggccaagcgccaagcctccgaggatgccctgaccgtgattaaccagcaggaagactccagcgaaagctgctggaactgcggacggaaagcaagcgaaacgtgtagcggttgtaacgctgcccgatattgcggtagtttttgccagcatcgggattgggagaaacatcaccacgtctgcggtcagtccttgcaaggacccacagcagtagttgcagaccctgtgccgggaccccctgaggcagcccatagcctgggtcctagcctaccagtgggggcagcgtcaccaagtgaagctgggtccgcaggtccctccagaccaggaagcccctcacctcccggtcctctggacacagtacctcggtag

SEQ ID NO: 219254 - DNA, 558 bp, synthetic construct
  misc_feature 1..558: note = Description of Artificial Sequence: Synthetic coding sequence
  source 1..558: mol_type = other DNA
atggcagcccagaaggatcagcaaaaagacgccgaggctgagggcctgtctggcacaacgctgttgccaaagctgataccctccggtgccggtagggaatggcttgaacgccgaagagctacgatccgcccttggagtaccttcgtcgaccaacagcggttttcccggccaaggaatctaggagaactgtgtcagaggctggtgcggaacgtcgagtactaccagtctaattacgtgttcgtctttctcggcttgatcctatactgtgttgttaccagtccaatgctgctagtcgctctggcagtcttcttcggcgcatgttatatcctctacctgcgcactctggagtctaagcttgtcctcttcggcagagaagttagccctgctcaccagtacgcattggcaggcggaatatccttccccttcttctggctggcgggtgcagggagcgccgttttctgggtgcttggggcaactctggtcgttataggcagtcatgctgcgtttcaccagatcgaggccgtggacggggaggaactgcaaatggaacctgtctag

SEQ ID NO: 219255 - DNA, 3147 bp, synthetic construct
  misc_feature 1..3147: note = Description of Artificial Sequence: Synthetic coding sequence
  source 1..3147: mol_type = other DNA
atgaaccgcttccgagtctccaaattccgccacactgaagctaggccaccaaggagagagagttggatctctgacatccgcgctggaacggcccctagctgtcggaatcacataaagtcttcatgtagtttaatcgctttcaacagcgacaggcctggcgtgcttggcattgtgcctctgcagggccagggcgaggacaaacggagagtggcccacctcggctgccacagcgaccttgtcactgacctcgacttctccccgtttgatgatttcctgctggcaaccggatcagccgaccggacagtgaaactctggaggctgcccggaccaggtcaagctctccctagtgcaccaggcgtggtgttaggcccagaggacctgccagttgaggttcttcagttccatccgacgtcagacggcattttagtttctgcagccggaacaacagtcaaagtgtgggacgcagctaagcagcaacctttgacagaactcgccgctcatggcgatttggtccaaagtgcagtatggtccagagatggagctctcgtgggcacagcgtgcaaggacaaacaactgagaatctttgacccacgaaccaagcccagggcaagtcagtccacgcaggcccacgaaaatagtcgggactctagattggcttggatgggtacgtgggaacatttggtgtccactgggtttaatcagatgcgcgagagggaagtgaagctctgggatacacgtttcttttcctcagctctagccagcctgaccttagatactagccttggttgcctggtacccctgttggacccggacagcggcctactggtactcgccggaaaaggggagagacaactgtactgttacgaagtggttccgcagcaacctgccctcagtccagtcacacaatgtgtcctagaatccgtactgcggggagcagcgctcgtgcctaggcaggcactggctgtcatgtcatgcgaggtacttagggttctgcaactttctgataccgcgattgtaccaatcggttatcacgtcccacggaaggcagtcgagtttcacgaagaccttttccctgacacagctggatgtgtcccagctaccgatccccactcctggtgggccggtgacaatcagcaggtccaaaaagtgagcctgaatccagcctgcagacctcaccccagcttcacgtcctgccttgttcccccagccgaaccgctaccagacacagcccagccagctgtcatggaaacacccgtaggagatgctgatgcttccgagggattttcgtcccccccaagttccctcaccagtccttctacaccttcgtcccttggcccatcactctccagtacgtccggcatcgggacctcgccatctctgcgtagcttgcagagtctcctggggcctagctccaaattccgccacgcgcaaggaaccgttctgcacagggactctcacatcaccaatctcaagggactcaatcttaccactcctggcgaaagtgacggattttgcgcaaataagctgagagtcgccgtacctttgttatccagtgggggacaggttgcagtgctggagctccggaagcccggacgtttaccagatactgccctgccgactcttcagaatggcgcagcggtaacagacctcgcatgggacccgtttgacccacatcgcctggctgtggctggtgaggatgcaaggattcgtctttggagggtgcctgcagagggacttgaggaggtcctcaccactcctgagaccgtgctcactggccatacagaaaagatttgtagccttagattccaccctctggctgccaacgtgttggcgtcatctagctacgacttaactgtcaggatttgggatctccaagccggtgccgatcgtctcaagctgcagggccaccaagaccagatcttctccctagcttggtctccagatggccaacagctggccacagtatgcaaggacggtcgcgtgcgcgtgtacagaccgcgatcaggtcctgaacccctgcaagaaggaccgggaccgaagggaggcagaggcgctagaattgtgtgggtctgtgacggaagatgtctattggtgagcggctttgacagtcagtctgagcgccaactccttctgtacgaagcagaagccttagctggagggcctttagccgtgctcggcctggatgttgcaccctcaacgcttctcccctcatacgatcccgatactggactggtcctgctgaccggaaagggtgatactagggttttcctgtatgaattgctgccagaatctcctttcttcttagagtgcaactccttcacttcccctgatccgcacaagggactggtgctgttgcccaagaccgaatgtgacgttcgagaggtggagctaatgcggtgccttcgccttcgtcagagctcactcgaacctgttgcttttagactgcccagagtgcggaaagagttctttcaggatgatgtcttccccgatacagccgtgatctgggagccagtcctctccgctgaggcttggctgcagggcgctaacggccagccgtggctcctgtccttgcagccaccagatatgtcacctgtcagccaagcaccaagggaggctccggctcggagggctcctagtagcgcacagtacctggaagagaaaagcgatcagcagaaaaaagaggagttactgaatgccatggtggctaaactggggaacagagaggatcctctgccacaagactctttcgagggcgttgacgaggacgagtgggctaaataccttgcccaaatcatagtaatgggagtccaagtggtaggtcgtgcatttgccagagcgctgaggcaggagttcgcagccagtcgggcagctgccgatgccaggggacgggcaggccatcgaagcgcagcagcttccaatctgtcagggctttcactccaggaggcccagcagattctcaacgtgagtaaattatcccctgaggaggttcagaagaactatgagcacttatttaaagtgaatgacaagtccgtgggtggatccttttatctgcagagcaaggtcgtcagagccaaggagcgcctggatgaagaattgaaaattcaggcacaggaagatagagagaaagggcagatgccccacacctag

SEQ ID NO: 219256 - DNA, 2778 bp, synthetic construct
  misc_feature 1..2778: note = Description of Artificial Sequence: Synthetic coding sequence
  source 1..2778: mol_type = other DNA
atgaaccgttttagggtgtcgaagttccggcatacagaggccagaccgccacgccgagagtcgtggatctctgacattcgagcagggactgctcccagttgccggaaccatatcaagagctcatgttctttaatcgcatttaactccgacagacctggagtcctgggcattgtgcctctccaagggcagggcgaggacaaacgccgtgtagcccacctggggtgtcactctgacctggtaacggacttggacttttccccctttgatgactttcttttggccacaggcagcgccgatcgaaccgtcaagctttggcgactgcccggaccgggtcaggctttgccgtcagctcccggtgtggtcttgggcccagaagatctcccagtggaggtcctgcaatttcaccctaccagtgatggcatcctggtgtcggcagctggcactactgtgaaagtgtgggatgccgctaaacagcaacccctgactgagctggccgctcatggggacctggtccagtccgcagtttggagtcgcgatggcgcacttgtcggcaccgcctgtaaagacaagcagctcaggatattcgacccacgcacaaaacctcgcgcttcccaaagcacacaggcccacgagaatagtcgggatagcagacttgcatggatgggtacctgggagcatctggtgtccactggtttcaaccaaatgcgcgaacgcgaagtgaaactttgggatacgagattcttttcttccgccctggcttctttgacccttgacacgtccctcggctgcctcgtcccgttgctcgatcctgacagtgggctcctggtgctggccggaaagggagagcgccaactttactgttatgaagtcgtgcctcagcagccagctctgtcgcctgtgactcagtgcgtgctggagtctgttctgaggggggctgctttggttccacggcaggcacttgccgtcatgtcctgtgaggtgctgagagttctgcagctatctgataccgcaatcgtccctatcgggtatcacgtgccacggaaggccgtggaattccatgaggatctatttccagatactgctggatgtgtgcctgctactgatccccatagctggtgggccggagataaccagcaagtgcagaaagtctccctgaaccccgcatgccgaccccacccgagcttcaccagctgcctggtgccccctgccgagccacttccagacacagctcaacccgctgtcatggagaccccggtaggggatgccgatgcaagcgaggggttctcttccccaccctcctccctgacgagtcccagcaccccctcatccctgggaccaagcctgtcttcaacttctggtatcgggacatccccctccctgaggtccctccagtccctgctggggccaagctccaaattcagacacgctcaagggaccgtgctgcatagagactcccacatcaccaacctgaagggactgaatctgaccaccccaggtgaaagcgatggcttttgtgccaacaagctgcgggttgcagtccccctgctgagcagtggcggacaggttgctgtgttggagctccggaagccaggccgtttgcctgacaccgctctgcctacacttcagaatggggctgccgtcacagaccttgcttgggatccattcgacccccatcggctggctgtcgcgggtgaagatgcgagaattaggctgtggcgtgtccctgctgaagggttagaagaggtgctaaccacacccgaaaccgtgctcacggggcacacggagaaaatttgttccctcagattccacccactggcagccaatgtgctagcttcaagttcttatgacctgactgtgaggatttgggatctgcaggccggtgcagataggcttaagttgcagggacaccaggaccaaatttttagcctggcatggagtccggacgggcagcagctggccaccgtctgcaaggacggtcgggtcagggtgtatcgcccacgctccggccctgagcctctccaggagggtccaggccctaaagggggaagaggagccaggatcgtgtgggtgtgtgacggcagatgtctgctggtctcagggtttgactctcagtccgagaggcaactgctgttgtacgaagccgaagcactggcgggagggcctctggctgtgttggggcttgatgtagcgccatcgactttactacctagttatgacccggacaccgggctggtcctgctgaccgggaagggagatacgcgggtgtttctgtacgaactactgccagagtctccctttttcctggagtgcaatagcttcacttcacccgatccccataaagggctagtactgttgccaaagacggagtgcgacgtacgggaagtggaattgatgaggtgccttaggctaaggcagagttccctggagccagtcgctttccgtctacccagggttagaaaagaattctttcaggacgatgtgttccctgacacggctgttatatgggaacctgtgttgtctgccgaggcgtggctgcagggcgctaacggccagccctggctgctgagtttgcagcctcccgatatgagtcccgtgagtcaggccccacgcgaggccccagccaggcgggctccctcttctgcccagtacctggaagagaaaagcgaccagcaaaagaaggaggagctgttaaacgccatggttgccaagctaggcaatcgcgaggacccgctgccccaggactccttcgaaggcgttgacgaggacgagtgggattag

SEQ ID NO: 219257 - DNA, 1104 bp, synthetic construct
  misc_feature 1..1104: note = Description of Artificial Sequence: Synthetic coding sequence
  source 1..1104: mol_type = other DNA
atgaaccgtttccgcgtgagtaagttccggcatactgaagcaagacctccgcgacgcgaggacaaacagctgagaatttttgaccctcgtaccaagccacgggctagccagtccactcaagcgcatgagaacagcagagacagtcgacttgcctggatgggcacctgggagcaccttgtgagcactggctttaaccagatgcgcgaacgggaggtgaaactttgggacacaagatttttcagcagcgcactggccagcctcaccctggacacctctctaggttgcctggtccccctgctggatccagattctggcctgttggtattggctggcaaaggagaaaggcagctttactgttatgaggtcgtgccgcagcaacccgcacttagccccgttacgcagtgcgtcctggaatcagtactgcggggtgcagccttagtgcccaggcaggccttggccgttatgtcatgtgaagttctcagggttctgcaactttcagacaccgcaatagtgcctattgggtatcacgttcctcgaaaggcggtcgaattccatgaggatctattcccggatacagcgggatgtgttccggctaccgacccccattcttggtgggctggggataaccagcaagtacagaaggtgtcccttaatcccgcttgtaggccacatcccagtttcacttcctgtctggtgccacccgcagagccactgccagatactgcgcagccggcagtgatggagacaccggttggggacgctgacgcgtccgaagggttctcatcccctccttcaagcctgacctccccctcgacaccaagttcacttggaccatccttgtcaagcacctctggaataggcacgtctccgtcacttcgcagcctccagagccttctagggccttccagcaagttccggcatgcacaaggcactgtgctgcacagagactcccacatcaccaaccttaagggcctgaatttaacaacacccggagagtctgacggcttctgcgccaataagttacgagtcgcagtgcctctgctgtctagcgggggtcaggtggctgtgttggaaatgcgtgaaaagcgccacagagaggtgtag

SEQ ID NO: 219258 - DNA, 2523 bp, synthetic construct
  misc_feature 1..2523: note = Description of Artificial Sequence: Synthetic coding sequence
  source 1..2523: mol_type = other DNA
atgaaccggttcagggtaagcaagttccgccacaccgaagcacgtcctccacgtcgcgaatcctggatatcagatatcagagcaggaacggccccatcatgccgtaatcatattaagtcctcctgctccttgatcgcctttaactcagatcggcctggggtcttggggattgtacccctgcaggggcagggagaggacaagcgacgcgtcgcccacttaggctgtcactctgaactcgccgcacacggggatttggtgcagtcagccgtgtggtcacgcgatggcgctttggtggggacagcgtgcaaggacaagcaactcagaatttttgatccccgaacaaagccacgcgcaagccaaagtactcaggcacacgaaaattcccgcgattcacgtctcgcctggatggggacctgggaacacctggtctctacagggtttaaccagatgcgtgaaagagaagttaagctgtgggacacgcgattcttcagttccgcccttgcctctcttaccttggacacatccctgggctgcctggtgcctctgttagacccagatagcgggcttctggttctcgcagggaagggagagagacagctatattgctacgaggttgttccacagcaacccgctttatcaccagtcacccagtgtgtgctcgagagcgttctgagaggggcagctctcgttcctagacaggccctggccgtgatgtcttgcgaggtactgagggttctccagctctctgacactgcaattgtccccatcggatatcacgtgcctcgaaaggcggtggagttccacgaggatttgtttcctgatacagccggttgcgtgcctgctaccgatccccactcgtggtgggccggagataatcagcaggtgcagaaagtctccctcaaccctgcctgtcgcccacatccatcattcacatcttgtctggttccgccagccgaaccactgcccgacactgcacaacccgctgttatggagacccccgtaggtgacgcagatgcaagtgaggggttcagtagcccaccatcgtccctcacctccccctcgacaccatcaagcttgggaccaagcctgtctagtacgtccggcattggcacctcgcctagcctcaggagtctccagagtctacttgggcctagcagcaaattccgtcatgcccaagggacggtcttacaccgtgattctcatatcaccaatctcaaaggcctgaacctgacaacccccggagagtctgacggattttgcgcgaacaagctgagagttgcggtccccctcctctctagtggaggtcaggtggccgtgttggagctgcgaaagccaggaagattgcccgatacggccctgcccacactgcagaacggcgcagctgtcaccgatttggcttgggatccttttgacccacataggctggctgttgccggagaagatgcaagaatacgcttatggcgggtgccagctgaaggtctcgaggaagtgctgaccacacctgaaacggtgttgaccggccataccgaaaagatatgctctcttcgtttccaccccctcgccgcaaatgtgctcgccagcagttcctacgatttgaccgtccgtatttgggacctacaggctggagctgaccggctgaaacttcagggtcatcaggatcagatttttagcttggcttggagcccagacgggcagcagcttgccacagtatgtaaggacggcagggtgcgggtgtaccgcccaagatcaggcccagaaccgttgcaagagggcccaggaccaaaaggaggccgaggggctcgcattgtgtgggtgtgtgacgggcgatgcctcctcgtgtccggtttcgactctcagtctgaacggcagttacttctttatgaagctgaagcgcttgccggaggccctttagcagtgctgggcttagacgtagccccatctaccctcctcccaagctacgaccctgatactgggctagtgctcctgacaggcaagggagatacaagggtgttcctgtatgaactcctgccagaatcacccttcttcctggaatgcaactcatttacatcaccagaccctcacaagggcctcgttctcctgcccaaaacagagtgcgacgtgagggaggtcgaacttatgagatgccttaggctgcgacaatcctcactcgaacctgttgcatttcgtctgccacgtgtgcgaaaggagttcttccaggacgatgtgtttccagataccgccgtgatttgggaacccgtcctgagcgcggaagcttggctacagggggctaacggccaaccctggttactgagccttcagcctccagacatgtcacctgtttcccaggctcctcgggaagcccctgctcggagggcaccgagtagcgcgcagtacctcgaagaaaaaagcgatcagcaaaaaaaggaggaacttctgaatgctatggtcgccaagctcggaaacagggaggacccactgccccaggattctttcgaaggggtcgacgaggacgagtgggactag

SEQ ID NO: 219259 - DNA, 2118 bp, synthetic construct
  misc_feature 1..2118: note = Description of Artificial Sequence: Synthetic coding sequence
  source 1..2118: mol_type = other DNA
atgggcacttgggagcatctcgtgtctactggcttcaatcagatgcgggagagggaggtcaaactgtgggacacccgcttttttagcagcgcactggcctccctgactctcgatacgtcgttgggctgcttagtgcccctgttggaccccgactccggacttcttgttctggccggtaagggtgagaggcagctttattgttatgaagtggtgcctcaacagcctgcattgtctccggtgacacaatgcgtgctggagtccgtcctgagaggcgcagcactggttcccaggcaggctctggccgtgatgagctgcgaagttctgcgcgttcttcagctcagcgataccgcaatcgtgcctattggctaccacgtcccaagaaaagctgtggaatttcacgaggacctgtttcccgataccgcaggatgtgtgcctgcgaccgatcctcactcttggtgggccggtgacaaccagcaagtgcagaaggttagtctgaatccagcatgtcggcctcacccttctttcacatcctgtttggtgcctcccgcagaacccttaccagacactgcccagccagcagttatggagacgcctgtcggtgacgctgacgcttcggaaggattcagcagccctccatcgtcattgacatcccctagcacgccctccagtctgggcccaagtttgtcatcaacttccggcatcgggacttctccctcactgaggtctttgcagtccctgctcgggccatcctcgaagttcaggcacgcccagggaacagtgctgcaccgggactcacacatcacaaatctgaagggtttgaatcttaccacacctggcgagagcgacggtttttgcgcaaataagctccgcgtggccgttccactgctttcttcaggaggccaggtggcagtgctggaattacgtaagcccggacgactcccagataccgctttgccaacacttcagaacggtgccgcagtcacagatctggcctgggatccattcgacccccatcgcctcgcagtggctggtgaggacgctcgtatcaggctgtggcgggtcccagcggagggcctggaggaagttctgactactcccgaaacagtccttaccggccacactgagaaaatctgttctctgagattccatccattggccgcaaacgtgctcgcctcatcttcctacgacctgaccgtgcggatttgggacctccaggcaggcgcagatcggctcaagctgcaaggccaccaagaccagatcttctcactggcttggagccccgacggacagcagctagcgactgtttgtaaggacggcagggtacgggtgtaccgaccccgatccgggcctgagccgctgcaagagggaccgggtcctaaaggcggacgcggagcacgaattgtgtgggtgtgtgatggcaggtgtctcctggtgtcgggcttcgactcacagagtgaaagacagcttctcctgtatgaagccgaggctctagcgggaggtcccctggctgttttgggacttgatgttgccccatccaccctgttgccctcatatgatcccgacaccggtttagtgctgttaacaggcaaaggggacacaagggtattcctgtatgagcttctgccagaaagcccctttttcctcgaatgtaattcgttcacttctcctgaccctcacaaagggttggtactgttgccaaaaaccgagtgcgacgtgagagaggtagaacttatgagatgtttgcgccttcgccaaagcagtctggagcccgtcgcgttccgcctgccgagggttcgcaaagaatttttccaggatgacgtgtttccagataccgcggtcatctgggagcctgttctgagcgcagaggcttggttacaaggggctaatggccagccctggctcctgagccttcagcccccagacatgtccccagtgagccaggcgcctcgcgaggccccagccaggcgagcacccagtagtgcccagtacttggaggaaaagagcgaccagcagaaaaaagaggagttgctgaatgctatggttgccaagctgggcaaccgcgaagacccattaccccaggactcatttgagggggtagatgaggacgaatgggactag

SEQ ID NO: 219260 - DNA, 1386 bp, synthetic construct
  misc_feature 1..1386: note = Description of Artificial Sequence: Synthetic coding sequence
  source 1..1386: mol_type = other DNA
atgtctcggcaagtggtcagatcttctaaatttcgccatgtctttgggcagcccgcaaaggcagaccagtgttacgaggacgtcagagtgagtcagaccacctgggatagtggcttttgtgctgtgaacccaaaattcgtcgccctgatatgtgaagctagcggtggcggtgcgtttttggtactgccgctgggaaagactgggagggtcgataagaacgcccctacagtctgtgggcatacagcgcctgtgcttgacatcgcatggtgcccccataatgacaacgtaatcgcttcgggctccgaagactgtactgtgatggtctgggagattccagacggcggattgatgctgcctcttcgcgagcccgttgtgaccctcgaaggccacaccaagagagtagggattgttgcctggcacaccacagcccaaaatgtcctcctgtctgccggatgtgacaatgtcattatggtatgggatgtcggaactggcgctgctatgctgacacttggaccggaagtgcaccccgataccatctattctgtggattggtcacgtgacggtggactaatctgtacgagctgcagggacaaacgcgttcgcatcattgagcctagaaagggaacggtggtggctgaaaaagaccgccctcacgaagggacaaggcctgtccgcgctgttttcgtgtcagagggcaagattcttactacaggcttctcaagaatgtccgagcgtcaggtcgctttatgggacaccaagcatctggaagaaccacttagcctgcaagagttggacacaagctccggagtactgttgcccttttttgatcctgataccaatatcgtgtacctgtgcggaaagggagattctagcattcgctatttcgaaattactagtgaggcaccgtttctacactacctgtcaatgttttccagtaaagagtctcaaagaggaatgggctacatgcccaagagggggctcgaggtgaacaaatgcgagatcgctcgattctacaagcttcatgaacgcagatgcgagcctattgctatgaccgttcctcgaaagagcgacctgtttcaggaggacctctacccccctactgccggtccggacccagccttaactgccgaagaatggctaggcggacgggacgcaggacctctgctgatctctctaaaagacgggtacgtgcctccaaagtcacgagaattgagggttaatcgaggacttgataccggacgcaggagagccgctccggaggctagtggtaccccctcttccgatgcggtgtctcgcctggaggaggaaatgaggaagttgcaggccactgtgcaggaactccagaaaaggctggaccgtctggaggagactgtgcaggctaaatag

SEQ ID NO: 219261 - DNA, 1443 bp, synthetic construct
  misc_feature 1..1443: note = Description of Artificial Sequence: Synthetic coding sequence
  source 1..1443: mol_type = other DNA
atgacagtcacaaagatgtcatggcgccctcagtatagaagctccaagttccgcaacgtgtatggcaaagtggccaatagggagcattgcttcgatggaatcccgattaccaaaaatgttcatgacaatcatttctgtgctgtgaacaccaggtttctggccattgtcacagaaagtgccggtggcggtagttttctggtgattcccctcgagcagacgggcagaatcgaacctaattacccgaaagtctgcggtcaccagggaaacgttctcgacattaagtggaacccatttattgataatatcatagcctcttgttccgaggatacgtcggtgcgaatatgggaaatacccgagggcggactcaagcgcaacatgaccgaagccctgctcgaacttcacggccattccagaagggttgggctggttgaatggcatccaactacaaacaatatcctgttttctgccggttacgactataaagtgcttatttggaatctcgatgtcggcgaacctgtcaagatgattgattgccatacagatgttatcttgtgcatgagctttaataccgacggcagcctcctcactactacttgtaaggataaaaaactgcgcgtgatcgagccaagatctggcagagtgctgcaggaggccaattgcaagaaccatcgagtaaaccgtgttgtgtttttaggaaatatgaagcgactgctgaccactggcgtttcccgatggaataccagacagatcgctctctgggaccaggaggacctcagtatgccattgattgaagaggagatcgacggcctgtcaggtctcctctttccattttacgatgcggatacccacatgttatacttagcaggtaagggagacggtaacatccgttactatgaaatttcaaccgaaaagccctatctttcatacctaatggaattccggagtccagccccacagaaaggactgggcgtgatgccaaagcacggcctggatgtgtctgcatgcgaagtatttcggttttataagcttgtgaccctcaaaggcctaatcgagccaatctccatgattgtgcctcgccgttccgatagctatcaggaagacatttatcccatgacacccggaactgaacctgctctcactcctgatgagtggctggggggaattaatcgagatccagtgcttatgagtttaaaggagggctacaagaagtcctccaagatggtatttaaggctcctattaaggagaaaaagagtgtcgttgtgaatggcatcgatctgctggaaaacgttccacctagaacagagaatgagctgttgagaatgttctttagacagcaggatgagatacgcagactgaaagaggaattggcccagaaggatatccgcatacgacagttgcagttagaattaaaaaatctacgcaactcgcccaagaattgctag

SEQ ID NO: 219262 - DNA, 1269 bp, synthetic construct
  misc_feature 1..1269: note = Description of Artificial Sequence: Synthetic coding sequence
  source 1..1269: mol_type = other DNA
atgctcgatctagaagtggtcccagaaagaagcctgggaaacgaacagtgggaattcacgctgggcatgcctctggcacaagctgtggctatcctgcagaagcactgcagaattataaaaaatgtccaggtcttatacagcgagcaatctccactgagtcacgaccttatcttaaacctgactcaggacgggatcaagcttatgtttgatgctttcaaccagaggctgaaggtgatcgaggtctgcgatctgacaaaggtgaagctcaagtattgtggtgtccatttcaattcgcaggccattgcaccaactatcgaacaaatcgaccaatcttttggtgcgacacacccgggagtgtacaactctgcggaacagttatttcacctgaattttcgtggcttgtctttctctttccagctggactcatggactgaggcgcctaaatacgaacccaacttcgcgcacgggctggcctctttgcaaatcccgcatggggcaacagtgaaaaggatgtatatctattccgggaacagcctgcaggacaccaaggcacctatgatgccactgtcttgcttcctcgggaacgtttacgcggaatcagtagatgtcctgagggacggaacagggccagccggattgcgccttcgactcctagcggctggctgtggtccgggtctcctggccgatgctaagatgagagtttttgagcgttccgtctattttggtgacagctgtcaggatgtgctttctatgctgggctctccccacaaggtattctataaatcagaagacaagatgaagatacactcaccatcacctcacaagcaagtcccaagcaaatgtaacgattatttctttaattacttcactctgggagtggacatcctcttcgacgctaatacccacaaagtcaagaaatttgtgctgcacacaaactacccaggccattacaatttcaatatttaccacagatgcgagtttaaaatccccctggccatcaaaaaggagaacgcagacggccagaccgagacctgtaccacttacagcaagtgggacaacattcaagaactgctcggccatcccgtcgagaagcctgtagtcctacatcgatcatctagccccaacaatacgaacccgttcgggtctactttctgctttgggctgcagagaatgatttttgaggtcatgcagaacaaccacatcgcctccgtgacactgtatggcccaccaaggcctggttcccatctgagaaccgcggaactgccctag

SEQ ID NO: 219263 - DNA, 1470 bp, synthetic construct
  misc_feature 1..1470: note = Description of Artificial Sequence: Synthetic coding sequence
  source 1..1470: mol_type = other DNA
atgtcttttagaaaggtggttcggcagtccaagtttcggcacgtctttggtcagcccgtcaagaatgatcaatgctacgaagacatccgggtctcacgtgtgacctgggactcaacattctgtgccgtaaatccaaagtttcttgcggttatagtggaagcctctggcggaggagcttttcttgtgttacccttgagcaagacaggtagaatagacaaagcctaccctacagtctgtggccacactgggcctgtgcttgatatcgattggtgcccacataacgacgaagtaatcgcttctggtagcgaagattgcaccgtcatggtttggcagatccccgagaacggattgacctccccactgacagagccagtggtggtgctggaaggccacaccaaaagggtggggataattgcatggcatcctacagcacgcaatgtgctgctgtccgccggatgtgacaacgtggtactaatttggaacgtgggaacggccgaggagctgtacaggctggattctcttcacccagatctgatttacaacgtgagctggaatcataacggatcactcttctgcagcgcttgcaaggacaagtccgtacgcattatcgatcctcggaggggcaccctggtagccgagcgtgagaaggcacatgagggcgcaagacctatgcgcgctatttttctggccgacggaaaagtctttactacaggtttttcaaggatgtctgagaggcaactggccctttgggacccagagaacctcgaggagccaatggccttgcaggagctggacagcagcaacggggcactactgcccttttacgaccctgacactagcgtagtctacgtctgtggcaagggggacagctcgatcagatatttcgaaatcaccgaagaaccaccttacatccactttctgaacacttttacttctaaggaacctcagcgtggcatggggtccatgcccaagcgcggactggaggtctccaaatgtgagattgccagattctataaactccacgaacgtaagtgtgaacccatcgtcatgacagtgccccgtaaaagtgatttatttcaggacgacttgtatcccgacactgcgggacccgaggccgctctggaagctgaagagtgggtctctggcagagatgccgaccccatactgatctctctccgcgaggcatacgtaccttctaagcagagagacctaaagatatcccgtagaaatgtcctgtcggatagcaggcctgccatggcccctggctcatctcacctcggggcacccgcaagtacaacaacggcagctgacgccacccccagcgggagcctggcaagagccggagaggccggaaagttagaggaagtgatgcaggagctacgcgctctgagagccctggttaaagagcagggcgaccggatctgtcggctggaagaacaactcgggaggatggagaacggtgacgcttag

SEQ ID NO: 219264 - DNA, 864 bp, synthetic construct
  misc_feature 1..864: note = Description of Artificial Sequence: Synthetic coding sequence
  source 1..864: mol_type = other DNA
tgtttcctgctgcctagagggagagaccccgagcctccagaagccggtgctgctgcaccctgcgccccaggggctcccgacatgagcttccgcaaggtggttagacagagtaaatttagacatgtgtttgggcagccagtgaagaatgatcagtgttatgaggacatcagggtctccagagtaacctgggacagcacattttgcgctgtgaatcccaagttcctcgccgtgattgtggaggccagtggcggaggtgcgttcctggttttgccattatccaaaaccggcagaatcgataaggcttatcctaccgtgtgcggacatacaggacccgtactggacattgattggtgtcctcataacgatgaagtgattgcttccgggagcgaagattgtacagtgatggtgtggcaaatcccagaaaacggactaacaagccctctgaccgagcctgtggtagtgctggagggccacacaaagcgtgttgggatcatcgcctggcatcccaccgcccgtaacgtactcctgagtgcaggctgcgataatgtggtgctgatctggaacgtcggtacagctgaggagctgtatcgcctggactccctgcaccctgatctgatttataatgtgtcttggaatcataacggaagtctgttctgcagcgcttgcaaggacaaaagcgttagaattatcgatcctcggagaggtacactagtcgctgagagagaaaaggcccatgagggagcgcgaccgatgcgcgcaatttttctggcagacggaaaggtttttaccactgggttttctcgtatgagtgaaagacagttggcgctatgggaccccggagttcggagattttgtttggcctag

SEQ ID NO: 219265 - DNA, 1470 bp, synthetic construct
  misc_feature 1..1470: note = Description of Artificial Sequence: Synthetic coding sequence
  source 1..1470: mol_type = other DNA
atgtctttcagaaaggtcgtcagacagtccaagtttagacacgtgttcggccagcccgttaaaaatgaccaatgctacgaagacattcgagtgagccgggttacctgggatagtaccttttgtgctgtgaatcccaagttcctggctgtgatcgtagaggccagcggcggtggcgcattcctcgtgttgccgctttcaaaaaccggcaggattgacaaagcttatcccactgtgtgtggacataccggcccagtgttggatattgactggtgtccacacaatgacgaggtaattgccagcggaagcgaggactgcaccgtcatggtttggcaaattcctgagaacggactgacatcacctttaaccgagccagtggtggtcctggagggccacaccaagagggtaggaattatagcttggcatcctacagctcggaatgtattgctgagtgcgggttgcgacaacgttgtgctgatctggaacgtaggcacagccgaggaattgtacaggctggatagccttcaccctgacctgatctacaatgtgtcttggaaccacaacggaagtctcttctgttcagcttgcaaagataaatcagtgaggatcattgacccgaggcgaggtactcttgtggccgaacgggaaaaggcccacgaaggcgctaggccaatgcgcgctatattccttgccgatgggaaggtatttaccactgggttttccagaatgtcggagagacagctagcactgtgggaccctgagaatctagaagagcccatggctcttcaggaattggacagctcaaacggggctctcttgcccttctacgacccagacacaagcgtggtgtacgtctgcggcaaaggggacagttcaattcgttacttcgaaataaccgaggaacctccctatatccacttcctgaacacgtttacgagcaaggagccacagagaggcatgggaagcatgccaaagagaggattggaggtgtccaaatgcgaaatcgccaggttttacaaacttcacgaaagaaaatgtgagccaatagtaatgacagtcccgaggaaaagtgacttgtttcaggatgatttgtatcctgacacagccggtccggaagcagcgttggaggcagaggagtgggtgagcggcagggacgccgaccctatcctcataagcctcagagaagcttacgtcccttcaaaacaaagagacctgaagatctcgcggaggaatgtcctgtctgatagccgaccagctatggccccagggagcagccatttgggagctcccgcatccaccaccaccgctgcagacgctacccctagcggcagtttagcccgagcaggcgaggccggaaaattggaggaggtaatgcaggaactccgggctctccgtgcacttgtgaaagaacagggagaccgcatctgccgcttggaagaacagcttggaagaatggagaatggtgacgcctag

SEQ ID NO: 219266 - DNA, 870 bp, synthetic construct
  misc_feature 1..870: note = Description of Artificial Sequence: Synthetic coding sequence
  source 1..870: mol_type = other DNA
atgtccttccggaaggtggtacgccagagtaagtttaggcacgtattcggccagcctgtcaagaatgatcagtgctacgaggacatccgagtctcccgcgtcacttgggactctactttttgcgcagttaacccgaagtttctcgccgtaatcgtggaagcttcaggcggaggtgcctttttggtactgcccctgagcaaaaccgggagaatcgataaagcctatccaactgtatgcgggcatactggccctgtacttgacattgattggtgccctcataatgatgaggtcatcgcgtcagggtccgaggattgcacagttatggtttggcagatccctgagaatgggttgacttcccccttaactgaaccagtggtcgtgctcgagggccacaccaaaagggtgggcattattgcatggcacccaactgccaggaatgtgcttctgtccgccggatgcgacaacgtggtgctgatatggaacgttggtacagcggaggaattgtatagactcgacagcctgcatcccgatctcatctataacgttagttggaatcataacggcagtctcttttgctcagcctgcaaagataaatccgtgcgaatcatagatcctaggcggggtacactcgtagccgaaagggaaaaagcacacgagggcgcacgcccaatgagggcgattttcctagcagacgggaaggtgtttacaactggattctccagaatgtcagagcgccagctggctctgtgggaccctgtcagcggccagccggagggcgctaatctgaggctgggaccacatccaggacctggcaggcaggggagtccctgggggggtctgtggttcctggccagtctccccggaacgtag

SEQ ID NO: 219267 - DNA, 552 bp, synthetic construct
  misc_feature 1..552: note = Description of Artificial Sequence: Synthetic coding sequence
  source 1..552: mol_type = other DNA
atgtcattccggaaagtggtgcggcagtctaaattccgccatgtgttcggccagcccgttaaaaacgatcagtgttatgaggacatccgtgtttcgcgcgtaacctgggatagcaccttttgtgctgtcaatcctaagttcctggctgttattgtggaggccagcggaggcggagcctttctggttcttcctctgtctaaaaccgggagaattgataaggcatacccaactgtatgtggccataccggaccagtcctcgacattgactggtgtccccataacgatgaggtgattgcgtcagggagtgaggattgtactgtcatggtgtggcagattccagaaaatggactcacatctccgctaacagaacccgtagtagtgctggaaggccacaccaaaagagtgggcattatagcttggcatcctacggctcggaacgtcctcctctctgccggtctgcatcgtccccctttctgtgccccacctccgcacggccctctgcacactagccagcagcctttacaggggccacatgataaatgggagagttag

SEQ ID NO: 219268 - DNA, 1425 bp, synthetic construct
  misc_feature 1..1425: note = Description of Artificial Sequence: Synthetic coding sequence
  source 1..1425: mol_type = other DNA
atgaggagagtggtcaggcagagtaaatttaggcatgtttttgggcaagctgtgaaaaatgaccaatgctatgacgatatccgggtgagtcgtgttacctgggactccagtttctgtgccgtaaaccccagatttgtcgcaatcataatagaggcgagcgggggaggggcatttctcgttttgcctctgcacaagacgggcaggatcgataaatcataccctacagtttgtggccacactgggcctgttctcgacatagattggtgtccacacaacgaccaagtgatcgcttccggttccgaagactgcacagtgatggtgtggcagattcctgaaaatgggctgaccttgtctctgacagaacctgtggtaattctcgaagggcactccaagagggtcggcatcgtcgcttggcatcccaccgcgagaaatgtcttgctgagcgctggatgcgacaatgccattatcatctggaatgtaggcaccggggaagcgctaataaaccttgacgatatgcactcggatatgatctataatgtgagctggaaccgcaatggaagtctcatttgtacagcttctaaagacaaaaaagtccgcgtgatcgatcctcggaagcaggaaattgtggcagagaaagaaaaagcccatgaaggagccagacccatgcgtgccatcttcctggccgacggtaacgtgttcaccacaggcttttcaagaatgagcgaacgtcagctagcactgtggaatcctaaaaacatgcaggaaccaatcgcattgcacgagatggacacatccaatggtgtcctactgcctttttatgatccagatacttccattatctatttgtgtggcaaaggagatagctcaattcgatatttcgaaatcactgatgagtcaccgtacgtacactaccttaatacattctctagcaaagaaccacagaggggcatgggctacatgccgaagcgcggactagacgttaataaatgcgagatcgcccgtttttttaagctccacgagcggaaatgtgaacccatcattatgaccgtgccccgtaaaagtgatctgttccaggatgatttatatcccgatacggccggtccagaagccgctcttgaagctgaagaatggttcgaaggcaagaatgccgaccccattttaataagtttgaagcatggatacatcccaggaaagaaccgtgatctaaaggtcgtgaagaagaatatcttagattcaaaacctacagctaacaagaagtgtgacctgatttctattcctaaaaaaactacagacaccgcttctgttcagaatgaagccaagctggatgaaattctcaaggagatcaaaagcatcaaagataccatatgcaaccaggacgagaggatatccaagctagagcagcaaatggcaaagatcgctgcttag

SEQ ID NO: 219269 - DNA, 1584 bp, synthetic construct
  misc_feature 1..1584: note = Description of Artificial Sequence: Synthetic coding sequence
  source 1..1584: mol_type = other DNA
atgtatggtccaggctcgcagttagggaagagtgggaataattcctgggccaaggaaagggggtgctctattgcttgtcagggaagtttgaccagcgccaggttacacgccccaagcatcggcgaaaggccactcagtcacatgcggtggaaggacaccatgagacgcgtggtaaggcagtcaaagttccgccatgtgtttggtcaggcagtgaaaaacgatcagtgctacgatgatattcgagtcagccgggtcacttgggactccagcttctgcgctgtgaaccccagatttgttgcaatcataattgaggcttctggagggggtgcttttttggtgttacccctgcacaaaactggacgcattgacaaatcctacccgaccgtatgcgggcatactgggcctgtcctggacatcgattggtgtccccataatgaccaggttatcgcctctgggtcagaggattgcacggtaatggtgtggcagataccagagaatgggctgacactgtctctgacagagcctgtcgtcattcttgagggacacagcaaaagggtgggtatcgtcgcctggcacccaactgccagaaacgtgctgctcagcgccggatgcgataacgccataatcatctggaatgtcggtacaggagaagcattgattaatttggatgatatgcatagcgatatgatttataacgtaagctggaaccggaatggatctctcatttgtactgcatcaaaggacaagaaggttcgcgtcatcgatccacggaagcaggaaattgtggctgaaaaggagaaggctcacgaaggtgcccgtcccatgagagcaatattcctggccgatgggaacgtgtttactaccggtttctccagaatgtcagagcggcagctggccctgtggaacccaaagaatatgcaggagcctattgccctgcatgaaatggacacgagcaatggagtcctgctgccattctacgaccctgacaccagcattatttacctttgtgggaaaggcgatagtagcatcagatatttcgaaatcaccgatgaaagcccctacgtccactatctaaacactttctcaagcaaggaaccgcagcgcggaatggggtacatgcctaagcgcggacttgatgtgaataaatgcgagattgccagattttttaagttgcatgagagaaagtgtgaacccattataatgaccgtgccccgtaagagcgacttattccaggacgatctgtaccctgataccgccggtccagaagccgcactagaggccgaggagtggttcgaaggtaagaatgccgatccgattctgatctcactaaagcacgggtacatcccgggaaaaaatcgcgacttaaaagtggtgaaaaagaacatcctcgattctaagcctaccgccaacaagaaatgcgaccttatctctatccctaagaagaccaccgacaccgcttcggtccaaaatgaagccaagctggacgaaattctaaaggagatcaaaagcatcaaggacacaatttgtaatcaggatgaacgaatatccaagctagagcagcaaatggctaaaatagctgcttag

SEQ ID NO: 219270 - DNA, 1425 bp, synthetic construct
  misc_feature 1..1425: note = Description of Artificial Sequence: Synthetic coding sequence
  source 1..1425: mol_type = other DNA
atgcgacgtgttgtgcggcaaagcaagttccgccacgtgttcggccaggcagtaaagaatgatcagtgctacgacgatataagagtgtcacgtgtcacgtgggatagctcattctgtgcagtaaaccccaggttcgtggccataatcatcgaagcctccggaggcggagcttttcttgtactccctctacacaagacaggcagaattgataagtcctatccgactgtgtgtggacacactggaccagtcttagacatcgattggtgtccacacaacgatcaggtgatcgcttcgggaagcgaggactgcaccgttatggtgtggcagatccctgagaacggtctgaccctctctctcacagagcccgtcgtaatcttggaaggtcattcaaagcgcgtgggaatcgtggcatggcatcctacagcgcgaaacgtgctgttgagcgccggatgcgacaacgctataattatttggaacgtgggaacaggcgaggcgctgataaatcttgacgacatgcattcagacatgatttataatgtgagttggaatcgaaacggctcactaatctgcactgcgtctaaagacaaaaaagtccgggtaattgatcccagaaagcaagaaatcgtcgccgaaaaagagaaagcccatgaaggggctaggccaatgcgagcaatatttttggccgacggaaacgtctttaccactgggttcagcagaatgtcagagcggcagctggcgttatggaaccctaaaaatatgcaggagcctatcgctctccacgagatggacacatctaacggagtcctgctgcccttctatgacccagatactagcatcatctacctgtgcggcaaaggcgatagtagcatccggtatttcgaaattactgacgagagcccatatgtgcattatcttaacaccttctcgagcaaggagccgcagcggggtatggggtacatgcctaagaggggactggacgttaacaaatgtgagatcgccaggttcttcaaactgcacgagcggaagtgcgaaccgattattatgactgtacctcggaagagcgacttgtttcaggatgatctttaccctgacacagccggacccgaagctgccctggaggctgaggaatggtttgagggaaaaaatgccgacccaattcttattagcttgaaacacggctatattcccggaaagaaccgagatctgaaagttgtgaagaaaaacatcctggactccaaacccaccgcgaacaaaaagtgcgatctgatatcaatcccaaagaagaccactgacaccgcaagcgttcaaaatgaggctaagctcgacgagattctaaaagaaataaagtctataaaagacacgatctgcaaccaagatgagcgcatttccaaactggaacaacagatggcgaaaattgcagcttag

SEQ ID NO: 219271 - DNA, 489 bp, synthetic construct
  misc_feature 1..489: note = Description of Artificial Sequence: Synthetic coding sequence
  source 1..489: mol_type = other DNA
atgcggcgagtggttcgccaatcaaaattccggcacgtgtttggtcaggccgtgaaaaacgatcagtgttatgatgacatacgtgtgagcagagtcacttgggattcaagcttttgtgcggttaacccaaggttcgtcgctataattatcgaagcgagtggaggtggcgctttcctggtcttgccactgcataagactgggagaatcgataaaagttaccctaccgtgtgcggacatactggcccagtcctggatatcgactggtgtcctcacaatgatcaggtgattgccagcggctccgaggactgtactgtgatggtctggcagattccggaaaacggcctcaccctgagcctgaccgagccagtcgtcatcttggaaggtcatagcaagcgcgtcggtatcgtggcttggcatcctactgccaggaacgtgctccttagcgccggttgtgataatgccatcattatttggaacgtgggcacttag

SEQ ID NO: 219272 - DNA, 498 bp, synthetic construct
  misc_feature 1..498: note = Description of Artificial Sequence: Synthetic coding sequence
  source 1..498: mol_type = other DNA
tctaaagagccacagaggggtatggggtatatgccaaaaaggggcctggatgtgaacaagtgtgagatcgctaggttctttaagttacacgagaggaagtgcgaaccaatcatcatgaccgtacctcggaagtctgatctttttcaggatgacctctacccggacacggctgggcctgaagccgcattagaagcagaggaatggttcgaggggaagaacgctgacccaattcttatatctctcaaacatgggtatattccaggtaagaaccgcgatctaaaagtcgtaaagaagaatatactggatagcaagcctacagctaataagaagtgtgatttgatctcgatcccaaaaaagacgaccgataccgccagcgttcagaatgaagctaagctcgatgagatacttaaagagattaaaagcatcaaagacacaatttgcaaccaggatgagaggatttctaaattggaacagcagatggcaaagatcgctgcctag

SEQ ID NO: 219273 - DNA, 546 bp, synthetic construct
  misc_feature 1..546: note = Description of Artificial Sequence: Synthetic coding sequence
  source 1..546: mol_type = other DNA
atgaggagagtcgtccgacagtctaagtttagacacgtgtttggccaggctgtgaaaaatgatcaatgttacgacgatattcgtgtgtctagggtaacatgggattcctccttttgtgctgtgaaccctcgctttgttgctataatcattgaggcatccggcggaggtgccttcctggtactgccccttcataagacgggcaggatagacaagagctacccgaccgtgtgtggacatactggaccagtgctggatatcgactggtgcccacacaatgatcaggttatagcctcgggaagtgaagattgtactgtaatggtgtggcagattcctgaaaatggactgaccctgtcgctgacagaaccggtagtaatcttggagggtcacagcaagagagtgggtatagtggcctggcatccgaccgctaggaatgttctactgtccgccggatgcgataacgccatcatcatctggaatgtcggaacaggtgaagccctgataaatcttgacgatatgcacagtgatatgatatacaatgtctcctag

SEQ ID NO: 219274 - DNA, 1443 bp, synthetic construct
  misc_feature 1..1443: note = Description of Artificial Sequence: Synthetic coding sequence
  source 1..1443: mol_type = other DNA
atgcgctggaaagataccatgcgtcgagtggtccgccagagtaaattccgacacgtctttggccaggccgttaaaaatgaccagtgttacgacgacatcagggtgtccagggtaacttgggactcgagcttttgtgccgtcaatcctcgctttgtggctataatcatcgaggcgagcggcggtggcgcttttctcgtgctccccctgcacaagaccggcagaatcgacaaaagttatcctaccgtttgcggccatactgggcctgtattggacatcgactggtgtccgcacaatgaccaggtgatagcctctgggagtgaggattgtacagttatggtctggcagattccagagaatgggctcactctttctctgaccgagcccgttgtaattcttgaaggtcacagcaagcgggtggggatagtcgcttggcaccccaccgcacgcaatgtcctgctgtccgccggttgcgacaacgccattatcatttggaatgtcgggaccggggaggccctgattaacctcgacgatatgcatagcgacatgatctataacgtgtcttggaacagaaacggctccctgatctgcaccgcttctaaggataagaaagttagagtcatcgaccctagaaaacaggaaattgtggcagagaaggagaaggcgcacgaaggggcaagacccatgcgagccattttcctcgctgacggtaatgtctttaccaccggattttcccgcatgagcgagaggcagttggcattgtggaaccctaaaaacatgcaggaacccattgcactgcacgagatggatacgtctaacggcgtcctgttgcctttctacgaccctgatacatccatcatctacctgtgcggaaagggggattcctctattagatacttcgagataaccgacgagtctccttacgtgcattatctcaacaccttctcgtcaaaagaaccccagcggggtatgggttacatgccgaagaggggtttagatgtcaacaagtgtgagatcgccaggttctttaagctccacgagagaaaatgcgagcctatcatcatgaccgtgccaaggaaaagcgatttgttccaggatgatctataccctgacacagccggacccgaagccgctctggaggctgaagaatggttcgagggaaagaacgctgaccctattctgatcagcttaaagcatggatatatccctggcaaaaacagagacctaaaagtggttaagaagaatattttggatagtaaacccactgccaacaagaaatgcgacctgatatctattccaaagaaaacaaccgacacggcctccgttcagaacgaagccaaacttgacgaaattttgaaagagattaagtccattaaagataccatatgcaaccaggacgagagaatctccaaactggaacaacagatggcaaaaatcgccgcatag

SEQ ID NO: 219275 - DNA, 510 bp, synthetic construct
  misc_feature 1..510: note = Description of Artificial Sequence: Synthetic coding sequence
  source 1..510: mol_type = other DNA
atgcgcagggtcgtgaggcagagcaagtttagacatgtgttcggccaggcggtgaagaacgaccagtgttatgatgacattagggtgagccgtgtgacctgggactcttcattctgtgcagtgaaccctcggttcgtggcaataatcatcgaggcctcaggtggaggcgcttttctggtgcttcctctgcacaagacaggacgcatcgataaatcataccctaccgtctgcggccacacagggcctgtattggacattgattggtgtcctcataacgatcaggtcatcgctagtggcagtgaagactgtacagttatggtctggcagatcccagagaatggactgactctttctctgaccgaaccagtcgtgatcctggaagggcattccaagcgggtgggaatagtggcttggcaccccactgcgcgtaacgttttgctctctgcgggatgtgataatgctataatcatttggaatgtggggaccggggaagcccttatcaacctctag

SEQ ID NO: 219276 - DNA, 456 bp, synthetic construct
  misc_feature 1..456: note = Description of Artificial Sequence: Synthetic coding sequence
  source 1..456: mol_type = other DNA
atgaggagggtagtcaggcagtccaaatttcgccacgtgttcggacaggccgtcaagaatgatcaatgctatgatgatattagagtctcacgagttacttgggactcttcgttctgtgcggtgaatcccagatttgtggctattattatcgaggccagtggcggaggagcctttctcgttctccccctgcacaagactgggcgaattgataaatcatatcctaccgtctgtggacacactggccctgtcttggacattgactggtgtccacataatgatcaggtcattgctagcggcagcgaggactgtaccgtaatggtgtggcagattcctgagaacggcctgacactgagcctgaccgaaccggtggtgatactggagggccactctaaaagagttggcattgtcgcttggcaccccactgcacgaaatgtattgctgtctgccggtgggtag

SEQ ID NO: 219277 - DNA, 492 bp, synthetic construct
  misc_feature 1..492: note = Description of Artificial Sequence: Synthetic coding sequence
  source 1..492: mol_type = other DNA
atgagacgtgtggtccgccagagtaagttcagacatgtgtttggccaggctgtcaaaaacgaccagtgttatgatgacatccgggtttctagggttacatgggattcttctttctgcgccgtcaatcccagattcgtggcaattatcatcgaggcttcaggcggaggggcttttcttgtgctacctttacacaaaaccgggaggattgacaagtcttatccgactgtgtgtggacacaccggaccagtactggacatagactggtgcccacataacgatcaggttattgcatctggctcagaagattgcacagtgatggtgtggcagattccagaaaacggactgacgctgagtctaaccgagcctgtggtaattttggaggggcacagcaagagggttggaatcgtggcttggcaccctacagctaggaacgttctattgtctgcaggctgtgacaatgcaattatcatctggaatgtgggcaccggctag

SEQ ID NO: 219278 - DNA, 1578 bp, synthetic construct
  misc_feature 1..1578: note = Description of Artificial Sequence: Synthetic coding sequence
  source 1..1578: mol_type = other DNA
atgtcgtggcaccctcagtataggagctccaaatttcgccatgttttcggaaagcctgcaagcaaggagaactgctatgattccgtgccaatcactcgttcagtccacgataatcatttctgcgctgtgaacccccatttcatagccgtggtgaccgagtgcgccggaggaggagcctttttagttatcccattgcaccagactggcaagctggacccccactaccccaaagtctgcggccatcgcggaaatgtgctcgatgtcaagtggaatcccttcgatgacttcgaaattgcctcatgctctgaagacgctacaatcaagatctggtccatccctaaacagctattgacacggaatctgactgcgtacaggaaagaactggtggggcatgcgaggagagttggattagtggaatggcacccaactgcggcaaacatattgttcagcgcagggtacgattataaggtgatgatctggaacctggataccaaggagtctgttatcacctcccctatgtccacgatctcttgtcaccaggacgtcattctgagtatgtcctttaacactaacggctctctgcttgctactacttgcaaggatcgaaagattagagtgatagatcctagggccggaacagtcctgcaggaggcttcctataagggccatagagccagcaaggtactttttcttggtaatttgaaaaagctcatgagtactggcacctcacgatggaacaatagacaagtggctctgtgggatcaggacaatctgtccgtgccattgatggaggaggacctagacggaagcagcggagtgctgtttcctttttatgatgcagacacttccatgttatacgtggtgggtaagggtgacggcaatattaggtattacgaagtgtcagccgataaaccacatcttagttatctgaccgagtacaggtcttacaaccctcagaagggcataggtgtcatgcctaagcgaggtcttgacgtatcttcctgtgagatttttcggttctacaagctcatcaccaccaaatccttaatagagcctatctccatgatcgtccctaggcgctctgagtcgtaccaagaggacatatacccccctactgcaggggctcagccatctctgactgcgcaagagtggctctcgggcatgaatcgtgacccaatcttggtgagcctgagacctggaagcgaacttctgagaccccatccactgccggcagagcgccctatcttcaactcaatggctcccgcatctccacgattgctgaaccagacggagaaattggccgctgaggacggttggcgcagctcctccctgctggaggagaagatgccgaggtgggctgccgagcacaggttagaggagaagaagacctggcttaccaatgggttcgacgtgtttgaatgccctccccctaagactgagaacgaactgctgcaaatgttttaccgccagcaggaagagataagaagactgagggagttgctaacacagagagaggttcaggcaaagcagctggagctggaaattaagaacttacggatggggagtgaacagctctag

SEQ ID NO: 219279 - DNA, 1578 bp, synthetic construct
  misc_feature 1..1578: note = Description of Artificial Sequence: Synthetic coding sequence
  source 1..1578: mol_type = other DNA
atgtcttggcacccacagtatcgcagctctaagttccgacacgtgttcggcaaaccagcaagtaaggagaactgctacgattccgtgccgataacacgaagcgtacacgataatcatttttgcgccgtcaacccacacttcattgccgtggtcaccgagtgtgccggtggcggagcatttttggtgattccccttcatcagaccggaaagctggatccccactaccctaaggtttgtggccatcgcggaaacgtgctggatgtgaaatggaatccgttcgatgatttcgagatagcttcttgttctgaagacgcaacaatcaaaatttggtcaattccaaagcagctccttacacgaaatctaaccgcttaccggaaggaactcgtggggcatgccagaagggtggggctggtggagtggcacccaactgcagccaacatccttttcagtgctgggtatgattacaaggtgatgatttggaacctggatacgaaggagagcgtcataacctccccaatgagtacaatttcctgtcatcaagatgtgattctgtctatgtcttttaacacaaatgggtcactgttggctactacgtgcaaagaccgcaaaatccgtgtgattgatcctcgggctgggaccgtgctgcaggaagcttcatacaaaggccacagggcatctaaagtcctcttcctagggaaccttaagaagctaatgtctactgggaccagcagatggaataacaggcaggtggccctatgggatcaggacaacttgtcagtgcccttaatggaagaagatctcgatgggtcgagcggtgttctcttcccattttacgatgctgatacatcaatgttatacgttgtggggaaaggcgatggaaatattcggtattatgaagtcagtgctgataaaccacacctgtcttatcttacagaataccgatcttataacccccagaaggggattggcgtcatgccaaagcgcggactggacgtgtccagctgtgagatttttcggttctataagctgatcactaccaagagcctaatcgaacccatttctatgattgtgcccaggcgcagtgaaagctatcaggaagatatatacccacctacggctggggctcagccttcactcacagcccaggagtggcttagtgggatgaatcgggacccaatcctggtgtcattgcgcccaggctcagagctgctaagacctcaccccctgcctgcggagaggccaatattcaattcaatggccccagcatcacccagattgctcaaccaaaccgagaaattagcagccgaagacggctggagaagcagctctctgctggaggagaaaatgcccaggtgggcggcagagcaccgcctggaagagaagaagacttggctgacgaatggattcgacgttttcgagtgtcctcctcccaagaccgagaatgaactccttcagatgttttataggcagcaggaggagattaggaggcttcgtgaactactgacccagcgcgaggttcaagctaagcagctcgagctcgaaattaaaaaccttagaatggggtcagagcagctttag

SEQ ID NO: 219280 - DNA, 1443 bp, synthetic construct
  misc_feature 1..1443: note = Description of Artificial Sequence: Synthetic coding sequence
  source 1..1443: mol_type = other DNA
atgacggttaccaagatgtcctggagaccccaatacaggtcgagcaagttcagaaatgtatacgggaaagtggctaatagagagcactgctttgatggaatcccaattacgaaaaacgtgcacgacaatcacttctgtgcagtgaatactcgcttcctcgccattgtgactgaatctgcgggtgggggttcatttctggttatcccgctagaacagacagggagaattgagcccaactacccaaaagtatgcgggcaccagggaaatgtcctcgatatcaagtggaacccgttcatcgacaacataatcgcttcctgttccgaggacacctctgttaggatctgggaaattcctgaggggggtttgaaacgcaacatgaccgaggctctactagagctgcacggccactcgcgcagagtcggattagtggagtggcatcccactacaaataatattttgttcagtgcgggatacgattacaaggtgcttatctggaacctggacgtcggcgaaccggtgaaaatgattgattgccacactgacgtgattctgtgtatgtcttttaatacagacgggtcactgttgacaaccacgtgtaaagacaagaaactgcgtgtgattgagccaaggtccggtagggttctgcaagaagccaattgcaagaaccacagggtcaatagggtggtgtttttaggaaacatgaaaagactgctaacgacgggtgtttctcggtggaatacgagacagatagcactgtgggaccaggaagatctgagcatgccactgatcgaagaggagatcgatgggctgtccgggttgctatttcccttttacgatgcggatacacacatgttatacctggccggaaagggcgacggtaatattcggtactacgaaatctcaactgagaagccctatttgtcttacctgatggagtttcgcagcccagccccacagaaggggttgggcgtcatgccgaagcatgggctcgacgtctccgcctgcgaggtgttccgtttctacaagctggtaacactcaaggggctgattgaacccatcagcatgatcgtccctcgcagaagcgatagctatcaggaggacatttaccccatgaccccgggtaccgagcccgctctgactcctgacgagtggttggggggtatcaatagagaccccgtcctgatgtccctcaaggaggggtataagaaatcaagtaaaatggtgttcaaagcccctatcaaagaaaagaaaagtgtcgtggtgaacggcatagacctgcttgagaatgtgccccctcgtacggagaacgaactattacggatgttcttcaggcagcaggacgaaattcgcaggctgaaggaagaactcgcacagaaggacatccgcatccggcagctccagctggagcttaaaaacttacgtaactctcctaaaaactgctag

SEQ ID NO: 219281 - DNA, 1428 bp, synthetic construct
  misc_feature 1..1428: note = Description of Artificial Sequence: Synthetic coding sequence
  source 1..1428: mol_type = other DNA
atgtcctggaggccgcagtacagatcctctaagtttaggaacgtctatggcaaagtcgctaaccgcgagcactgcttcgatgggatcccaattaccaagaacgttcatgataatcatttttgtgccgtgaacactaggtttttggcaatagtgacagaaagcgctggaggcggatcatttctcgtgatccctctagagcagaccggcagaattgaacccaattatcccaaagtgtgtggtcaccagggtaatgtgctggatatcaagtggaacccattcattgacaacatcatcgcgtcatgttccgaggatacatccgttcgtatatgggagatccctgagggtggactcaagaggaacatgaccgaggctcttcttgaactccatggccacagtcgccgagtggggctcgtggagtggcatcccaccacgaataatattctgttctcggcagggtatgactataaggtgctaatctggaacctagatgtgggcgagcctgtcaagatgatcgattgccataccgatgtcatcttatgtatgagtttcaacactgacggctctctccttaccacaacctgcaaggataagaagcttcgagtcatagagccaaggtctggaagagttcttcaggaggctaattgcaaaaaccaccgggtgaatagagtggtctttttaggcaatatgaagagattactcaccaccggcgtcagtcggtggaacacgcgccaaatcgccctttgggaccaggaagatctgagtatgcctctgatagaggaagagattgatggcctgtccggcctcctgtttccattttacgacgccgatacacatatgctctacttggctgggaagggcgacggcaacatccgatactatgagattagtaccgagaaaccgtatctaagctacctcatggagtttcgaagtcccgctcctcagaaaggcctgggggtgatgccaaaacatgggctggacgtgagcgcttgcgaagtcttcagattttacaaattggttactctgaaggggcttattgaaccgatctccatgatcgtcccccgtaggtctgattcataccaagaagacatctacccaatgacccctggtactgaacctgccttgacacctgacgaatggctgggcggtataaacagagaccctgtgctgatgagcctgaaagaaggatataaaaagagctccaagatggtcttcaaggccccaatcaaagagaagaaatcagtcgtcgtcaacggcatcgacctgctggaaaacgttcccccaaggacggaaaatgaactcttgaggatgttctttcgtcagcaagacgagatcaggagactgaaagaagagttagcccagaaggatatcaggatcagacagctgcagctcgaactcaagaacctcaggaactcccctaagaattgctag

SEQ ID NO: 219282 - DNA, 1428 bp, synthetic construct
  misc_feature 1..1428: note = Description of Artificial Sequence: Synthetic coding sequence
  source 1..1428: mol_type = other DNA
atgtcatggcggcctcagtataggtcctccaagtttcggaacgtttacggaaaggttgctaatcgcgagcattgtttcgacggtattccaatcacaaaaaatgtccacgataatcatttttgcgccgttaatactaggtttttggcgattgtgacagagtctgccggaggcggaagcttcctcgtgatcccccttgaacagactggcaggatagaaccaaattaccctaaggtgtgcggccaccaggggaacgtgctggacattaagtggaacccctttatagacaatattatcgcgagctgctcagaggacacatctgtgcgaatctgggagattccagaagggggacttaaacgaaatatgaccgaagcattactggaactgcacgggcactcaagaagagtgggactggtcgaatggcatcccacaacaaataacatcctgttctcggctggctacgactacaaggtgttgatctggaacctggatgttggcgagccggtcaaaatgatcgattgccacaccgacgtgatactgtgcatgagctttaatactgatgggagcctgctgacaaccacttgtaaagataagaagctcagggttatagagccaaggtccggtcgagtgttgcaggaggccaattgcaaaaatcaccgggtgaatagagtggtgtttcttggcaatatgaagcgtctcttgacgaccggcgtcagtcggtggaacacacgccagattgccttgtgggatcaagaagacctttcaatgcctttgattgaagaagagattgacggtctatccggacttctgtttccgttctatgatgctgacacccacatgctgtaccttgccggaaagggggacggcaatattcgttattatgagatttccacagaaaaaccttacctaagctacctgatggaatttcggtccccggctcctcaaaaggggctaggggtgatgccaaaacatgggctcgacgtctctgcttgcgaggtgttccggttctacaagttggtgactctcaagggcctgatagagcccatttctatgatcgtgcctcgtcgcagtgattcttaccaggaagacatataccccatgaccccaggaactgaaccagccctgacccctgatgagtggctcggtggcataaaccgcgacccagtcctcatgtctttgaaggagggttacaagaagagctctaagatggtctttaaagctcccatcaaagagaagaaatctgtggttgtcaatggcatagatctgctagagaacgtccctccacggaccgagaacgagcttctgaggatgttcttccgccagcaagacgaaatccgccgtctcaaggaggagttggctcagaaggatattagaatccgccagctgcaactggaacttaaaaacctgcgcaattcccccaaaaattgttag

SEQ ID NO: 219283 - DNA, 4992 bp, synthetic construct
  misc_feature 1..4992: note = Description of Artificial Sequence: Synthetic coding sequence
  source 1..4992: mol_type = other DNA
atggcgacggatggcgcatcgtgtgagcccgatctttccagggccccagaagacgccgctggagcagctgctgaggcggcaaagaaagagttcgatgtggatactttaagcaagtcagagctacgtatgctgctgagcgtaatggagggtgagctggaggccagagatctggtcattgaggcactccgagcgaggcgaaaagaagttttcattcaggagcgctatgggaggttcaatctgaacgacccattcctggccctgcagcgagattatgaggcaggagccggtgacaaagagaaaaaacctgtctgtactaatccattgagcattctcgaagcggtcatggcacattgcaagaagatgcaggaaaggatgagcgctcaattggcggcagcagaaagcaggcaaaaaaaattggagatggaaaagctgcaactgcaggccctcgaacaagaacacaaaaaattagcagctcgtctggaggaggagaggggaaagaataagcaggtcgtgctgatgcttgtcaaggaatgcaaacagctcagcgggaaagttatcgaagaggcacaaaagctggaggacgttatggcgaagctggaggaggagaaaaagaagacaaatgaattggaggaggagttaagcgcagagaagagacgaagcaccgagatggaagcacagatggaaaagcagctgagtgagttcgacacagagcgggaacagctgcgggctaaactgaatcgtgaggaggcacatacgactgacctgaaagaagaaattgacaaaatgaggaagatgattgagcagctgaagcggggaagtgactctaagcccagtctgagtctgcctaggaagacgaaggatcgccgtcttgtcagcatcagcgttggaacagagggcacggtcaccaggtccgttgcatgccaaacagacctcgtgactgagaacgccgatcatatgaagaagttgccactgacaatgccggtaaagcccagcaccggctcccccctggtgagcgccaatgccaagggatccgtgtgtactagtgcaaccatggctcgcccaggaattgatcggcaggcttcatatggcgatctgatcggggctagcgtgcccgctttcccaccaccttccgccaacaaaatagaagaaaatgggccttctacaggatccacccccgaccctaccagttcaacgcccccacttccctccaacgctgccccacctactgctcagacccctggcatcgccccacaaaactctcaggcacctccaatgcacagtctgcatagtccttgcgccaatacttcccttcacccaggactgaatccccgtatccaggccgctagattccgatttcagggcaatgccaacgacccagaccagaacgggaataccacacagtcacctcctagtagagacgtgtcacccaccagtcgggacaatctcgtggctaaacagctcgctagaaatacagtgactcaggcgttatcccgcttcacctcgccccaagccggagctccttctagaccgggagtgcccccaactggcgacgtaggtacacatcctccagttggacgcacaagcctgaagactcacggcgtggcccgtgtcgatcgtgggaatccaccacccattccccctaaaaagcctggcctgtcacagacaccttccccaccccaccctcagcttaaagttatcattgactcatctagggccagcaacaccggagccaaggtcgacaataagacagtagcctctaccccttcatctctgccccagggcaacagggtgatcaatgaggagaatttgcctaagtccagttcaccacagctgccacctaagccgagcatcgacctgacagtggcgcctgcgggatgcgccgtgtctgcactcgccactagtcaagtaggcgcttggccagccgcaacaccaggtctcaaccagcccgcatgcagtgactcctctcttgtgatccctactaccatagctttctgcagctccatcaacccagtgagcgcatccagctgtcgccctggcgcatccgatagtctactggtaacagcatctggttggtctccttctcttacacccctgttgatgagcggtggacctgcccctttagcaggcaggccgaccttgctacagcaagccgctgctcagggaaatgtcaccctgctctccatgctgctgaacgaggaaggcctggacatcaactattcctgcgaggatggccatagcgcattgtactccgcagccaaaaatggccatacggattgtgtgcgccttcttctatccgctgaggcccaggttaacgctgccgacaagaacggatttacccctctgtgcgctgcagctgcgcagggtcacttcgagtgtgtcgagctgcttatctcttacgacgcgaacatcaaccatgctgccgatggcggacaaacacctctgtacctcgcgtgcaaaaacggcaataaagagtgtatcaagctgctactggaagctggcactaaccggagcgtcaaaactactgatggttggacacctgtccatgccgcagttgataccggtaatgttgatagcttgaagctgcttatgtatcataggatcccggcacacggcaactcctttaacgaagaggaatccgaatctagtgtcttcgatctggatggtggcgaagaatccccggagggaatctctaagccagtcgtgccagccgacctgattaatcacgctaaccgtgagggctggacggctgcacatatcgccgctagcaaaggcttcaaaaactgccttgagatcctatgccgccacggtgggctagaacctgagagacgcgataaatgtaacaggaccgtccatgacgtcgctaccgacgactgtaagcacctgcttgagaatctcaatgcattaaagatcccgctcagaatctccgtcggcgaaatcgagccaagcaactacgggtccgatgaccttgaatgtgagaacaccatttgtgcacttaatattcgcaaacagacttcttgggacgacttcagtaaggccgtgtcgcaggccctgaccaatcatttccaagcaatctcatccgatggctggtggtcgctggaggatgttacctgcaacaacactacagacagcaacattggactcagtgctcgctccattaggtcaattacgttaggtaacgtcccctggagcgtggggcagtcttttgcccaatctccctgggatttcatgcgcaagaacaaggccgaacacatcactgtcttgttgagcggtcctcaagagggctgtctgtcctcagtcacctatgcctcaatgatccccctgcaaatgatgcagaactacttgaggcttgtggaacagtaccataatgtcatcttccacggcccagaaggttcattgcaggactacattgtgcaccaattggctctgtgtctgaaacaccggcagatggccgcaggatttagttgcgaaattgtccgggctgaggtcgacgccggtttttcaaaagaacaacttctggatttattcatctccagcgcctgtcttatcccagtcaagcagagccccagcaagaagaaaataattattattctggagaacctcgaaaaatcttctttgtcagagctcttgcgcgacttccttgctcccctcgagaataggtccaccgaaagtccatgcacctttcagaagggcaacgggctgtcagaatgctactatttccacgagaactgcttcctgatgggcaccattgccaaagcttgcctccaagggagtgatctcttggtccagcagcatttcaggtgggtacaactccgttgggacggagaacctatgcagggcctgctacaacggtttctgcggcgaaaggtggtgaacaaattcaagggccaagcacctagtccttgtgaccccgtgtgcaagatagtagactgggctcttagtgtgtggagacagctgaactcctgcttagcaagattaggaacgccagaagccctgttggggcctaagtattttttgtcttgtccagtggtgcctggccacgcccaggtgaccgttaagtggatgtctaaactctggaacggcgttattgctcctcgagtccaagaggcgattctcagtagagcaagtgtaaagcgacagccgggattcggtcagaccaccgccaaaaggcatccgagtcagggacagcaggcagtagttaaagctgccctgtccattctcctgaacaaagctgtgcttcatggttgccccctgcctcgggctgagttagaccaacataccgctgactttaaaggtgggagcttccccttgagtatagtgtccagctataacacgtgcaataagaagaaaggagagtccggggcttggcgcaaagtgaatacgagccccagaagaaagagcggcagattttctctgccaacatggaataaaccggacctgtcaactgaggggatgaagaacaagactattagccagctcaattgtaatcggaacgcgtcactctccaaacagaagagtcttgagaacgatctatctctcaccctgaatcttgaccaaaggctgtccctggggtccgatgacgaggccgacctggtcaaagaacttcaaagtatgtgcagcagcaaatcggagtccgatatctcaaaaatcgctgacagtcgcgatgatcttcggatgttcgatagctccggcaataatcctgtattatctgccacaataaacaacctccgcatgcccgtgtctcaaaaggaagtgagcccactttcttcacaccagacaacagaatgttcaaactctaagtcaaagactgaattaggcgtgtcccgagtgaaatcttttctgcccgtccccaggagcaaagtcacacagtgtagccaaaataccaagcggtcaagttcctcttcaaataccagacaaatcgaaatcaacaataattcgaaggaagttaattggaatctgcacaagaacgagcacctggagaaacctaacaagtag

SEQ ID NO: 219284 - DNA, 249 bp, synthetic construct
  misc_feature 1..249: note = Description of Artificial Sequence: Synthetic coding sequence
  source 1..249: mol_type = other DNA
atgtcagcgacctggacactgagccccgagccactccccccatctacaggccctcctgtgggtgctggactggatgcggaacaacgcactgtatttgcatttgtgctgtgccttctggtcgtgttggtgctgctgatggtgagatgcgtgcgtatccttttggatccttatagcagaatgccagcctcatcctggaccgatcacaaagaggctctagaacggggacagtttgactacgcactggtttag

SEQ ID NO: 219285 - DNA, 969 bp, synthetic construct
  misc_feature 1..969: note = Description of Artificial Sequence: Synthetic coding sequence
  source 1..969: mol_type = other DNA
atgtcacctaacttcaaactccaatgccacttcatacttatctttctgacagcactccggggagagagccggtacctagaactccgggaggcggcagactacgacccattcctgcttttcagcgccaatctgaagagagaactggctggtgagcagccgtaccggcgtgccctacggtgtctggatatgttgtctcttcaagggcagttcacatttaccgctgaccgaccccagcttcactgcgccgctttcttcattagcgaacccgaggagttcatcactatacactacgaccaggtgtccattgattgtcagggtggagacttcctcaaagtcttcgatggctggatcctaaaaggcgagaagtttccaagctctcaggaccatcccctgccttccgctgagcggtatattgacttctgtgagagtgggctaagccgcagatctatccgtagcagccaaaacgtcgccatgatattctttcgggtgcacgagcctggcaacggctttaccctgacaatcaagactgatcccaatttattcccttgcaacgtaatttcccagactccaaacggcaagtttactctagtcgtgccacaccagcataggaattgcagcttcagtatcatttaccctgtggtcattaaaatctctgacctcactctggggcatgtcaacggactacagctcaagaagtcgtccgcgggatgcgaaggcatcggggacttcgttgagctcctgggtgggaccggcttggacccctctaaaatgacgccccttgctgatctgtgttaccccttccacgggccagcgcaaatgaaggtagggtgcgacaataccgtggttcggatggtgtcttcaggtaaacacgttaatcgcgtgactttcgagtacagacaacttgagccctacgagctcgagaaccctaacggcaatagcatcggcgagttttgtctgagcgggctgtag

SEQ ID NO: 219286 - DNA, 723 bp, synthetic construct
  misc_feature 1..723: note = Description of Artificial Sequence: Synthetic coding sequence
  source 1..723: mol_type = other DNA
atgtcccccgaagttcatcagagcaatgtcggttggtgtcgcttagtgaccgccgcatataattactttcacgtcacaaattttttctggatgttcggtgaaggttgctacttacacactgcaattgtgttaacttactcaactgatcgactaagaaagtggatgttcatatgcattggttggggcgttccattcccaatcatcgtggcctgggcaataggcaagttgtactacgacaacgaaaagtgctggtttggaaagagacccggtgtctatacagactatatataccaaggacccatgattctggtgctgctcattaacttcatcttccttttcaatattgttcggatcttgatgaccaaactgagggcttctaccacctctgagaccattcagtaccggaaggccgtaaaagccactctcgtcttgctgccacttcttgggattacttacatgcttttttttgtcaatcctggagaagacgaggtcagccgggtcgtctttatctacttcaactctttcttagagtcttttcaggggttttttgtctcagttttttactgtttcttgaatagcgaagttaggtccgctatcaggaaacggtggcatcgctggcaggacaaacattctattagggcacgtgtggcacgggcaatgagtatacccactagcccaacccgcgtgagctttcactccataaagcagtccacagctgtgtag

SEQ ID NO: 219287 - DNA, 1248 bp, synthetic construct
  misc_feature 1..1248: note = Description of Artificial Sequence: Synthetic coding sequence
  source 1..1248: mol_type = other DNA
atggggggacatccgcagttgaggcttgtaaaggccttgctactccttggtctgaatccagtctccgcatctctgcaggaccagcattgcgagtccctatcattggctagcaacatctccggattacaatgtaatgcatccgtggacctaattggcacgtgttggcccaggtctcctgctgggcagctggtggttcgtccctgtcccgcatttttctatggggtcaggtataatactactaataatggatacagggaatgcctcgctaacggctcctgggccgctcgggtgaattacagcgagtgtcaggaaatcttaaatgaggagaaaaagagcaaagtgcactatcatgtggctgtcatcatcaactatctgggtcattgtataagtttagtggccctgctggtggcctttgttttattcctgcggctgcgttcaatccgctgtctgaggaacatcattcactggaacttaatttctgccttcatattaagaaatgccacctggtttgtggtacagctgacaatgagccccgaggttcaccagtctaacgtagggtggtgccggctggtgaccgccgcatacaattattttcatgtcaccaattttttctggatgttcggagagggctgctacctgcacaccgctattgttctgacatactccactgatcgccttcgcaagtggatgttcatttgcattggttggggggtgccctttccaattatagttgcgtgggccatcggaaaactatactacgacaacgaaaaatgttggtttgggaagagaccaggagtgtataccgattacatctaccaggggcctatgattttggttctgcttatcaacttcatctttctgttcaatatagtgcgtatcctgatgacaaagctgcgagcctcaactacatccgagaccatccagtatcggaaggccgtgaaggccacccttgtgcttcttcctttactcgggattacctacatgcttttcttcgttaatcctggcgaagacgaggtcagccgcgtggtttttatctactttaactccttcctggagagtttccaaggctttttcgtgagcgttttctattgctttttgaattccgaagtccggagcgcaattcggaagcgctggcatagatggcaggacaagcatagtattcgggcaagagtggccagagctatgtctattccaactagtcccacccgcgtgtcatttcatagcattaagcagtcaacagctgtgtag

SEQ ID NO: 219288 - DNA, 858 bp, synthetic construct
  misc_feature 1..858: note = Description of Artificial Sequence: Synthetic coding sequence
  source 1..858: mol_type = other DNA
atggtgtctgctaccatccctcagaagaagtccaaggttcattatcatgtggcagtcatcatcaattacctgggtcactgtatctctctggttgcactgttagtggcctttgtcctgttcctccggctacggagtattcgatgcctccgcaacattattcattggaatctcattagcgcattcatccttcgcaatgcaacctggtttgttgttcagctgacgatgtcccctgaggtacaccaatcgaatgtgggatggtgtaggcttgtcaccgccgcatataactactttcatgtaacgaatttcttctggatgttcggggagggctgctatctccatacagctatcgtgcttacatatagcaccgacagacttcggaaatggatgttcatatgcattggctggggcgtcccgtttccaataatcgtggcttgggctatcggcaagctttactatgacaacgaaaagtgctggttcgggaaacgaccgggagtgtacacagactatatttaccagggacctatgatccttgttctccttataaatttcatctttctgttcaacatcgtgagaatcctcatgaccaagctcagggctagtacgacatctgagacaatccagtacagggccagcctctgtctatgtagcaccgtgagctccattgtgcgcagtgttctcccatccggaaggggtggcactggtggcaggacaagtacacgcagtgtccccgaatggccagtgccctgccccagcccacctccgcagcctgtctccgctttcaccgcttcctcaagtccacagcaatctgagctggccggtcatggtgcagcccctaaggagttgtggttgggtggatag

SEQ ID NO: 219289 - DNA, 1206 bp, synthetic construct
  misc_feature 1..1206: note = Description of Artificial Sequence: Synthetic coding sequence
  source 1..1206: mol_type = other DNA
atgggcggtcacccacaactgaggctggtgaaagctctgctgttgctgggacttaacccggtctccgcctcattgcaggatcagcactgtgagtccttgagcctagccagcaacattagcggcttacagtgcaacgcgtccgtggatttaataggcacctgctggcccagatcaccagctgggcagcttgtcgtgcggccatgtcctgcttttttttatggagtgcggtacaatacaacgaacaacggctacagggaatgtctggccaatgggtcctgggccgctcgcgtgaattacagcgagtgccaggaaattcttaatgaagagaaaaagtctaaagtacactaccatgtagccgttatcatcaactacttgggacattgcatatctctggttgcactcctcgtggcgttcgtgttgtttctgcgcctgcgtagtatcaggtgcctgagaaacatcattcattggaatctgatctcagcttttatcttgagaaatgctacttggtttgtggtccagctcactatgagcccagaggttcaccagagtaatgtggggtggtgtcggcttgtgaccgcggcttataattacttccatgtgaccaacttcttctggatgttcggggaaggttgctatctgcacacagccattgtgctgacgtacagtacagaccgcctccgcaaatggatgtttatttgtatcggctggggagtaccgttccctatcattgtggcctgggctataggaaaactgtactacgacaatgagaagtgctggtttggcaaaaggccaggcgtctacaccgattacatttaccaaggaccgatgatacttgtacttctcatcaactttatatttctgttcaatatcgtgcgaatactgatgaccaaattacgggctagtactacttcagagacaatccagtaccggaaagccgtcaaggccacactagtgctgttgcctctccttggcataacatatatgttattctttgttaacccaggcgaagatgaggttagccgcgtggtctttatttacttcaattcattcctggagagcttccaggtccggtccgctatccgaaaacggtggcacaggtggcaggacaagcacagtattagggccagggtggcacgagcaatgagcatcccaacaagtcctacccgggtttcctttcatagcattaagcagtctaccgctgtctag

SEQ ID NO: 219290 - DNA, 1128 bp, synthetic construct
  misc_feature 1..1128: note = Description of Artificial Sequence: Synthetic coding sequence
  source 1..1128: mol_type = other DNA
atggggggtcacccccagctgaggctggtgaaggctctgctgctgctgggattaaacccagtctccgcctccctccaggaccagcactgtgaaagcctgtctctggcgagtaatatctccgataacggctatcgggagtgtctcgccaacggttcctgggcagcacgagtgaactatagtgaatgtcaggagattctgaatgaggagaagaaatcgaaagtccactaccacgtcgccgtgatcatcaattatctcggacattgcatttccctcgtggcccttctcgttgcctttgttctattcctgcgcctccggtccattcggtgcctaaggaatatcattcattggaaccttatctccgcctttattcttcgcaacgccacttggttcgttgtgcagttaaccatgtccccggaggtccatcagagcaacgtggggtggtgtcgacttgttacggcagcgtataattatttccacgtaaccaatttcttttggatgtttggggagggatgctacctgcataccgcaatagtgttgacctatagcactgaccgactccgaaagtggatgtttatttgcatcggctggggggtcccctttcctattatcgtagcatgggcaatcggaaagctctactatgataacgaaaaatgttggttcggcaagcggcctggcgtgtataccgattacatttaccagggcccaatgatcctggtgcttctcatcaatttcatcttccttttcaacatcgtgaggattctgatgaccaaactgcgggctagcaccacttccgagactattcagtaccgcaaggcagtgaaggctaccctcgtgctgctcccactgcttggaatcacctacatgctcttcttcgtgaaccccggagaggacgaagtttcgagagtggtgttcatctattttaacagcttcttggaatcatttcagggattctttgtttcagtcttttattgcttcctgaatagcgaagtgcgaagtgccattcggaagcgctggcatcgctggcaggataagcacagcattcgcgctcgggttgccagagccatgagcattccaacatctcctacccgagtctcgttccacagcattaaacagagcaccgcggtgtag

SEQ ID NO: 219291 - DNA, 1335 bp, synthetic construct
  misc_feature 1..1335: note = Description of Artificial Sequence: Synthetic coding sequence
  source 1..1335: mol_type = other DNA
atgggcggacatcctcagctccggctggttaaggccctgctgctcttaggcctcaatcctgtttccgcttcccttcaagaccaacactgcgagagtctctcgctagcatccaacatctccgggttgcagtgtaacgcctccgtagacttaatcggtacttgctggcccagaagcccggcagggcaactggtggtgcggccatgccccgcatttttttatggcgtgcggtacaacaccaccaacaacggctatcgcgaatgtctggcgaacggctcctgggccgctcgcgtgaactattcagaatgtcaggagatcctgaatgaagagaaaaagagcaaggttcattaccacgtcgcagtcataattaattatttggggcactgtataagcctggttgcgcttctcgtggctttcgtgctgttcctgcgactgcgccctgggtgcacccattggggtgaccaggccgacggcgctttggaggttggtgctccctggtcgggagctcccttccaagtcaggcgctcaatccggtgtctgcggaacattatccactggaacttgattagcgccttcatcctgagaaacgctacatggttcgtcgtccagctcacaatgtcgcccgaagtgcatcagtccaacgtcggttggtgccgtctcgtgaccgccgcatataactactttcacgtgaccaattttttctggatgttcggggagggatgttatctgcacactgcaatagtgctgacgtattcaacggacagactcaggaagtggatgttcatttgtattggctggggcgtgccgtttccgatcattgtcgcttgggcgatcggcaaactttactatgataacgagaagtgttggtttgggaagcgcccaggcgtgtataccgattatatctaccaaggcccaatgatattggtgttattgatcaactttatctttctgtttaatatcgtccgaattcttatgaccaagctgcgtgctagcacaacatccgagaccatccagtacagaaaagccgtcaaggccactttggtgctgttgcccttgttggggatcacgtacatgcttttctttgtcaatcccggtgaggacgaggttagtcgcgtcgtattcatttatttcaactccttcctggaaagctttcaagggttctttgtgagtgtgttctattgcttccttaactcggaagtgcggtctgctatcagaaagcgctggcaccgctggcaggataaacacagcatacgcgctcgtgtggccagggctatgtctatccccacatcgccgacaagagtttcattccacagcataaaacagtccactgccgtatag

SEQ ID NO: 219292 - DNA, 114 bp, synthetic construct
  misc_feature 1..114: note = Description of Artificial Sequence: Synthetic coding sequence
  source 1..114: mol_type = other DNA
gtatacaccgattacatctattttaatagctttttggaatctttccaggggttctttgtgtccgtgttttactgcttcctgaactcggaagtcagatccgctattcggaagtag

SEQ ID NO: 219293 - DNA, 1206 bp, synthetic construct
  misc_feature 1..1206: note = Description of Artificial Sequence: Synthetic coding sequence
  source 1..1206: mol_type = other DNA
atgggtggacaccctcagctgagacttgtgaaggccctgctcctgctgggcctgaaccctgtgagtgcatccctccaagatcagcattgtgagtcattgagcctggccagcaacattagcggcctccagtgtaacgccagtgtcgacttaatcgggacatgctggccacggagcccagcaggtcaactcgtagttcggccttgtcccgcttttttctatggcgtaaggtacaatacaaccaataatggctaccgcgagtgcttggccaatggttcttgggctgcacgagttaattattccgaatgtcaggagatcctgaatgaagagaaaaagagcaaagtgcactaccacgtcgctgttattattaattaccttggacattgcatctccctggtggctttgctcgtcgcttttgtcctcttcctccggctccgttcgatccggtgtctgagaaacataattcactggaatctgatctcagcattcattcttaggaacgcaacctggtttgtagtccagctgaccatgtcccccgaggtccaccagtccaatgttgggtggtgtaggctcgttacagcagcctacaactacttccacgtcacaaacttcttttggatgttcggcgaaggctgttacctgcatactgcgattgtcctgacatacagcactgaccgtctgcggaaatggatgttcatatgtatcgggtggggcgtcccattccctattatagtggcatgggctataggtaagctttactatgataacgagaagtgctggtttgggaagcgcccaggtgtctataccgattacatctatcagggacctatgattttggtgttactgatcaattttatatttctgtttaatatcgtgagaatacttatgaccaaactcagagcttctaccacatctgaaactatccaatataggaaggcggtgaaggcgaccttagtgctcctgcctctgctgggaatcacatacatgctatttttcgtcaaccccggagaagacgaggtcagcagagttgtgttcatctacttcaacagctttttagaatccttccaggtccggagcgcaatccgcaaaagatggcaccggtggcaggataaacacagtataagggcgagggtggccagggcaatgtccatccctacaagccccaccagagtgtcctttcactcaattaagcagtccaccgctgtatag

SEQ ID NO: 219294 - DNA, 1194 bp, synthetic construct
  misc_feature 1..1194: note = Description of Artificial Sequence: Synthetic coding sequence
  source 1..1194: mol_type = other DNA
atgggtagggagccctggcctgaggaccgcgatctcggattcccacaacttttctgccagggcccttactcatattgcaataccacgctggaccagattggcacctgttggcccagaagtgcagccggtgccctggtagaacgcccttgccccgagtactttaacggcgtcaaatataacaccaccagaaacgcctaccgggagtgccttgagaacggaacgtgggcgtccaagattaattattcacagtgtgagccaatcctggatgataagcagagaaaatacgacctccattataggatcgcactggtggtaaattacctggggcactgcgtctccgtggccgcacttgtggccgctttcctcttgtttctggccctgaggtcaatccgctgtctgagaaatgttattcattggaatctgattactaccttcatcctgagaaatgtgatgtggttcctgctccaacttgtggatcatgaagttcacgagagcaatgaggtgtggtgtaggtgtatcaccactatctttaactactttgtggtgaccaatttcttttggatgtttgtggaaggatgttatctgcatactgcaatagttatgacctacagcactgagaggcttagaaagtgcctgttcttgttcatcggatggtgtatcccttttcctataatcgtagcatgggccatagggaaactgtactatgagaatgaacagtgctggttcggcaaagagcccggtgacctggtggactatatctatcaagggcctattatcctcgtcctgctcatcaatttcgtgtttttgttcaacattgtccggattctgatgaccaaattgcgcgcaagtaccacaagtgagacgattcagtaccggaaagcagtaaaagcgaccctggtcctgttaccgctcttaggaattacttacatgctatttttcgtcaacccaggggaggacgacctgtcacagatcatgtttatatatttcaactcctttttgcagtctttccagggattttttgtcagtgtattctactgtttcttcaacggtgaggtccgttccgcagtgaggaagaggtggcaccgctggcaagatcaccactccctccgtgtgccaatggctcgagccatgtcaattcctacttctccgactcgtatcagcttccactcaatcaaacagacggcagcggtttag

SEQ ID NO: 219295 - DNA, 1317 bp, synthetic construct
  misc_feature 1..1317: note = Description of Artificial Sequence: Synthetic coding sequence
  source 1..1317: mol_type = other DNA
atgcgaggaccatctggccctccagggctactgtacgttcctcatttgctgctgtgtctcctgtgtttgttaccaccgccattgcagtatgcagcaggccagagccaaatgccaaaggatcagcctctgtgggccctcttggagcaatactgtcacaccatcatgacactaactaatctgtctggcccttacagttattgcaacactacactggaccagatcggtacttgttggccgcgtagcgcagcgggtgcgctcgtcgagcgcccttgccccgaatatttcaacggcgtcaaatacaacaccacaagaaatgcttatagagagtgtttggaaaatgggacttgggcttccaaaatcaattactcccaatgcgagcccatcctcgacgacaaacagcgtaagtatgatctgcattacagaatcgctttagttgtgaattatctgggacattgcgtttcagtggctgcccttgtcgcagctttcctcctgtttcttgcattgaggagcattcggtgtctgaggaacgttattcactggaatctgataacgacattcattctccggaatgtgatgtggttcctgcttcagctggtggaccatgaggtgcacgagtccaacgaagtgtggtgtcggtgtataacaaccatcttcaactacttcgttgtgacaaacttcttttggatgttcgtcgagggctgctacctgcataccgcgatcgtgatgacctattcaaccgagcggctcaggaagtgtctcttcttgtttatcggttggtgcatcccctttcccatcatcgtggcgtgggcgataggaaaactctattacgagaatgaacagtgctggttcgggaaagaacccggagacctagtcgattacatctaccagggcccaatcatcttagtgctcctgattaactttgtctttttattcaatatcgtaaggattctaatgaccaaactccgggcatccacaacgtcagagactattcaatacagaaaagccgtaaaagctaccctagtactgctgcctttgctgggcataacttatatgctcttcttcgtgaaccccggagaggacgacctgtctcagatcatgtttatttacttcaattcttttctgcagtctttccaaggctttttcgtgtcagtcttctattgcttttttaatggcgaggtccggtcggctgtgagaaagagatggcataggtggcaggatcatcacagcctgcgcgttccaatggcccgtgccatgtctataccaacctcaccaacacgaatctctttccattctatcaagcaaactgccgctgtgtag

SEQ ID NO: 219296 - DNA, 1236 bp, synthetic construct
  misc_feature 1..1236: note = Description of Artificial Sequence: Synthetic coding sequence
  source 1..1236: mol_type = other DNA
atggatgccgctctcctgcactccctgctggaagcaaattgcagccttgcccttgcagaggagctcctattggacggctggggaccccctcttgacccggaagggccttattcttactgtaacaccacacttgaccagatcggtacctgctggcccaggtcagccgcaggggcactggtggagcgcccatgccccgagtacttcaacggcgtcaaatacaacacaacacgtaatgcttaccgcgaatgtttggaaaacggcacatgggcctcaaagatcaactattctcaatgtgaacccattctcgatgataagcaacgtaagtatgatctgcattaccgtatcgccctggtcgtcaattatcttggacattgtgtaagcgtcgcggctctagtggctgcgtttctgctgttcctagcgcttcgcagcatcaggtgcctccgcaacgttatacattggaacttaattacaacatttatcctgcgaaacgtgatgtggttcctcctccaactggtggaccacgaggtgcacgaatctaacgaggtttggtgtagatgcattactactatttttaactactttgtggtaacaaatttcttttggatgtttgtggaaggctgctacctgcacacagcgattgttatgacctactccacggagcggctcagaaagtgcctgttcctctttattgggtggtgcattcctttccctataatagtggcctgggccattgggaagctgtactatgaaaacgaacagtgttggtttggcaaagaacctggagacctggtcgattacatttatcagggaccaataatcctggtgctgctgatcaactttgtgttcctatttaacatcgtacggatactgatgactaagcttcgcgcttcgaccacctctgaaactatccagtatcgaaaggccgtcaaagctaccctggtgttactgcctctgcttggtatcacttacatgttattctttgttaatcccggagaagacgacctaagtcagataatgttcatttattttaatagcttcctgcagtcctttcagggtttttttgtttccgttttctactgctttttcaacggggaagtgcgatctgccgtgagaaagaggtggcaccgttggcaggatcaccattccctccgggttccaatggccagagctatgtctatccctaccagcccgactcgcatttctttccattccataaagcagacggccgctgtgtag

SEQ ID NO: 219297 - DNA, 1113 bp, synthetic construct
  misc_feature 1..1113: note = Description of Artificial Sequence: Synthetic coding sequence
  source 1..1113: mol_type = other DNA
atggacgcagcccttttacatagtctccttgaggcaaactgtagtctggcactcgcagaagaactgctccttgacggctggggcccacccctggatcccgaggggccatatagctattgtaatacgacactggatcaaattggaacatgctggcctcgctccgctgccggagctctggttgaaagaccatgtccagaatactttaatggtgtgaaatacaatactacccgcaacgcctatcgcgagtgcctggaaaatgggacatgggcctcaaagatcaactatagccagtgtgagcctattctcgatgataagcagaggaaatacgatctgcattatcgcattgcactagtggttaactatctggggcattgcgtgagcgttgcagcactggtggctgcgtttctcctgttcctagccctgcgtagtatcagatgcctgagaaacgtgatccactggaacctgattacaactttcatcctgaggaacgtgatgtggtttttgctgcagctggtggaccatgaggtccatgagtccaatgaagtctggtgcaggtgcattactacaatcttcaactactttgtggtgacgaattttttttggatgttcgtggagggatgttacctccacaccgccatcgtgatgacatattctaccgaacgattgcgcaagtgtctttttctgttcataggctggtgcattcccttcccaatcattgtggcttgggcaatcggcaagctgtactacgagaacgaacagtgttggtttggaaaagaacccggagacctggtcgattatatataccagggaccgatcatcttggtgctcctgattaatttcgtgtttttattcaacattgtgcggattctcatgactaaactgcgtgcatctacaacttctgaaacaattcagtacagaaaggctgttaaggccacactggtcctgctccccttgttgggcatcacctatatgctgttttttgtgaatcctggagaggacgatctgtcccagatcatgttcatctatttcaactcttttcttcagagctttcagggtttctttgtaagtgtgttctactgcttctttaatggggagggtcttgagcctgtttag

SEQ ID NO: 219298 - DNA, 468 bp, synthetic construct
  misc_feature 1..468: note = Description of Artificial Sequence: Synthetic coding sequence
  source 1..468: mol_type = other DNA
atgtatcggcataagaattcctggcggctggggctgaagtacccaccatcatcaaaggaggaaacccaggtgccaaagacactgatttccggactgcccggaaggaaatccagctctcgcgttggtgaaaagttacagtccgctcacaaaatgcctctgagtcccggactactgctgctgctgctctccggggcaaccgctaccgctgccctgccgctggagggaggccctaccggccgtgactcagaacatatgcaggaggcggcaggaatccggaagtcctcgctgctgacctttcttgcatggtggtttgagtggaccagccaggcgagtgccggacccctcataggtgaggaggctagggaagtggcaagacggcaggagggtgcacctccccagcagagtgctcggagagaccgaatgccatgtcggaactttttttggaaaacctttagcagttgcaagtag

SEQ ID NO: 219299 - DNA, 318 bp, synthetic construct
  misc_feature 1..318: note = Description of Artificial Sequence: Synthetic coding sequence
  source 1..318: mol_type = other DNA
atgccgttatcccccggattgctgcttctcctgctgagtggtgccacagcgaccgcggctttgcccctcgaagggggaccgaccggacgggacagtgaacatatgcaggaggctgctgggatcagaaaaagcagcttgctcacttttttggcctggtggtttgaatggacctcccaggcctcagccggacctctgatcggtgaggaggcacgcgaagtggccagaaggcaggagggcgctccaccacagcagagcgcccgacgagatcggatgccctgtcggaacttcttctggaagaccttcagcagttgcaagtag

SEQ ID NO: 219300 - DNA, 1332 bp, synthetic construct
  misc_feature 1..1332: note = Description of Artificial Sequence: Synthetic coding sequence
  source 1..1332: mol_type = other DNA
atggccgctagccctcacaccctgtcctcccgcctgctcacagggtgtgtcgggggatctgtctggtacctggagagaagaactattcaggatagcccacacaagtttctgcacctgctcagaaacgtcaacaaacagtggatcacttttcaacacttttcattcctaaagagaatgtatgttactcaattgaatcgttcccataaccagcaagtgagaccaaagcctgagcccgtggcatctccattcctggagaaaacctcctcaggacaagcgaaggccgaaatttatgaaatgcggcctctgtcccctccttcgctcagtctatctagaaaaccgaatgagaaagagctgatcgagctggagcctgatagtgttatcgaagatagcatcgatgttggaaaggagactaaggaggagaagcgttggaaagagatgaaattacaggtgtatgatctccccggtattctggcgagactgagcaagattaagctgaccgccctggtggtatctacgacggcagctgggttcgctctcgctcctgggccatttgattggccatgtttccttttaactagtgtcggcactgggctggcaagctgtgccgctaattcaatcaaccagttcttcgaggttcccttcgattccaacatgaaccggacaaagaatcggcctcttgtaagaggacagatctcacccttgttggcggtgagcttcgccacctgttgtgccgtgcctggggttgcaatcctaactttgggcgtgaaccccctgaccggtgccttgggattgtttaacatctttctctacacgtgttgctatacccccttgaaacgaatcagcattgctaacacgtgggtcggcgctgtggttggggcaatcccccctgtgatgggctggaccgccgctacaggttccttggatgccggtgcgttcctgttaggaggcattctctactcttggcaattccctcatttcaacgccctgtcctggggactcagggaggattacagcagagggggatattgcatgatgtcagttacacaccctggcctttgtagaagggtggccctgagacattgtctggctctgcttgtcctgagcgccgcagcccctgtgctggatataactacatggaccttccctattatggcactcccgattaacgcctacattagttatctgggattcagattttatgtggatgcagatagacgatcctctagacggcttttcttttgcagtctttggcatttaccattgctcctcctcctcatgctgacgtgtaagaggccctcgggcggtggggatgccggacctcccccttcttag

SEQ ID NO: 219301 - DNA, 399 bp, synthetic construct
  misc_feature 1..399: note = Description of Artificial Sequence: Synthetic coding sequence
  source 1..399: mol_type = other DNA
taacgcaacgtgaataagcagtggattacttttcagcacttcagcttcctgaaaagaatgtatgtcacgcaattaaatcgctctcacaaccaacaggtgaggccaaaaccggaacccgtggcatcaccatttctcgaaaagacctcctcgggccaggccaaagccgaaatttatgagatgcgccctctgtcgccaccgtcgctatccctgagccggaaaccaaacgaaaaggagctcatcgagttggaacccgactccgtgatcgaagacagtattgacgtggggaaagagacaaaggaggagaagcgatggaaagagatgaaactccaggtgtacgatctgccagggattctcgcccgtctctccaaaatcaagctaacgggtaccctctttttttag

SEQ ID NO: 219302 - DNA, 756 bp, synthetic construct
  misc_feature 1..756: note = Description of Artificial Sequence: Synthetic coding sequence
  source 1..756: mol_type = other DNA
atgatatgccaggagttttggctggattaccctaagtctaattcccagttcttcgaggtaccatttgactcaaacatgaatcgcaccaaaaacagaccgcttgtcaggggccagatatccccactgctcgcggtgagctttgctacttgttgtgccgtgcccggagttgccatcctcactctcggcgtgaatccattgacaggggctctcggcctgtttaacattttcttgtacacctgttgctacactcccctcaagagaatctccatagccaatacctgggtgggagccgtggtcggggctattcccccagtgatggggtggactgcagctacaggcagcctagatgcgggtgcttttctgctgggcggaatattatacagctggcagttcccacacttcaatgccctgagctggggcctgcgtgaggattactcgagaggcggttattgcatgatgagcgtaacccaccccggattgtgcaggcgggtggcacttcggcattgcctcgcattgcttgttctgtcagcagctgcccctgtcttggacataaccacctggactttccctatcatggccctacccataaatgcatacatatcatacctaggattccgtttctatgttgatgccgaccgccgttcctctagaagattgttcttttgctcgttgtggcatctgccattgctactgctgctgatgcttacctgcaagaggccatcaggcggaggcgacgccggacccccaccttcttag

SEQ ID NO: 219303 - DNA, 681 bp, synthetic construct
  misc_feature 1..681: note = Description of Artificial Sequence: Synthetic coding sequence
  source 1..681: mol_type = other DNA
atgaaccggaccaagaataggccacttgtacggggacaaatctcccctctgttggccgtttccttcgctacatgctgtgccgtgcccggtgtggcaattctgaccctgggggtcaatcccctcaccggcgcattgggtctattcaacatttttctgtatacatgttgttataccccgctcaaaagaatctccattgctaacacgtgggtcggcgctgtcgttggggctatccctccagtgatgggctggaccgccgctacgggctcactggacgccggagccttcctgctagggggaattttgtatagctggcagtttccccacttcaacgcactgagttggggtctgagagaggattactccagagggggatactgcatgatgtctgtgacacaccccggtctctgccgacgggtcgccctccggcactgccttgcactgcttgtgctcagcgcggctgcaccagtccttgatatcacaacctggacctttccaattatggcccttcctatcaacgcctacatctcatacttggggttcagattctatgtcgacgctgatcggcgatcaagtcgccgtttgtttttctgtagcttgtggcacctcccactcctgcttctgcttatgctcacttgtaaacgtccttctgggggaggggatgccggaccacctccttcctag

SEQ ID NO: 219304 - DNA, 831 bp, synthetic construct
  misc_feature 1..831: note = Description of Artificial Sequence: Synthetic coding sequence
  source 1..831: mol_type = other DNA
atgggcggactctggaggccagggtggagatgtgtaccattttgcggctggcggtggatccacccaggaagtcccacacgggcagctgaaagggtcgaaccctttctgaggccagagtggtccggcactggaggcgcagaaagaggtctgcggtggcttggcacctggaagaggtgcagtctgagggccagacatccagccctccagccccctaggaggccgaaaagtagcaatccattcactcgagcacaagaagaggagcggaggaggcagaataaaaccactctgacttacgttgctgctgtggccgtgggcatgctaggcgcttcatacgccgcagtccccttgtaccgactgtactgtcagactaccggactggggggatctgcagttgctggacacgcttcagacaagatagagaacatggttcctgtcaaagacagaattattaaaatctcctttaatgcagatgtgcacgcatccttgcagtggaatttcaggcctcaacaaactgagatatacgttgttcccggagaaacggccctcgccttttatagggctaaaaacccaacagataaacccgtgattgggattagcacctacaacatcgtgcctttcgaagccggtcagtacttcaataaaattcaatgtttttgctttgaagaacagaggctcaaccctcaggaggaggtggatatgcctgtgtttttctacattgatcccgagttcgccgaagacccacgtatgattaaagtggacctgatcacactaagctataccttttttgaagcaaaggagggccacaagctccctgtacccggatacaattag

SEQ ID NO: 219305 - DNA, 1233 bp, synthetic construct
  misc_feature 1..1233: note = Description of Artificial Sequence: Synthetic coding sequence
  source 1..1233: mol_type = other DNA
atgcagcgcctgttattcccgccattaagggcattgaagggcagacagtatttaccactactggcgcctcgcgctgcaccacgggcacaatgtgactgtattcggaggccgctgcggcctggacagtattcgaccatttccgaagttgcgctgcagagtgggcgtggcacggtgtctcttccttcaaaggccgcagagcgggttgtcggtcgctggttgttagtgtgcagcgggacggtggctggggctgtcatccttggaggcgtgactagactaaccgagtctggactctctatggtcgactggcacttaataaaggagatgaagcctcctacttcacaagaagaatgggaggccgaattccaaagataccagcagttcccagagtttaagatcctcaaccacgacatgaccctaacagaattcaaattcatttggtacatggaatactcgcataggatgtgggggaggctcgttggacttgtgtacatcctccccgcagcatacttttggagaaaggggtggttgagtcggggaatgaagggtagggtgctggccctgtgtggattggtgtgtttccaaggtctgctcggatggtatatggtcaaaagcgggctagaagagaagtcggattcacacgatatacctcgagtgtctcaataccgtctcgccgctcacctcggcagtgccctagtcctgtattgtgcctctttatggacttctctgtctctcctgctgccacctcacaaactccctgagacacaccagctcctgcagttgagacggttcgcccacggaactgctggtctggtgttcctaaccgctctgtcgggagctttcgtggctggactggacgcaggccttgtctacaattcgtttcctaaaatgggcgagagttggatccccgaagacctctttaccttttctcccatcctgcgcaatgtctttgaaaaccccacaatggtgcagtttgaccaccggatcctgggcatcacgtcagttacagctatcacggtgctttacttcctctcacggcgaataccgctcccgagaagaacaaagatggccgctgtgaccctattggcgctcgcatatacacaggtgggcctgggcatcagtaccctgctcatgtacgtgcccactcctctcgccgcaacccaccagagcggcagcctggccttgctcacaggcgcattgtggctaatgaatgagcttaggagggttcctaagtag

SEQ ID NO: 219306 - DNA, 1167 bp, synthetic construct
  misc_feature 1..1167: note = Description of Artificial Sequence: Synthetic coding sequence
  source 1..1167: mol_type = other DNA
atgcaacgcctgcttttcccccctttacgggctttaaagggtaggcagtatcttccgttactggcaccacgggcagctccgagggcacaatgcgattgcattcggagaccactgcggccaggccagtactccactatctctgaggtcgccctgcagagcgggcgagggacagtgagcctcccatctaaagctgcagaaagagtagttggcagatggctcttagtgtgttccgggaccgtggcaggagcagttatcctgggtggggttacacggctgactgagagtggtctctccatggttgactggcatttaatcaaagagatgaaacctccaacatcgcaggaagaatgggaggcagaattccaacgctatcagcagtttccggaattcaaaattcttaatcatgacatgaccctgactgagttcaaattcatatggtacatggagtacagccatcgtatgtgggggcgtctggtcgggctggtgtacattctgcccgcagcatacttttggaggaaaggctggctgagcaggggcatgaagggcagggtgctggccttgtgcggtctggtctgcttccagggattgctgggatggtatatggtgaagtctggcctggaggagaaatccgattcacatgacatccctcgggtgtctcagtatcgccttgcagcacatcttggaagtgctctggtattatactgcgcttctctttggacttcactgagcctgcttctgccgccacacaaattgccagaaactcatcaactgctgcagctccgacgattcgcgcatggaaccgccggtctcgtctttctgaccgcactctctggtgcattcgtggccggactcgacgcaggcctggtatacaatagctttcctaaaatgggtgagtcatggatccccgaggaccttttcactttctctcccattcttcgcaatgtgttcgagaatcccaccatggtgcagttcgaccaccgcatcctgggtattacgagcgttacagccatcactgtcctgtacttcctctcccggagaattccacttcctcgtaggaccaagatggctgccgtgacgttacttgcgctggcttacactcaggggcctgttctgtttaactttaccttcaaaatttcggacttggacgagggaatccgcaacatatag

SEQ ID NO: 219307 - DNA, 192 bp, synthetic construct
  misc_feature 1..192: note = Description of Artificial Sequence: Synthetic coding sequence
  source 1..192: mol_type = other DNA
atgcccggtctcgtggattccaatcccgcacctcccgaatcccaagagaagaagcctcttaagccctgttgcgcttgtccagagacgaagaaagccagggacgcctgtattattgaaaagggcgaggagcactgcgggcacctcatcgaagcacacaaggaatgtatgcgcgctctcggttttaaaatctag

SEQ ID NO: 219308 - DNA, 192 bp, synthetic construct
  misc_feature 1..192: note = Description of Artificial Sequence: Synthetic coding sequence
  source 1..192: mol_type = other DNA
atgccagggctggtcgattcaaatcccgcaccccctgaaagccaggagaagaaaccccttaaaccttgttgtgcctgtcccgagactaagaaggccagggatgcgtgcatcatagaaaagggggaagaacactgtggacatctcattgaagcccataaggagtgtatgagggcgttggggtttaagatttag

SEQ ID NO: 219309 - DNA, 297 bp, synthetic construct
  misc_feature 1..297: note = Description of Artificial Sequence: Synthetic coding sequence
  source 1..297: mol_type = other DNA
atgcccggtttggtggattcgaacccagcgccaccagagtcccaggagaaaaagccattaaagccctgctgtgcttgtcctgagaccaagaaggccagagatgcttggtttcggggacgcgtgagcgtggatcttagcaggagtttagtgccagggaacgacggtgaacgtggcgagcgtcaggcgagcacaacgcattcatttctgcagataataatcgagaaaggcgaggaacactgtgggcacctgattgaggcacacaaagagtgtatgcgggctctgggttttaagatctag

SEQ ID NO: 219310 - DNA, 192 bp, synthetic construct
  misc_feature 1..192: note = Description of Artificial Sequence: Synthetic coding sequence
  source 1..192: mol_type = other DNA
atgcccggtttagtagatagcaaccctgccccacctgagtcccaggaaaaaaagccattgaaaccttgttgtgcctgtccagaaaccaaaaaggccagagacgcatgtataattgagaaaggggaggaacactgtggccacctgatcgaggctcacaaggaatgcatgagagctctcggctttaagatatag

SEQ ID NO: 219311 - DNA, 1098 bp, synthetic construct
  misc_feature 1..1098: note = Description of Artificial Sequence: Synthetic coding sequence
  source 1..1098: mol_type = other DNA
atggccctgttgctgtgctttgttctgctgtgcggcgtggtagacttcgcacggtctctgagcatcactacccccgaagaaatgatcgaaaaggccaagggtgagaccgcgtacttgccgtgtaagtttacgctcagccctgaggaccagggccctctcgatattgaatggctcatcagccctgcggataaccaaaaggtcgatcaggtgatcatcctctactccggagataagatttacgatgactactatcccgaccttaaagggcgagtccactttacttcaaacgacctcaaaagtggcgatgcttccattaacgtaacgaaccttcaactgtccgatattggtacctaccagtgcaaggtgaagaaggctcccggtgtggccaacaagaagatacatttagtggtcctcgtgaagccttccggcgctagatgctacgtggacggctctgaggaaattgggagcgactttaagatcaagtgtgaaccgaaggaggggtcgcttccacttcaatacgagtggcagaaacttagtgattctcagaaaatgccaaccagttggcttgccgagatgacttcaagtgtaatctccgtcaagaacgcctcttctgagtattccggaacctattcgtgtactgtacggaacagggtgggtagcgaccagtgcctgctgcgtttgaatgtcgtgccacctagcaataaggcagggctgatcgcaggcgctattattggcactcttctcgccctcgcgctgattgggttaatcatattttgttgtcgcaaaaaacgcagagaggaaaagtacgaaaaggaggtgcatcatgacatcagggaggacgtcccacctcctaaatctcgaacttctactgccaggagctatataggtagcaaccacagtagtctggggtctatgagcccatcaaatatggaaggttattcaaaaactcagtacaatcaggtccccagcgaggatttcgagcgcactccacagagtcccaccctccctccggcaaaagttgcagcgccaaacctgtctcggatgggggctatccccgtcatgattcctgcccagtctaaggacggatccatagtgtag

SEQ ID NO: 219312 - DNA, 975 bp, synthetic construct
  misc_feature 1..975: note = Description of Artificial Sequence: Synthetic coding sequence
  source 1..975: mol_type = other DNA
atggccttgcttctatgttttgtgctgctgtgtggcgtcgtggatttcgctcgctcactttctataacaacccccgaggaaatgattgagaaggctaaaggagagacagcttacctgccttgtaaattcactctgtctcctgaggatcagggacctttagacattgagtggctgatctccccagcggacaaccagaaggtagatcaggtgatcatcctgtattcaggcgacaaaatctatgacgactactatcctgatcttaagggacgcgtgcattttacatccaatgatctgaaatccggagatgccagcataaatgtgactaacttacagttatctgatatcggaacctaccagtgcaaagttaaaaaagcacccggagttgccaacaaaaaaatccacttagtagtgctagtgaagccgagcggcgcaaggtgctacgttgatggcagtgaggagataggttctgattttaaaattaagtgcgagcctaaggaaggttcactgcctctgcagtatgagtggcaaaagctctccgacagccaaaagatgcctacatcttggctcgctgcatctaacaaggccggtcttatcgctggcgctattatcggaacgctcctcgcactggctttgattgggttgattatcttctgttgtcgtaaaaaaagaagggaggagaagtatgagaaggaggtgcaccatgacatcagggaggatgtccccccaccgaaaagccggacttccaccgcgaggtcatacatcgggagcaatcacagctccttgggtagtatgtcaccatcgaatatggagggatactccaagacccaatacaatcaggtaccctccgaagatttcgaaagaactccacaatcccccacactgcccccagccaaagtggcagcccctaatttgtcccggatgggcgctatccccgtcatgattccagcacagtctaaggacggatcaattgtttag

SEQ ID NO: 219313 - DNA, 603 bp, synthetic construct
  misc_feature 1..603: note = Description of Artificial Sequence: Synthetic coding sequence
  source 1..603: mol_type = other DNA
atggccctgctcctgtgtttcgtgttactctgtggggtggtggacttcgctaggtctttgtccatcacaaccccagaggaaatgatcgagaaggcaaaaggtgagacggcatacctcccctgtaaatttactctgtctccagaagatcaggggccattggacatagaatggctaatttctcctgctgacaatcagaaggttgaccaggtgatcatactatattctggggacaaaatttatgatgattactaccccgatttgaaggggcgtgtgcacttcactagcaacgatctgaagtcaggcgatgccagtatcaacgtgactaatttgcagctgtccgacattgggacttatcagtgtaaagtcaaaaaagcaccgggagtcgctaacaagaagatccatctagtggtacttggcaagatgtgtcatctgcaaagagctgtgagacctctccccgaggccacctctgccgtcatcattcacccatggggcccttgcttgctgcctacatggaaagacattcccagactctccatcactaagtatcaagttaagactctgaacgccctgctgagagtccgcctcagtcacctgctcagatag

SEQ ID NO: 219314 - DNA, 759 bp, synthetic construct
  misc_feature 1..759: note = Description of Artificial Sequence: Synthetic coding sequence
  source 1..759: mol_type = other DNA
atggctcttctgctctgcttcgtccttttatgcggagttgttgattttgcaagatctcttagtattactacacctgaagaaatgatcgaaaaggcaaagggggagacagcttaccttccgtgtaaattcacactgagtccagaagatcagggaccactggatattgagtggctgatttcccccgctgacaatcagaaagtggatcaggttatcatcttgtactcaggggacaagatctatgatgattactaccccgatttgaaggggcgagttcacttcacgagtaacgacctgaagagtggggacgcctccatcaacgtgactaatctccagctgagtgacataggcacatatcagtgcaaggtcaagaaggcacccggtgtagcaaataagaagatccacttggtagtgcttgtaaagccatccggagcgcgatgctacgtagacggttccgaagaaataggcagcgactttaaaatcaagtgcgagcctaaagagggctccctcccgctgcagtatgagtggcagaagttgtcagactcccagaagatgccaacttcttggctggctggcaagatgtgtcaccttcagagagccgtgcgacccctgcccgaggccacctccgctgtgatcatacatccctggggtccgtgcttgttacctacatggaaggacataccccgtctgtccattaccaaataccaggtgaaaaccctgaatgctctcctgagggtgcggttgtctcacctgttgaggtag

SEQ ID NO: 219315 - DNA, 1059 bp, synthetic construct
  misc_feature 1..1059: note = Description of Artificial Sequence: Synthetic coding sequence
  source 1..1059: mol_type = other DNA
atggcactactattgtgttttgtgctgctgtgtggtgtcgtagatttcgctcgctccctatcaatcactacccccgaagagatgattgagaaggccaagggggaaacagcctacttgccatgtaagtttacactatccccagaagatcaggggcctctggacatagagtggttgatatctccagcggacaaccagaaggtcgaccaggtcatcatcctgtattctggtgataaaatctacgacgactactacccagacctcaaggggagggttcatttcactagcaacgatctgaaaagcggagacgcaagcataaatgtgactaatctccaactgagtgatattgggacctaccaatgtaaggtcaagaaagctcccggagtggctaacaagaaaattcacctcgtagtcctggtgaagccttctggggctcgatgttatgtggatggctccgaggagatcggcagcgattttaaaattaagtgtgagcctaaggagggatcacttccactgcagtatgaatggcagaagctgtcggattcccagaaaatgcccacgtcttggttggccgagatgacatcttctgtaatctctgtgaaaaacgccagctctgagtattctgggacatacagttgcactgtgcggaacagggtgggttccgatcagtgcctgctgaggcttaatgtggtgcccccaagtaacaaggccggtctgattgccggagccatcataggcaccctgttggctctggccctgatcgggctgatcatcttctgctgccgcaagaagcgccgagaggaaaaatacgaaaaagaggtgcaccacgacatcagagaggatgtgcccccacccaagtctcgaacctccacagctcgcagttatattggctccaatcacagtagcctaggtagtatgagcccttctaacatggaaggatactccaaaacacagtataaccaagtgcccagcgaagacttcgagcgaacacctcagagccccacactgcccccagcaaagttcaaatacccatacaaaaccgatggaataacagtggtctag

SEQ ID NO: 219316 - DNA, 270 bp, synthetic construct
  misc_feature 1..270: note = Description of Artificial Sequence: Synthetic coding sequence
  source 1..270: mol_type = other DNA
atggccctgctgctctgctttgtcctactttgtggagttgtggactttgcgaggtctctcagcatcacaacccctgaggagatgatagagaaggccaagggagaaacagcctatctgccttgtaaatttaccctatctccagaggatcaaggtcctctcgacatcgaatggctcatttccccagccgacaaccaaaaagtggatcaagtgggacggtgcgctacaagtaaggagccctatgtacactgtcaaaagctccatcgacagtag

SEQ ID NO: 219317 - DNA, 900 bp, synthetic construct
  misc_feature 1..900: note = Description of Artificial Sequence: Synthetic coding sequence
  source 1..900: mol_type = other DNA
atggaggagttcgactcagaagatttttcaacctcggaagaggacgaggattacgtgccgagtggcggagagtattcagaagacgacgtgaacgaactggtcaaggaggatgaagtcgacggggaagagcagacccagaaaacacaggggaaaaagcgtaaggcacagtctatccccgcacggaagaggaggcaggggggactgagtctggaagaggaagaggaagaggatgccaattctgaatcggaagggagttcttctgaggaggaggacgacgcagccgagcaggagaaggggataggaagtgaggatgccagaaagaagaaagaggatgaactctgggccagctttttaaacgatgtggggccaaaatctaaggtccctccgtctactcaggtgaaaaaaggcgaggagactgaagagacaagttcctctaagcttctggtgaaagctgaggaactagagaaacccaaagagacagagaaggtcaagattacaaaggtcttcgattttgccggagaagaggtccgagtcacaaaggaagtcgatgccacgtctaaagaggcgaaatccttttttaaacagaatgagaaggagaaacctcaggccaatgtgcccagcgcgctgccgagccttcccgcaggaagcggcttgaagcgtagtagcggaatgtcgagcttgctggggaagatcggtgccaaaaagcagaagatgtctacgctagagaaatctaagttggattgggaatccttcaaagaagaagagggcattggagaggaacttgccatccataatagagggaaggagggctacatcgagaggaaggcgttcctcgacagggtggatcacagacagtttgagattgaacgggatctccggctcagcaaaatgaaaccatag

SEQ ID NO: 219318 - DNA, 675 bp, synthetic construct
  misc_feature 1..675: note = Description of Artificial Sequence: Synthetic coding sequence
  source 1..675: mol_type = other DNA
atggaaaaactcctctgctttctagttttgacgagcctttcacatgcgtttggtcagacagacatgtcgcggaaagcgttcgtcttcccaaaagagtcggataccagttacgtgtcactcaaggcccctctcaccaaaccgttgaaggcctttaccgtttgcctccatttctatacagaactgtcttccaccagaggatactctatattttcctatgccacaaagagacaagacaacgagatcctcatattttggtccaaagatattggatattcattcacagtaggaggatctgagattctgttcgaagtgcccgaggttaccgtggcccctgtgcatatctgcacatcatgggaatctgcctcaggcatcgtagagttctgggtcgacggcaagccccgagtccgaaagtctttgaaaaaaggatatactgtcggagctgaagcttccatcattctggggcaagaacaggactccttcgggggaaactttgaggggtctcagtctctcgtgggagacatcggtaacgtgaatatgtgggattttgtattgtcccccgatgaaatcaataccatctacctaggcggtcctttctctcctaacgtgctcaactggcgcgcactcaaatacgaggtgcaaggtgaggtatttacaaaacctcagttatggccctag

SEQ ID NO: 219319 - DNA, 309 bp, synthetic construct
  misc_feature 1..309: note = Description of Artificial Sequence: Synthetic coding sequence
  source 1..309: mol_type = other DNA
atggagaagctgctctgcttcctcgtactcacctctcttagccatgcattcggacagacagacatgagtcggaaggccttcgtgttcccgaaagagagcgacacctcatacgtgtctctaaaggctccgctcactaaacctctgaaggcctttacagtctgcctccacttttacaccgaactctcatctactcacgagatcaacacaatttacttgggagggccatttagcccaaacgtcctgaattggcgcgcattgaaatacgaagtacagggggaagtgttcactaagccacagctttggccatag

SEQ ID NO: 219320 - DNA, 309 bp, synthetic construct
  misc_feature 1..309: note = Description of Artificial Sequence: Synthetic coding sequence
  source 1..309: mol_type = other DNA
atggaaaagttgttgtgcttccttgttcttaccagcctgagccatgcatttggtcaaactgacatgtccaggaaagcctttgtcttccccaaggagagcgatacctcatatgttagcctaaaagctcccctgaccaaacctctgaaagcattcaccgtctgtcttcatttctacaccgagttgtcttctacccacgagattaacactatttatctcggtggacccttcagtccgaacgtgcttaattggagggcactgaaatacgaggtgcaaggggaagtatttactaagccccagctctggccttag

SEQ ID NO: 219321 - DNA, 309 bp, synthetic construct
  misc_feature 1..309: note = Description of Artificial Sequence: Synthetic coding sequence
  source 1..309: mol_type = other DNA
atggagaagctgctgtgttttctggtgctgacaagtctgagccatgcgtttggccaaacagatatgtcaaggaaggcatttgtgttcccaaaagaaagcgacacgtcttacgtatcgctgaaggctccgctcactaagccgcttaaggcctttaccgtgtgtctgcacttttacaccgagttatcttctacccatgagattaatacaatttatctggggggaccgttcagtcctaacgttctaaactggcgggcacttaagtacgaagtacagggggaagtatttacgaagccccagctgtggccctag

SEQ ID NO: 219322 - DNA, 276 bp, synthetic construct
  misc_feature 1..276: note = Description of Artificial Sequence: Synthetic coding sequence
  source 1..276: mol_type = other DNA
atggagaagctactctgttttctcgtactgacatcactgtcacacgcttttggacagacagatatgtctcggaaagccttcgtgttcccgaaggagagtgataccagctacgttagcctgaaggcaccccttaccaaacccctgaaagctttcactgtgtgcctgcatttttacacggagttatcaagcactagaggccctaacgtactgaactggcgggcattaaagtacgaggtccagggtgaggtctttactaaaccacagctgtggccctag

SEQ ID NO: 219323 - DNA, 141 bp, synthetic construct
  misc_feature 1..141: note = Description of Artificial Sequence: Synthetic coding sequence
  source 1..141: mol_type = other DNA
atgtgggacttcgttttgtccccagatgagattaacaccatataccttggtggcccattctctcccaatgtgctcaactggcgcgctcttaagtatgaggtccaaggagaggttttcaccaaacctcagctgtggccttag

SEQ ID NO: 219324 - DNA, 1146 bp, synthetic construct
  misc_feature 1..1146: note = Description of Artificial Sequence: Synthetic coding sequence
  source 1..1146: mol_type = other DNA
atgcccttttccaactcacacaatgccctgaaactgaggttcccagccgaggacgagtttcccgatctgagtgctcacaacaaccacatggcaaaggtccttactcccgaactctacgctgagctcagggctaaatcaaccccttccggatttaccctggacgacgtgatccagacaggagtggacaatcctggtcatccatatattatgacggttggatgcgtcgccggagatgaagagagttacgaagtatttaaggatctgttcgatccaatcatcgaagatcgacacggcggatataagccgtctgatgagcacaagaccgatcttaatcccgacaacctacaggggggagatgacctggaccccaattatgtactgtcatcccgcgtgagaaccggtcggagcataaggggcttttgcctacctccgcattgcagccgtggcgagcgtagagctatagagaagcttgccgtggaagctcttagtagtctagacggggacttggccggacgttattacgccttaaagtcaatgactgaggcagagcagcaacagcttatcgatgaccactttctgtttgataaacctgtgagtcctctgttattggctagcggcatggcgagggattggcccgacgccagaggaatctggcataacgataacaagaccttcctggtatgggtgaatgaagaggaccacctccgtgtcatttccatgcaaaaaggcggaaacatgaaggaagtgtttacacgattttgcacgggattgacccagattgagacacttttcaagtcaaaggactacgagttcatgtggaacccgcatctaggatatattttaacttgccccagcaacctgggcacgggactccgagctggtgtgcatattaaactgcccaacctgggaaagcatgagaagttctccgaagtattgaagcgcttacgcctgcaaaagagaggaacagggggtgtggataccgcggctgtgggcggtgtgtttgatgtgagtaacgccgatcgactgggattttctgaggtggagctggtccagatggtggtggacggcgtcaaactcctgatcgaaatggagcagaggctggagcagggacaggccatcgatgatctgatgccagcccagaaatag

SEQ ID NO: 219325 - DNA, 1041 bp, synthetic construct
  misc_feature 1..1041: note = Description of Artificial Sequence: Synthetic coding sequence
  source 1..1041: mol_type = other DNA
atgcccttcagtaactctcacaacgccctcaaattgcgcttcccagccgaagatgaatttcccgacctgtcagcgcataacaaccacatggcgaaagtactgacacctgagctctatgcagagctgcgtgcaaaaagcactccgtcgggctttacattagacgacgtgattcaaaccggagttgacaatccagggcacccatacatcatgacggttggatgtgtggctggcgatgaagaatcttatgaagtgttcaaggacctgttcgaccctattattgaagacaggcacggaggctataaaccatctgacgagcacaaaacagacttgaaccctcctcgaggagctccaagaatcgaaaagcttgccgttgaggcactgtcctccctggacggagacctggccggaagatactatgcccttaagtccatgacagaagcggagcagcagcagttgattgatgaccattttctgttcgacaaaccagtgtcccccctacttcttgcctcaggaatggctagggactggcctgatgcacgcggaatctggcacaatgataacaaaactttcctagtgtgggtaaacgaggaggatcatctgagggtgatcagcatgcagaagggaggcaacatgaaagaggtgttcacccggttctgtaccggtctcacccagattgaaaccctgtttaagtccaaggactacgaatttatgtggaacccccatctaggctatatattaacttgtccttcgaacctgggtacgggcctgcgggctggtgttcatattaagcttcccaacctgggcaaacatgagaagttttccgaggtgctgaaacggctgagactccagaagaggggaaccgggggagttgatacggctgcagtaggaggagtttttgacgtcagcaatgctgaccggctaggttttagtgaggtcgagctggtgcagatggtggtcgatggggtgaagctattaattgaaatggaacagcgcttagagcagggtcaggctatagacgatctgatgccagcccagaagtag

SEQ ID NO: 219326 - DNA, 654 bp, synthetic construct
  misc_feature 1..654: note = Description of Artificial Sequence: Synthetic coding sequence
  source 1..654: mol_type = other DNA
atgccatttagcaacagtcacaacgcccttaaactccggtttccagctgaagatgagtttcccgatctctccgcccataacaaccacatggccaaggttctcactcctgagttgtacgccgaacttcgcgctaaaagcaccccaagtggtttcacactcgatgatgtaatccagactggtgttgacaaccctggacacccctacattatgacagttggatgtgtggcaggagacgaggagtcctatgaggttttcaaagacctcttcgaccccattattgaggatcggcacggaggctataagccttcagacgaacacaaaacggacttgaacccagacaacttgcagggcggtgatgacctggaccctaactatgtgctttcctcacgagttaggacgggacgaagtatccggggattctgtctgcccccacactgctctcgaggggagaggcgggcaattgagaaattggcagtcgaagccctgtcctccctcgatggcgatctcgctggccgttactacgctctgaagtctatgaccgaggcagagcagcagcaattgatcgacgaccattttttgtttgataaacctgtcagcccgctgctcttggcaagcggcatggcacgcgattggccggacgccagaggcatctag

SEQ ID NO: 219327 - DNA, 447 bp, synthetic construct
  misc_feature 1..447: note = Description of Artificial Sequence: Synthetic coding sequence
  source 1..447: mol_type = other DNA
atggcagggcctttctctcgactactttcagctcgacctgggctcaggttactggctcttgccggagccggttccctggcagccggtttcttgctacgcccagagcccgtgagagccgcaagtgaaaggaggcggctgtatccacccagcgcggagtacccagacctgagaaagcacaacaattgtatggcctcccacttaacacccgcagtgtatgctcgcctctgtgataagactactcccactggatggacactggatcagtgtatacagaccggagtggataatcctggtcacccattcattaagactgtgggaatggtagctggggatgaggagacctacgaggtgtttgccgacctttttgatccagttattcaggaacggcacaacgggtacgaccctagaactatgaagcatacaacagatctagatgcatccaagtag

SEQ ID NO: 219328 - DNA, 1254 bp, synthetic construct
  misc_feature 1..1254: note = Description of Artificial Sequence: Synthetic coding sequence
  source 1..1254: mol_type = other DNA
atggctggccctttttctaggttactaagcgctcgccctggactgagactgctggctttggctggcgctggcagtctcgctgcaggtttcctcctcagacctgaaccggtgagggctgccagcgagagaagacgtctgtaccctccttccgctgagtaccccgaccttcggaagcacaataattgtatggcctctcacctgactcccgctgtctatgcccgtctctgtgacaaaaccacaccaacaggctggactctggaccagtgcattcagacaggcgtcgacaaccccggacacccatttataaagactgtggggatggtcgcaggcgatgaggagacgtatgaggtattcgccgatctgtttgacccagtgatccaggagcggcacaatggttacgacccccgtaccatgaagcacactaccgacctagatgctagcaagattcggtcaggctactttgatgaacgctacgttctgagttcacgagttaggacaggtcggtctattcggggtctaagcctgcctccagcttgtacccgtgctgagcggagggaagtcgaaagagtggtggtcgacgccctgtctggtttaaagggggacctagcgggaagatattaccggttgagtgagatgaccgaggccgagcagcaacagctcatcgatgaccacttccttttcgacaagcctgtgtcaccgctgcttaccgcagcgggaatggctcgtgactggcccgacgccagggggatctggcacaacaacgaaaaatcctttctgatctgggtcaatgaagaagaccacacacgcgtgatcagcatggaaaaaggcggaaatatgaagagagtcttcgagagattttgtagaggactgaaagaagtggaacggcttattcaggaaagaggctgggagtttatgtggaatgagagactgggctatattctcacctgcccctcaaatctgggcacaggattgcgggctggggtacatatcaagttaccactgctcagcaaagactcaagattccccaagatactggaaaacctcagactccagaaacgcggaaccggaggagtggatacagctgccactggtggtgttttcgacatcagtaacctcgacagactagggaagagcgaagtggaactggtgcagctggtaatcgatggagtgaattatctgatcgactgtgaacgccgtttagagcgcggtcaggatattcgcattcccacacctgttatccataccaagcattag

SEQ ID NO: 219329 - DNA, 1347 bp, synthetic construct
  misc_feature 1..1347: note = Description of Artificial Sequence: Synthetic coding sequence
  source 1..1347: mol_type = other DNA
atggccggacctttcagccggcttttatctgctcggcctggcctgcgactcctagccctggccggtgccggatcacttgctgccggttttttgttacgccctgaacctgtacgcgctgccagcgagaggcgacgcctctatcctcctagccagacatggccaacaggacagcttcccggaaattgtacacgctccagacgcttgtgccctcccagcatggtgacaggctaccccctgcccagcgcggagtaccctgacctccgcaagcacaacaattgcatggcaagccacctcacacccgctgtgtatgcgaggttgtgtgacaagacaactcctactgggtggacccttgatcagtgtattcagaccggcgtagataatcccggacacccctttataaaaacggtgggaatggttgccggtgatgaagaaacgtacgaagtgttcgctgacctgttcgatcccgtgatccaggagaggcacaacggctatgatccacgaactatgaaacacactactgacctcgacgcatcaaagatcagaagcggctatttcgacgagagatatgtcctgtcatccagggtgagaacgggtcgatccattaggggcctttcccttccacctgcttgcacacgcgctgaacgcagggaggtggagagggtcgtcgtggacgccctgagcggcctgaagggggacttggctggtcgttactaccgcctctccgagatgaccgaagccgaacagcagcagcttattgacgaccacttcttatttgacaagcctgtttcccctcttctgaccgctgcgggaatggctcgcgattggccagacgctagaggcatttggcataataacgaaaaaagctttctgatctgggtcaatgaagaggaccacacccgcgtcatatcaatggagaagggtggcaacatgaaacgcgttttcgagcggttttgcagaggattgaaagaggtggagaggctgatccaggagcgcggttgggaattcatgtggaatgagcgactcggctatatactcacctgcccaagcaacttggggaccggactgcgcgctggtgtgcatattaaactgccactgctttctaaagatagtcgatttcccaaaatcctcgaaaacctccgattacagaaacggggtacaggtggggtggacaccgcagccacgggcggagtatttgacatctccaatttggacagactaggcaagagcgaggtcgagctcgtgcaactggtaattgacggagtgaactatcttatcgattgtgaacgcagacttgaacggggtcaggatatccggatccccaccccagtgatccacacaaagcattag

SEQ ID NO: 219330 - DNA, 1254 bp, synthetic construct
  misc_feature 1..1254: note = Description of Artificial Sequence: Synthetic coding sequence
  source 1..1254: mol_type = other DNA
atggctggaccgttcagtcggctgctctccgcacggcctggacttcgcctgcttgcgctagcaggagccggttctctcgccgcaggtttccttctgcggcctgagccggtacgcgcagcttccgaaaggagaaggttgtatcccccaagcgcagaatatcccgatctccggaagcataacaactgcatggcctcacacctaactcccgctgtctacgccagactatgtgacaagacgaccccaaccgggtggacactggatcagtgtattcaaacgggggtcgataacccagggcatccttttattaaaacagtcggcatggtggctggtgatgaggaaacttacgaagtgtttgccgacctgtttgatccagttatacaggaaagacacaatggctatgatcccaggaccatgaagcacactaccgacttagatgcctcaaaaattagatctggctacttcgacgagaggtacgttctttcttcacgagtgcgcacgggcaggagtatacgaggattatccctgccaccagcgtgcacacgcgcagagaggcgcgaggtggaaagagtcgtggttgacgctcttagtggcctgaagggcgacctcgcaggcagatattatcggctctccgagatgactgaggcggagcagcaacagctcattgacgaccactttttgttcgataagcccgtgtcccccctgttaaccgccgcaggcatggccagagactggcctgatgccagggggatctggcacaataacgaaaaatccttccttatctgggtaaacgaagaagatcacaccagagtcattagcatggagaagggcggtaatatgaagcgcgtgtttgaacgtttctgtagagggctgaaagaagttgagcggctaatccaggaacggggatgggagtttatgtggaatgagcgcctgggatacatcctcacttgccccagtaatctgggaacaggcctgcgcgcaggggtccacatcaagttgcctctgcttagcaaagactcccgctttccgaagattctggaaaacctgcggctgcaaaagagaggaaccgggggagttgataccgccgctactggcggagtttttgacatatcaaatctggatcgactgggtaaatctgaggttgagctcgtgcagttggtcattgatggcgtgaactacctcatagattgcgagcggagacttgaaagaggccaggatatccgaatccccacacctgttattcatacaaaacactag

SEQ ID NO: 219331 - DNA, 765 bp, synthetic construct
  misc_feature 1..765: note = Description of Artificial Sequence: Synthetic coding sequence
  source 1..765: mol_type = other DNA
atggccggacccttttcacggctgttaagcgcacggcctggcctcagactcctcgcactggccggagcgggttcgctggcggcaggcttcctcctgagacccgagcccgtacgggcagcgagcgaacggagaaggctgtatccgccttcggccgagtatccggacttgcgaaagcacaataattgtatggcgtcacacctcacccccgcagtgtatgcacggctctgtgacaagacgaccccaaccggttggacactggatcagtgtatccaaaccggcgtcgacaacccgggtcaccccttcatcaagacagtggggatggtagcaggagacgaggagacttatgaggtgtttgcggatctgtttgaccccgtgattcgtggcctctccctgccccctgcctgcactagagctgagcgtcgcgaggtggaaagagtggttgttgacgcgctcagtggactcaagggcgacttggcgggaaggtactaccgcctcagcgagatgacggaggccgagcagcagcagcttatcgacgatcatttcttattcgacaagccagtgagccccttgctcacagctgccggaatggctcgcgactggccagacgcaaggggaatttggcacaacaacgaaaagagtttcctcatctgggtgaatgaagaagaccatacccgagtgatcagcatggagaaaggcggaaacatgaaacgcgtttttgagcggttttgcagggggctcaaggaggtggtagttggaatcaaatag

SEQ ID NO: 219332 - DNA, 1254 bp, synthetic construct
  misc_feature 1..1254: note = Description of Artificial Sequence: Synthetic coding sequence
  source 1..1254: mol_type = other DNA
atggccggacctttctcccggctgctgtccgcgcgtcccggactgcgtctgttggctctcgcaggagccggttctctggctgccggattcctactgcgtccagagcctgtgcgcgcagcctcagagaggcggcgtttataccctccatctgcagagtatccggatctgcgaaagcacaacaactgtatggcatctcacctgactcctgcagtgtatgcccgattatgcgacaaaaccacaccaaccggctggaccttagatcagtgcatccagaccggtgttgacaaccccggacaccctttcatcaagacggtgggcatggtggctggggacgaggagacctacgaagtgttcgccgacttgttcgatccagtcatccaggagcgccataacggctacgatccaaggaccatgaagcacaccactgatctagatgcatccaaaattcgatctggatattttgacgagcggtacgtcttatccagcagggttaggacaggcaggtccattaggggtctgtccctcccccctgcttgtacaagggctgaacggagggaggtagagcgtgtggtcgtcgacgctctgagcgggctgaagggagatctagccggacggtactatcgattaagtgagatgacagaggctgaacagcaacagctgatagatgatcatttcctgttcgataaaccggtgtcaccccttttgaccgctgctggcatggcacgcgactggcctgatgcaaggggaatttggcataacaacgagaaaagcttccttatatgggtcaatgaggaggatcacacccgggtgatatccatggagaaaggtggtaatatgaagagagtgttcgaacggttttgtcggggtcttaaggaggtggaaagactcattcaagaaagaggctgggagtttatgtggaacgagcgcttaggctatattttgacctgcccgagcaacctcgggacaggcctgcgggcaggcgtccatatcaagctgcccctgctgtctaaagactccaggtttcctaagatactggagaatttgaggcttcagaagcggggtactggaggtgtggatacagcagccactgggggagtcttcgacatctctaacctcgaccgactagggaagtcagaagtggaactggtgcagctcgtcatcgacggcgtgaactacctgatcgactgtgaaagacgcctcgaaagaggccaggacattcgcattcccacacccgtgatacacacgaaacactag

SEQ ID NO: 219333 - DNA, 441 bp, synthetic construct
  misc_feature 1..441: note = Description of Artificial Sequence: Synthetic coding sequence
  source 1..441: mol_type = other DNA
atgcccgtaaaggtacgcacggggaggagcatccgaggactctccctgcccccagcttgtacgagagcagagcggagagaggtggaacgcgtggtagtagatgctctgtccggtcttaaaggggaccttgccggtagatactatcgattatctgagatgactgaagccgagcagcagcagctgatagatgaccattttctttttgataaaccggtgtcgcctctgttgactgcagccggaatggcacgagactggcctgacgcccgagggatctggcacaacaacgagaagtctttcctgatatgggtgaacgaggaggaccatacacgggtcatatccatggaaaaaggtggaaatatgaagagggtgtttgagaggttctgcagggggctaaaggaagttcgggaggactgtgtgggagagctgggtgggaggacttag

SEQ ID NO: 219334 - DNA, 507 bp, synthetic construct
  misc_feature 1..507: note = Description of Artificial Sequence: Synthetic coding sequence
  source 1..507: mol_type = other DNA
atgaaacataccacggacctggatgcctctaagattcgctccggatactttgatgagagatacgttttaagtagtagggtcaggacagggaggagcattcggggactctcattgcccccagcctgtaccagagcagaacgtagagaggtggagagggtggtggttgatgctctcagtgggcttaagggcgacttggctggaagatactacagactgagcgagatgactgaggctgagcaacagcagctgatcgacgatcactttctgttcgataagccggtcagtccactgctaaccgccgcagggatggctagggactggcccgatgcacgaggcatctggcacaataatgagaaatcattcctgatctgggtgaacgaggaagatcatacaagggtgattagtatggaaaaggggggtaatatgaagagggtcttcgagcgtttctgtaggggcttgaaggaagtgagggaagactacgtcggggaattaggcggaagaacatag

SEQ ID NO: 219335 - DNA, 312 bp, synthetic construct
  misc_feature 1..312: note = Description of Artificial Sequence: Synthetic coding sequence
  source 1..312: mol_type = other DNA
atggcaggtcctttctcccggttgctgtccgcacgcccaggcctgcgcttgctcgccttagccggagcaggctcccttgcggcaggcttccttttgcggcctgaacctgtgcgcgctgcatccgagagacggaggttatacccccctagcgccgagtatccggacctccgaaagcataacaactgcatggcctcacatctgacaccggcagtgtatgccaggctctgcgacaaaacaacacccacaggatggacattggatcagtgcattcagacaggggtggacaacccaggccaccctttcattaagtag

SEQ ID NO: 219336 - DNA, 390 bp, synthetic construct
  misc_feature 1..390: note = Description of Artificial Sequence: Synthetic coding sequence
  source 1..390: mol_type = other DNA
atggccggacccttctctcgccttctgtcggcacgccctggcctaaggctccttgcactggccggagcaggatcgctggctgccggatttctcctgcgccctgagcccgtcagggctgctagtgagaggaggcgactataccccccaagtgcggaatacccagaccttaggaagcacaataattgtatggccagtcaccttacgcctgccgtatacgcacgtctctgtgacaaaaccacaccgacgggctggacactagatcagtgcattcaaactggcgtggacaatcccggtcatcctttcatcaagacagtcggaatggtggccggtgatgaagaaacttacgaggtcttcgccgatctcttcgaccctgtcatacaagagagatag

SEQ ID NO: 219337 - DNA, 1017 bp, synthetic construct
  misc_feature 1..1017: note = Description of Artificial Sequence: Synthetic coding sequence
  source 1..1017: mol_type = other DNA
atggccggacccttttcacgactgctctctgcacgtcctggactgaggctcctcgcgcttgctggagcgggttcgctagcagcaggattttgctccgatcggaacctgtatgaattgccagtgaacgatggcggatgtattccgagggagcagtcccagacctggccaacggggcagttgcctggcaactgcactagaagtcgccgactctgccctcccagtatggtaacaggctaccctctgccatccgcagagtatcctgacctgaggaaacacaataattgtatggcatcacatctgactcccgcagtgtatgcacggctctgcgataagaccacccccactggatggacacttgatcagtgcatccagaccggcgtcgataatcctggacaccccttcataaaaaccgtcgggatggtggccggtgacgaagagacctatgaggtctttgctgacctgttcgatcctgtgattcaagaacggcataacggctacgatcctagaacgatgaagcacactaccgacctcgacgcgagtaaaattagatccggctactttgacgaaagatatgttctgagctctagagtgcgcaccgggaggtccatcaggggcctctccctgccgcctgcctgcaccagagccgagcgaagagaggtggagcgtgtcgtcgtcgacgctctgagtggacttaagggcgacctggcgggaaggtattatagactgagtgagatgacggaggccgagcagcagcagctgattgacgatcattttctgttcgacaaacccgtgtcacctctgcttactgcagccggtatggctcgagattggcctgatgccagagggatttggcataacaacgagaaaagttttcttatttgggttaacgaggaggatcacacacgcgtgatctctatggaaaaggggggaaacatgaagagggtcttcgagagattttgtcggggactcaaggaggtccgcgaggactacgtgggtgaactggggggtaggacgtag

SEQ ID NO: 219338 - DNA, 1254 bp, synthetic construct
  misc_feature 1..1254: note = Description of Artificial Sequence: Synthetic coding sequence
  source 1..1254: mol_type = other DNA
atggctgggccattttccaggctcctcagcgctaggccaggtctccggctacttgcgctggccggagccggatcacttgccgcagggttcctgctgaggcctgagcccgtgcgcgcagcttccgagcgaagacggctgtatccaccttcagccgagtacccggacctgcgcaagcacaataactgtatggcttcccatcttactcccgcagtgtacgccaggctgtgtgacaagaccactcccacaggctggactctggatcagtgcatccagacaggcgtggataacccaggacaccctttcattaaaactgttggaatggttgctggggatgaagagacctacgaagtgttcgctgatctgttcgatcccgtgatccaagagcgccacaacgggtacgaccccagaaccatgaaacatactaccgacctggacgccagcaagatcagaagcggctactttgacgaaaggtatgttcttagtagccgggtgagaactggccgatctatcaggggtttgtcgctgcctccggcttgcaccagagctgagcggagagaggtggaacgcgtagttgtggatgccctgtctggcctgaagggcgatttagctggaagatattacagacttagtgaaatgactgaggccgaacaacagcagctcattgacgatcacttcctgttcgacaagccggtttctcctctcctgactgccgctggtatggccagggactggcccgacgcacgaggcatatggcacaacaacgagaagtcgttcctcatctgggtgaacgaagaggatcatacaagggtgatctccatggaaaaaggcggaaacatgaaaagggtcttcgagaggttctgccggggactaaaagaagttgaaaggctgattcaggagaggggctgggaattcatgtggaatgagaggttagggtacattctgacctgcccctctaatctgggaacaggcctgcgcgcaggagtccatatcaagttacccctcttatccaaggacagccgttttccgaagattcttgagaatcttcgcttgcagaaacgcggtacaggtggagtggacactgcagccacaggtggagtatttgacatatcaaacctggacagactgggaaaatccgaggttgagttagtacagctagtaatcgacggagtaaactacctcatcgattgcgagcgaagactcgagcgaggacaggacatccggatacccacaccagtgatccacactaaacattag

SEQ ID NO: 219339 - DNA, 774 bp, synthetic construct
  misc_feature 1..774: note = Description of Artificial Sequence: Synthetic coding sequence
  source 1..774: mol_type = other DNA
atggtcaccgggtacccactgccgtccgctgagtaccccgacttgcgcaagcacaacaattgtatggcatcacacctcacccccgctgtttacgctcggctctgtgacaagacaactccaacgggttggaccctggaccagtgcatacaaaccggtgttgataatccaggccacccatttatcaagacagttgggatggtggccggagacgaggagacctatgaagtgttcgccgacctgttcgacccagtcattcaggaaagacacaatggctatgatccaaggacaatgaagcatacaactgatctggatgcctcaaaaatccggtctgggtattttgatgaacggtacgtgctgagctcccgggtgagaacaggacgttctattcgcggactttctttacccccagcctgtacgcgagcggagcggcgagaagttgaacgagtggtggtagatgctctctcagggctcaagggtgatctcgcaggtcgttactacagactgtcagagatgactgaagctgaacaacagcagttgattgacgatcacttcctgttcgacaagccggtgtcaccactccttaccgccgcaggaatggccagagactggcccgacgcccgaggcatttggcacaataacgaaaagtcttttctaatttgggtaaatgaagaggaccataccagggtgataagcatggagaagggtggaaacatgaagagagtctttgaacgcttctgtaggggccttaaggaagtggttgtggggatcaagtag

SEQ ID NO: 219340 - DNA, 726 bp, synthetic construct
  misc_feature 1..726: note = Description of Artificial Sequence: Synthetic coding sequence
  source 1..726: mol_type = other DNA
atggccggtcccttctcgcgcctgcttagcgcacgcccagggctgagacttctcgctttggcaggcgctgggtctctggccgctgggtttctgttgcgaccggaaccagtacgcgctgcgagcgaaaggagacggctgtatccgccaagcgctgagtatcccgacctccggaaacacaataactgcatggcatcacaccttactccagcagtgtatgcaaggttatgcgataagaccacgccaactggctggacgctggaccagtgtattcagactggcgtggacaatcccggacacccttttattaagacggtgggtatggtggcaggcgatgaggaaacctacgaggtgttcgctgatctatttgatccggtgattcaggaaagacataacggatatgaccctaggacaatgaagcacacaacggatctcgacgcctccaaaatccgtagtggctatttcgacgaacgctatgtcttaagttccagagtcaggaccggtagaagcatccgaggcctttcactgccacctgcttgcacccgcgcagagcgtcgtgaggttgagcgggtggttgtggacgccctatcaggtctgaaaggagacttggcaggcaggtattacaggctgtctgaaatgacggaagccgaacaacaacagcttatagacgaccatttcctgtttgataagccagtctcaccactccttacggctgccggaatggcctag

SEQ ID NO: 219341 - DNA, 1260 bp, synthetic construct
  misc_feature 1..1260: note = Description of Artificial Sequence: Synthetic coding sequence
  source 1..1260: mol_type = other DNA
atggcgagtattttcagcaaattactgaccggacgcaacgcctctctgcttttcgcgaccatgggaacaagtgtactcaccactggatacttgctgaatcgacaaaaggtttgtgcggaagtccgcgaacagcctaggttgttccctccatccgccgactacccagatctgcggaaacacaataactgtatggcggagtgcctgacccctgccatctatgctaagttgcggaacaaagtcacacctaatggatacacattagaccagtgcatacagaccggcgtggacaaccccggtcaccccttcatcaagaccgtggggatggtcgctggcgacgaggaatcgtatgaggttttcgccgacctgtttgaccctgttataaaactccgacacaacggatatgaccccagagtgatgaaacatacaacagacctcgatgcatcaaagattacacagggacagtttgacgaacattatgtgttgtcgagccgggtacgtacaggaaggagtatccgaggtcttagcctcccacctgcatgcaccagagctgaaagaagggaagtggaaaatgtagccataacggccctcgagggtctcaagggagaccttgcgggaagatactacaagctgtctgaaatgaccgaacaggatcagcaacgtttgatcgatgaccactttctcttcgacaagcctgtctcaccactgttgacctgtgcgggtatggctagggactggccggacgccagaggcatctggcataattatgataaaaccttcctgatctggatcaatgaagaggaccataccagagtcatatctatggaaaaagggggaaatatgaaacgagtgttcgagagattctgcagggggctgaaagaggtggagcggctgatacaggaacggggatgggagtttatgtggaatgaaaggttgggatacatcctgacctgcccttccaacctcggcacgggcctgagagcgggtgtgcatgtccgaataccaaaattaagtaaggatccacgcttttctaagatcctcgagaacttacgactgcagaaaagaggtacgggcggagtagataccgcggctgtcgctgatgtctacgacatatccaatattgacaggatcggcagaagcgaggtggagctcgtccagatcgtcattgacggggttaactacctggtggattgtgaaaaaaaacttgagagaggccaagacattaaggtcccgccacctctgccgcagttcggcaaaaagtag

SEQ ID NO: 219342 - DNA, 1260 bp, synthetic construct
  misc_feature 1..1260: note = Description of Artificial Sequence: Synthetic coding sequence
  source 1..1260: mol_type = other DNA
atggcgtccatatttagcaagctgttgacgggtagaaacgccagcttgctgttcgccaccatggggaccagtgtactgacaacaggctacctattgaatcgacagaaggtgtgtgcggaagttcgcgaacagcctcgcctgttccccccttctgctgactatcctgacctgagaaaacacaacaattgtatggctgagtgtcttactcccgctatttatgccaagttgcgcaacaaggtcactcctaatggatatactctcgatcaatgcattcaaacgggcgtggataaccccggacatcctttcatcaagactgtcggcatggtcgcgggtgacgaagagagctatgaagtgtttgccgatttgtttgatcccgtgatcaaactgcgccacaacggctacgacccacgggttatgaagcataccacagacctcgacgcaagcaagatcacgcaaggccagttcgatgaacactacgtgttgagctcccgggtgcgaaccgggaggtcgataagaggcctgtccctgccacctgcctgcactagggccgagaggcgggaggtggagaatgtggcaatcactgcgctcgagggcctgaaaggggacttggctgggagatactataagctttcagagatgaccgagcaagatcagcagagactgattgacgatcatttcctctttgacaagcctgtttccccgctgctaacatgtgccggtatggcaagggattggccagacgcacggggaatttggcacaattatgacaaaacttttctgatttggatcaatgaagaagatcataccagagtcatctctatggagaagggagggaacatgaaaagggtgttcgaaagattctgtcggggactgaaagaagttgaacgactgatccaggaacgaggatgggagttcatgtggaacgaacgcctcggatacattttgacctgcccgagcaacctgggtactggacttcgggcaggggtgcacgtgaggattcccaagctttccaaggatccaaggtttagcaagatcctggagaacctgagactgcaaaagaggggcaccggaggtgtcgacactgccgctgtcgccgacgtgtacgacattagtaatatcgaccgtataggtagaagtgaagtagagcttgttcagattgtcattgatggtgtgaattatcttgtggattgtgagaagaaactcgaaagagggcaggacataaaagtgccgcctccactcccacagtttgggaaaaagtag

SEQ ID NO: 219343 - DNA, 1260 bp, synthetic construct
  misc_feature 1..1260: note = Description of Artificial Sequence: Synthetic coding sequence
  source 1..1260: mol_type = other DNA
atggcctctattttcagtaagctattgactggacggaacgcctccctgctgttcgcaaccatggggactagcgtgctgactaccggctacctgcttaatagacagaaagtatgcgctgaggttcgggagcaaccgaggctcttcccgccatcggcagattacccagatttgcgcaagcataacaattgtatggccgaatgtttgacacctgccatctatgctaaactcagaaacaaggtcaccccgaatggctacactctcgaccaatgtattcagacgggtgttgataacccgggtcacccattcattaaaaccgtggggatggtagccggagacgaagaaagttatgaggtgttcgcagatctgttcgatccagtcattaagctgcggcacaatgggtacgaccctagagtaatgaagcatactaccgatctagatgccagtaagattacccagggccagttcgatgagcactacgtgttgtctagtagagttcgcaccggcagatcaatcaggggattgagtctgccacctgcttgtactcgggctgagcgcagagaggtagagaacgtcgccataactgccctcgagggattgaagggcgatttggctggcagatattataagctgagtgagatgacggagcaggatcagcagaggcttattgacgaccatttcctgttcgataaacccgtgtctccactgttgacctgtgcaggcatggcaagagattggcccgacgccaggggcatctggcacaattacgataaaactttcctcatttggataaacgaggaagaccacactagggtcatctcgatggaaaagggtggaaatatgaaacgggtgttcgagcggttctgcagaggtttaaaagaggttgaacgactgattcaggagcggggatgggaattcatgtggaatgagcgattgggttacattcttacgtgcccaagtaatctgggcaccggtctccgtgcaggggtgcatgtgagaatccccaagctgtctaaggatcccagatttagcaaaatcctcgaaaacctacgactacagaagcggggtactggtggcgtggacaccgctgccgtcgccgacgtttacgacatttcgaatattgaccgcatcggaagatcagaggtggaactcgttcagatcgtcatcgatggcgtgaattacctcgtggactgcgaaaaaaaactggagcgagggcaggatatcaaggtacctcctcctcttccccaattcggtaagaaatag

SEQ ID NO: 219344 - DNA, 513 bp, synthetic construct
  misc_feature 1..513: note = Description of Artificial Sequence: Synthetic coding sequence
  source 1..513: mol_type = other DNA
atggcctctattttttctaagctcctcactggacggaacgccagtttactgttcgccacaatgggaacaagcgtccttactaccggctatctgctaaacagacagaaagtatgtgctgaggtgcgggagcaaccgagactgtttcctccttcggctgactaccccgatttgcgcaagcataacaactgcatggccgagtgcctgaccccggctatttatgccaaattgaggaataaggttactcccaatgggtatacgctggaccagtgtatccagactggagtcgacaatccagggcatcccttcatcaagacagtgggaatggtggccggagacgaggagtcctatgaggtgttcgccgacttattcgaccccgttatcaaactgcggcataatggttatgacccccgtgttatgaagcataccacggaccttgatgcttcgaagatcacacagggccagtttgatgagcactatgtgttgagtagcagggtgcgtactggcaggtcttag

SEQ ID NO: 219345 - DNA, 1098 bp, synthetic construct
  misc_feature 1..1098: note = Description of Artificial Sequence: Synthetic coding sequence
  source 1..1098: mol_type = other DNA
atgggagttcctaggcctcagccttgggcgcttggcctgcttctgttcttgctgcccggtagccttggagcagaaagtcatctctctctgttgtaccatcttactgcggttagttccccggcacccggaacccccgctttctgggtgtctggttggctgggaccacaacagtatcttagttataatagtctgaggggtgaggccgaaccctgcggggcttgggtgtgggagaatcaagtgagttggtattgggagaaagagactacagacctgaggatcaaagagaagttgtttctcgaggcttttaaagctctcggtggcaagggtccctacactctgcagggactcctcggctgtgagctgggacctgataacaccagcgtgcccaccgcaaagtttgcgctgaacggcgaagagttcatgaatttcgatcttaaacaaggaacatggggtggtgattggccagaagccctggcgataagccagaggtggcagcaacaggacaaagcggctaacaaagaactgacctttctcctcttctcatgtcctcatagactgcgggagcacctcgagcgcggtcggggtaatctagaatggaaggagcccccttctatgagattgaaggcaagaccatcgagccccggattctccgtcttaacatgtagcgctttttctttctacccacctgagctccagctgcggttcctgaggaacggtctggccgctggaactggccaaggagatttcggccctaattcagacggcagtttccacgcctctagtagcctgaccgtcaagtctggtgacgaacatcattactgctgcatagtgcaacatgctggtctggcacaacctctgagagtggagctagaaagtcctgccaaaagcagtgtcttggtcgtcgggatagtaatcggggtattgctgctgactgctgctgctgtgggaggggcactgctctggagaagaatgcgctccggcctgcccgcaccgtggatcagcctgagaggggatgacactggggtgctgctccctacccccggtgaagcacaggatgcagatctgaaagatgtgaatgtgatccccgctactgcgtag

SEQ ID NO: 219346 - DNA, 7329 bp, synthetic construct
  misc_feature 1..7329: note = Description of Artificial Sequence: Synthetic coding sequence
  source 1..7329: mol_type = other DNA
atggccgagaatctgcttgatggaccaccgaaccctaagcgggctaagctgtcaagtcctggcttctcagccaatgattccaccgatttcgggagcctctttgacttggagaatgatcttcctgacgagctgattcccaatggcggtgaattggggctgctcaattcaggcaaccttgtgccggacgcggcatcaaaacacaagcagctctctgagcttctcaggggtggatcaggctcctcaatcaacccgggtattgggaacgtgagtgctagcagcccggttcagcaggggttgggaggccaggcccagggacagcccaattcagcaaatatggcttccctgagcgctatgggcaaatcacctctgagccaaggggatagctctgcccctagcttgccaaagcaggcggcttccacatcaggacccacacctgctgcgtctcaggctctgaatccacaggcccagaagcaggtggggttagcaacatcatctccagccactagccaaaccggcccaggcatctgcatgaatgcgaactttaaccagactcaccccggtcttctcaactccaactctggacactcacttataaaccaggcgtcccagggccaggcacaagtcatgaacggctcactaggggcagcgggtagaggaaggggcgcaggtatgccataccccactcctgcgatgcaaggtgcgtccagcagtgtattagccgagactcttacccaagtaagcccccagatgacaggccatgctggattaaatacagcacaggcaggcggtatggcaaaaatgggaatcactggcaatacctctccatttggacagcctttttcacaggctggtgggcagcccatgggagcaacgggcgtgaacccccaacttgcaagcaagcagtcaatggtcaactctttaccaaccttccctacagacatcaaaaatacctcagttaccaacgtacccaacatgtcccaaatgcagactagcgtgggaattgtacccacccaggcaatcgcgacaggccctaccgctgaccccgagaaaagaaaattgatccagcagcagctcgttctgctgctccacgcccataagtgccagcgcagagagcaggccaacggagaggtacgagcttgtagtctccctcattgccgaactatgaaaaacgtgctaaaccacatgacccattgccaggccggaaaggcctgccaggttgcccactgtgctagctcccggcagatcatctcccattggaagaattgtaccaggcacgactgtccagtgtgcctccctttgaagaacgcctcagataaacggaaccagcaaactattctggggtctcccgcttccgggattcagaacacaattggaagcgttggtacgggccagcaaaatgcaactagcttaagtaacccaaaccccattgacccctcgtccatgcagcgagcatatgccgcactcggtctgccctacatgaatcagccgcagactcaactccaacctcaagtgccaggtcagcagccagctcaacctcaaactcatcagcagatgaggactctgaatcctttgggaaataaccctatgaacattcccgctggcggtattacaacagaccagcagccgcctaacctgataagcgagtcggccctgcctaccagtctaggagcaactaaccctttgatgaatgatggaagcaacagcggaaacatcgggactctgagtactatccctactgcagcccctccttcctctactggcgtaaggaagggctggcatgaacacgttacccaggatcttagaagccatttggttcacaaactggtccaggccatattccctactcctgacccagccgcactgaaggatcggagaatggagaatcttgtggcttatgccaaaaaggtggagggcgatatgtatgagagtgccaattccagagatgaatactaccacctcctggccgaaaaaatatacaaaatccagaaagagctcgaggaaaagagaagaagccgcctacataagcaaggcattttaggaaatcaacccgcactcccagcacctggagctcaaccccctgtgatccctcaggctcagccagtgaggccaccaaatggccctctgagcctgcctgtcaaccgtatgcaggtcagccaaggcatgaactcgttcaaccccatgtcacttggaaacgtacagttacctcaggctcctatgggtcctcgagcagcaagtcccatgaaccacagcgtccagatgaactccatgggtagcgtgcccggtatggccatcagtccctcacgtatgccccagccgccaaatatgatgggggcacatacaaataatatgatggctcaagctccagctcaatcccagtttctgccccagaatcagtttccgtccagttccggggctatgagcgtgggcatgggccaaccccctgcacagacgggtgtgagccaaggacaggtgcccggagccgctctgcccaatccactaaatatgctgggccctcaggcctcccagttaccctgtcctcccgtgacccagtcacctctgcaccccactccaccccctgcgtcaaccgctgcagggatgccaagtttgcagcacacaactccgccaggcatgactccgccacagcccgctgccccaacgcaaccgagtactcccgttagtagcagcggccagaccccgacgcctacaccaggaagtgtaccctctgccacgcagacccaatcgacaccgaccgttcaggccgctgcccaggcacaggtgactccccagccacagacccctgtgcaaccgccatcagtggcgacacctcagtcctctcagcagcaaccaacacctgtccatgcacagccacctggcacgccgctgtcgcaggccgctgcctccatcgacaacagagtaccaacaccctccagcgtagctagcgctgaaacaaatagccagcaaccgggacctgatgtgcctgtcctggagatgaagacagaaacgcaagcagaagacactgaaccagatcccggtgaaagtaagggagagcctcgatccgagatgatggaggaggacttgcagggtgcctcacaggtgaaagaggaaactgacatcgctgaacagaaatctgagccaatggaagtggatgaaaagaagccagaggtgaaagttgaagtgaaagaggaagaagagagctctagcaacggaactgcgagccaatccacttcgccatcccaaccacgcaagaaaatttttaagcccgaggagctgaggcaggccttgatgcctaccctggaagcattataccggcaagatccagaaagcttgccattccggcagcctgtcgatccgcagctcttgggaattcctgattattttgatattgtcaaaaaccccatggatctgtccactataaagagaaaacttgacacggggcagtaccaggagccatggcagtacgttgacgatgtttggctgatgtttaataacgcctggctgtataataggaaaacatcaagggtttacaagttctgctctaagttggccgaagttttcgagcaagagatcgaccccgtcatgcagagtctgggttattgctgcgggcgtaagtacgagttcagcccacagaccctgtgctgctacggaaagcagctttgcaccattcccagggacgccgcttactattcctaccagaacaggtaccacttctgcgagaaatgctttactgaaattcaaggcgaaaatgtgactctgggcgatgatccctcccaacctcagactacaatctcgaaggatcagttcgaaaaaaagaagaatgacacgctcgatccagagccgtttgtggactgcaaggagtgcgggcgaaagatgcaccagatttgtgtgcttcactacgacataatctggccttccgggttcgtatgtgataactgtctgaagaagacaggacgaccaaggaaggaaaacaagttctctgccaaacggttgcagacaacaaggcttgggaaccaccttgaagatcgggtaaacaagttcctacggcgacagaatcacccagaggcgggagaagttttcgtgagggtggttgcctcatcagacaagaccgtggaggtgaagccaggaatgaaatcacggtttgttgattctggggagatgtctgaatcatttccctaccgaactaaagctttgtttgcctttgaggagatcgatggggtggacgtatgcttcttcggcatgcatgtgcaggaatatggctccgactgcccaccccctaacacccggagggtatacatttcctatttagattccatccatttcttccggccacggtgtctacgtactgccgtgtatcacgaaattttgatcgggtacctagagtacgtaaagaaattaggatacgtgactgggcacatttgggcctgccccccatccgagggcgacgattacatctttcattgccacccaccagatcagaaaattcccaaaccaaagcgcctgcaagagtggtataagaaaatgctcgataaggctttcgctgagaggatcattcatgactataaagacatctttaaacaggcaaccgaggacagactgacatcggcaaaggaactgccatactttgaaggggacttctggccaaacgttctcgaggagtcaattaaagagcttgagcaggaagaggaagaacgcaagaaggaagagtccacggcggcatctgagaccactgaggggagtcaaggagattcaaagaacgccaagaaaaagaataataaaaagactaataagaacaagagttcaatctcgcgggcaaacaagaaaaagcccagcatgcctaacgtctctaacgatctgtctcagaagctgtatgccacaatggaaaagcacaaagaagtgttcttcgttatccatctgcacgcaggacccgtgataaacaccctcccaccaatcgtagacccagaccctctgctgtcctgcgacctgatggatgggagggatgcctttctgacattggcgagggacaaacactgggagtttagttcccttcggcgtagtaaatggtcaacgctgtgcatgctcgttgaactgcacacgcagggccaggatcggtttgtttacacatgtaatgaatgtaaacatcacgtggagacaaggtggcactgtacagtgtgtgaggattacgacctgtgcataaattgttacaatacgaagtctcacgctcataaaatggttaagtggggtctgggtctggacgacgaagggtcgtcacagggagaaccccagagcaagtcccctcaggagtccagacggttgtccatacagcgatgtatacagagtctagtacacgcctgccagtgtcgaaacgctaattgctctctgccaagctgtcaaaaaatgaagagggtggtacagcacaccaagggttgtaaaagaaagaccaacggaggctgccctgtttgtaagcaacttatagccctatgctgttaccacgcgaagcactgtcaagagaacaaatgtccagtacctttctgcctgaacattaagcacaaactaagacagcagcaaattcagcaccggctgcagcaggctcaacttatgagacggagaatggctaccatgaacaccagaaatgtgccgcaacaaagtctgccctcacctacctctgcgccaccgggaacccctactcagcagccctctaccccacagacacctcagcccccagcacaaccacagccatcaccggtctctatgtcccccgctggtttccctagcgtggcgaggacgcagcctcctactactgtgtcgacgggaaaaccaacctcacaagtccccgcacctccaccgcctgcccaaccacctcctgccgctgtcgaagccgcaaggcagattgagcgcgaagcccaacagcaacagcacctgtaccgtgttaatatcaataattccatgcccccaggcagaacagggatgggaacccctggttcacagatggctcccgtgtccctgaacgtgccacgacctaaccaggtgtccggcccagtgatgcccagcatgcctccaggacagtggcagcaggccccactgccccagcagcaaccaatgccgggactccccaggccagtgatcagcatgcaggcccaggccgcagtagcaggcccacgcatgcctagcgtgcagcctcccagaagcatcagtccatccgcattgcaggacttactcagaaccctgaaaagcccctcatctcctcaacagcagcaacaagtgctcaacatactgaagagtaaccctcagctgatggccgcttttataaaacagagaacggctaagtatgtcgccaaccagccgggaatgcaacctcagcctggattgcaaagccagcctggcatgcagccccagcccggtatgcatcagcagccctcccttcagaatctgaacgctatgcaggcaggcgtccctcgccctggcgtgccgcctcagcagcaggctatggggggtctgaatccccagggccaggccctgaacatcatgaatccaggacacaatccaaacatggcctctatgaaccctcagtaccgcgagatgctccggaggcagctgctccagcagcaacaacaacagcagcaacagcagcagcaacagcagcagcagcagcagggttcagcagggatggctggcggtatggctggccatgggcagttccaacagccccaggggccagggggatacccacctgctatgcagcagcaacagaggatgcagcaacacctacctttacaaggatccagcatgggccagatggctgcccagatgggacagttggggcagatgggacagccaggactgggcgcagattccacacctaatattcaacaggccctgcagcagcgcatcctgcagcagcaacagatgaagcagcaaatcggaagccctgggcagcctaacccaatgtcgcctcagcaacacatgctgtcagggcaaccgcaggcgagccaccttccagggcagcagattgctacaagcctttcaaatcaggtcagaagcccggctccagtgcagtcaccacgcccacagtctcaacctccgcatagctccccatcacctcgcatccagccacagccaagcccccatcacgtgagcccccagacgggatccccccaccctgggctggcagtaacaatggccagtagtatcgatcaggggcatttaggtaatcccgaacagagcgctatgctgccacaattgaataccccaagtcgatctgcacttagtagtgagctctctcttgtgggggacacaaccggtgacacactggaaaagtttgtcgagggtctctaa

SEQ ID NO: 219347 - DNA, 2934 bp, synthetic construct
  misc_feature 1..2934: note = Description of Artificial Sequence: Synthetic coding sequence
  source 1..2934: mol_type = other DNA
atgcatgtgcaagaatacggctctgattgcccacccccaaacacacggcgtgtgtacatctcttacctagactcaatccatttcttcagacctaggtgccttcgaaccgcggtgtaccacgagatccttataggctatctggagtacgttaagaaactcggctacgtgaccggacacatttgggcctgcccaccatccgaaggggatgattatatcttccattgtcacccgcctgaccagaaaatccctaagcctaagcgattgcaagaatggtacaagaagatgttggacaaagccttcgcggagagaatcatccatgattacaaagacatcttcaagcaggccacagaagaccgccttactagcgcaaaggaattaccttatttcgagggcgatttctggccaaatgtgttggaggaaagcatcaaggaactggagcaggaagaggaggaacgcaagaaggaagaaagtactgcagcttctgaaacaacagaggtgttttttgtgatacaccttcatgcgggaccagtcattaatactcttccgccaattgtagatccggatcccctattgtcttgcgatttaatggatgggagagacgccttccttaccctggcgagagataaacactgggaattctcaagtttgcggcgtagtaagtggagtaccctgtgcatgctcgtagagttacatactcagggtcaagacagatttgtgtatacttgcaacgaatgtaagcaccatgtggagactaggtggcactgtacagtctgcgaagactatgatctgtgcattaactgttacaatacaaaatcgcatgcccacaagatggtgaaatggggtcttggcttagatgacgaaggcagctctcagggtgaacctcaatctaagtccccacaggagagcaggaggctaagcatccagagatgtatacagtcccttgtccatgcttgtcagtgcagaaacgccaattgctcacttccttcatgccagaagatgaagcgggttgtccagcacactaaagggtgcaaacgaaagacaaacggaggctgtccagtatgtaaacagctgatcgccctgtgttgctatcacgccaaacactgccaggagaataagtgcccggtcccattctgcctgaacataaaacacaaactgaggcagcagcagatacagcacaggctccagcaggcgcagttgatgaggagacggatggccacaatgaacacccgtaatgtgccccagcaatctttgcccagccctacatctgcccctcccggaacaccaacccagcagcccagcacgcctcagactcctcagccacccgcacagcctcagccttcaccagtgtcaatgtcacccgcaggcttcccgtctgttgcacgcacccaaccacccaccaccgtctctactggaaagcccacctctcaggtaccggcacctccccctcctgcccagcctccaccggctgcggtggaagctgcgcgacagatcgaaagagaagcgcaacagcagcagcatctgtatagagtcaacatcaataatagcatgcctcccggacggacaggcatgggcacacctggatctcagatggcccctgtttcgctgaatgtacctcggcctaatcaagtgtcaggccctgtaatgccctccatgccccctgggcagtggcaacaggcaccgctgccacagcagcagcctatgccaggattaccgcgtccagttatctcaatgcaggcacaggcggctgtggctggaccacgtatgccctcagtgcagccacccaggagtataagtcccagtgctctccaagacctgctgagaacactgaagtctccttcctctcctcagcagcagcagcaggtactgaatatactgaagtctaaccctcaactcatggctgcattcatcaagcaacgcacagccaagtatgtggccaatcagcccggtatgcaaccacagccaggcctgcaatcccagccaggtatgcagccccagcccggtatgcaccagcagcccagcctgcaaaacctgaacgctatgcaggcaggtgtccccaggcctggcgtcccaccccagcaacaggcaatgggtggactgaacccacagggccaagcactcaacatcatgaatccaggccacaatccaaacatggcgtccatgaaccctcagtaccgcgagatgctgaggcgtcagctgctgcaacagcagcagcagcaacaacagcagcagcagcagcagcagcagcagcagcagggctccgcaggtatggcgggtggaatggcaggacatggccagttccagcagcctcaggggccaggaggatatcctcctgccatgcagcagcagcagcgtatgcagcaacatctgcccctacagggctcttccatgggccaaatggctgcccagatgggccagctgggccaaatgggtcaaccaggacttggagcagattccacaccaaacatacagcaggctctgcagcagaggatactgcaacaacagcagatgaaacagcagatcggctcaccagggcagcccaacccaatgagcccccagcagcacatgctgtctggccaacctcaggccagccacctccccggacagcagattgcaacttccctgtccaaccaggtgcggtcgcccgctcccgtgcaaagtccacggcctcagagtcagcccccacattccagccccagccccagaattcaacctcagccatcgccacaccacgtgtctccacagactggtagcccacatccaggactcgccgtcacgatggccagttctattgaccaggggcacctgggaaatccagaacaatcggccatgcttcctcagttgaacaccccatcccgttcagccctctcaagcgagctgagcctggtcggcgacacgactggcgacaccctggaaaaatttgtagaggggctttag

SEQ ID NO: 219348 - DNA, 7214 bp, synthetic construct
  misc_feature 1..7214: note = Description of Artificial Sequence: Synthetic coding sequence
  source 1..7214: mol_type = other DNA
atggccgaaaaccttttagacggcccacccaatccaaagagggccaagctgtcctctccaggtttcagcgcaaatgacagcaccgattttgggagtctatttgacctggagaacgatctgccggatgaactgatccccaatggtggagaactaggcctgctgaatagcgggaacctggttcccgacgccgctagtaaacataagcaattgtccgagctgttacgtggcggttccggttcgagcatcaacccgggaatcgggaacgtgagtgcttcttctccagtacagcaagggttaggtggacaggcacaaggccagccaaattcagcaaacatggcgtccctgtcagccatgggtaagtcacccctgagtcaaggcgattcctccgccccaagcctacctaagcaggccgcatccactagcgggccaacacccgctgccagtcaggctctgaacccgcaggcacagaaacaggtcggactcgccacctcctctcctgcgacttcacagaccggcccaggtatctgcatgaatgctaatttcaatcaaacccacccaggactgctgaattcaaactccggccatagcctgatcaatcaggcatctcagggacaggcccaggttatgaatggcagtctcggcgctgcaggacgagggcgaggtgctgggatgccctacccaaccccggcaatgcagggcgcttcttcgtcagtgctggccgaaacactgacacaggtaagccctcagatgacgggtcatgcaggactcaacacagcacaagcgggtgggatggcgaaaatggggatcaccggaaatacatcgcctttcggccagccttttagtcaagcgggaggccagccaatgggggcaacgggcgtcaatccacagctggcatccaagcagtccatggttaattccctgcctaccttccccacggatatcaaaaacacttccgtgacaaacgtacctaatatgagccagatgcagaccagcgtgggcatcgtgccaacccaagcaattgcaaccgggcctactgcagatccagaaaaacgcaaactgattcagcagcaactggtgctgctgcttcacgcccataaatgccaacggagggagcaggcgaacggcgaagtcagagcctgctccctgccccactgcagaactatgaaaaacgtcctgaatcacatgacacactgccaggcgggaaaagcatgtcaggcgatcttgggttcacctgctagtggcatacagaacactatagggagcgtaggcacaggacaacagaacgctaccagtctctctaacccgaatcccatcgacccttccagtatgcagagagcgtatgctgccttgggactgccctatatgaatcagccacaaacgcagttgcaacctcaagtgcccggtcagcagcccgctcagccccaaacccatcagcagatgcgcacactgaatcccctcggtaataaccccatgaacatccctgccggaggaattacgaccgatcaacagcccccaaatctcattagtgagtcagctctgcccacttctctgggcgctacaaaccctctgatgaatgacggaagcaattccggaaatattggcacattatcaaccataccaacggccgctcctccgtcgtcaacaggcgttcgcaagggctggcacgagcacgtaacacaggacctgcgctcacacctggtccacaagttggttcaggccatcttccctactcccgaccccgctgccctgaaagacaggcggatggagaatttagttgcctacgcgaaaaaagtggagggcgatatgtacgagagcgcgaatagtagggatgagtactaccatctgctcgcagagaaaatttacaagattcagaaagaactcgaggagaaacgacgcagtaggctgcataagcagggcatcctcgggaaccaaccagcgcttcccgcaccaggagcccaacctccagtaatcccccaagctcagccagtgaggcctcccaacggacctttgagcctgccggttaatcgcatgcaggttagccagggaatgaatagcttcaaccctatgtccttgggtaacgtgcagctgccacaggcacccatggggccacgcgcagcgagccccatgaatcattccgttcagatgaattccatggggtcagtgcctgggatggctatctccccaagccgaatgccacagcctccaaatatgatgggggcacacacaaataatatgatggcccaagcacccgctcaaagccagttcctgcctcagaatcagttccctagtagctctggggcaatgtctgtggggatggggcagccccctgcacagacaggggtgtcacagggtcaggttccgggtgccgctctacccaatcctctcaatatgcttgggccacaggccagccaactaccttgccctcccgtgacacagtctcccctccaccccacgccgccaccagcttctaccgccgcaggaatgccttcacttcaacataccactcctccaggcatgaccccaccacagcccgcagcccctacgcagccttcaactcctgtgtccagcagtggccagactcctactccaactccaggaagcgtgccaagtgcaacccagacacagtctaccccaaccgtacaggccgcagcgcaggcccaagtgacccctcagccacaaactcccgttcagcccccttctgtcgccacgccccagagctcacaacagcagccaaccccagtccatgcgcagccgcctggcactcccttatctcaagctgcggctagcatagataatagagtcccaaccccttctagcgtggccagcgccgagacaaactcccagcagccgggtcccgacgtcccagtcctcgagatgaagacagaaacccaggctgaagacacagagccagaccctggggaaagcaaaggagaacctcgttccgagatgatggaggaagatctccagggagcgtctcaagtgaaagaggagactgacatcgccgagcagaagtctgaaccgatggaagtcgacgagaaaaagcctgaggtcaaagtggaggtgaaggaggaggaagagagctcatccaacggcaccgcgtctcagtctacgtcacctagtcagccccgaaagaagatattcaagcccgaggaacttcgccaggcgcttatgccgactctagaggccctttatcgccaggaccctgagagcctaccattcagacagcctgtcgatcctcagttgttgggtatccctgactatttcgatatcgtgaaaaatccgatggatctgagcactatcaaacgaaagctggataccggccagtaccaagagccttggcagtacgttgacgatgtatggttgatgtttaacaacgcatggctctataacaggaagaccagccgggtgtataaattttgctctaaactagccgaagtcttcgagcaggagattgatccagtcatgcagtcactgggttactgctgcggaaggaaatatgagttctcccctcagacactgtgttgttacggcaaacagctctgtacaataccacgggatgctgcatactacagctatcagaatcggtaccacttttgcgaaaaatgttttacggaaatacaaggcgaaaacgtgacactgggcgacgatccgtctcagccccagaccacaatcagtaaagatcagtttgagaaaaagaagaatgatacccttgatccggagccattcgtcgactgcaaagagtgcggcaggaagatgcaccagatctgcgtgctgcactacgatatcatttggcctagcggctttgtgtgtgacaactgtctgaagaagaccggaaggcctcgtaaggagaataaattttccgccaaaaggctgcagactaccaggctaggtaatcatctcgaagatcgcgtgaataagttccttcgacggcagaatcatccggaagcaggagaggttttcgtgagggttgttgcctctagtgacaaaactgttgaagtgaaacctgggatgaaatcacgctttgtcgacagcggagaaatgtccgagagttttccatataggaccaaagcattgttcgcatttgaagaaattgatggcgtggatgtttgctttttcggaatgcatgttcaagagtacgggtccgactgtccccctcccaatacacggagggtgtacatcagctatctggattccatccactttttcaggcctaggtgtctcaggacagccgtctatcatgaaattctaatcggatatctggaatatgtgaagaagttgggttacgtgactggccatatctgggcttgtccgccaagtgagggtgatgactacatcttccattgccatccaccagatcagaaaattcctaaacccaagcgccttcaggagtggtataagaagatgcttgataaagcctttgcagaacggattatacacgactataaggatatctttaaacaggccacagaggataggctcacctcagccaaagagcttccatattttgaaggggacttctggccaaatgttctggaagagagcatcaaagagctggaacaagaagaagaggagcgaaaaaaagaagaatcaacagctgcgagtgaaacaaccgagggcagtcagggggactcaaagaatgccaaaaagaagaataataagaaaacaaataagaataaatcctctatcagtcgggcaaacaagaaaaagccttctatgcccaacgtgagtaacgacctgtcacaaaaactatacgccacaatggagaagcacaaggaagtgttttttgtgatccatctgcacgctggaccggtaataaataccctccctccaatcgtggatccagacccgctgctgtcatgtgaccttatggacggcagggatgcattcctcacgttggcaagggataagcactgggagttttctagccttcgcagatcaaagtggagcacgctttgcatgctcgtagaactgcatactcaggggcaagataggttcgtttacacctgtaatgagtgcaagcaccacgtagagaccagatggcattgcaccgtttgcgaagactatgatttatgcattaattgttacaacactaagtcacatgcccacaagatggtcaaatgggggctggggctggacgacgagggtagctcccagggcgagcctcagtctaaatccccacaagaaagccgacgccttagtatacaacggtgcatccagagtctggtccatgcctgccagtgtagaaacgccaactgttctttgccctcatgtcaaaaaatgaaaagagtggtgcagcataccaaagggtgcaaaagaaaaacaaatggcggttgtcctgtgtgtaagcagctgatcgctttgtgctgttatcatgctaagcactgtcaggagaacaagtgccctgtccctttttgcctcaacatcaaacacaaactccgccagcagcaaattcagcaccgattacaacaggcccagttaatgagaaggaggatggccactatgaatacccgcaacgtgccccagcaatcgttgccatccccaactagcgcaccacctgggactcctactcaacagcctagtaccccacaaactccacaaccacctgcccagccccagccttcccctgtgtctatgagtcctgccggatttccctctgtcgctaggactcagccacctaccaccgtatccactggaaagccaacatcacaggtgcccgctcctccccctcccgctcagccacctcctgcagccgtggaagccgctaggcaaatcgaaagagaagcccagcagcagcagcacctatatcgggtaaacatcaacaattctatgcctcctggcagaaccggaatgggcacaccaggctctcagatggccccagtttcacttaacgtccctagacccaatcaggtgtcaggtccagtcatgccaagcatgccccctggccagtggcagcaagcgccactcccccagcaacaacctatgcctggtttgcctcgccctgtgattagcatgcaggcacaggcggctgtagccggtccgagaatgccttccgtgcagccccctcgttcaatttctccgtctgcccttcaagacttgctgcgaacactcaagtccccatcttccccacaacagcagcagcaggtgctcaatatcctgaagtcaaatccacagctgatggccgcattcataaaacagagaactgccaagtatgtcgccaatcaaccaggcatgcagccccaaccaggcctgcagtcgcaaccagggatgcagccccagcccggaatgcatcaacagccctccctacagaacctgaacgctatgcaggcaggagtgcccagacctggagtaccccctcagcagcaggctatggggggactgaatccccaggggcaagccttgaacatcatgaatcccggacataaccccaacatggcctccatgaacccccaatatcgcgagatgctcaggagacagctcttgcagcaacaacagcaacagcagcagcagcagcaacaacaacagcagcagcagcaagggagcgctggaatggcaggcggaatggctggacacggtcaattccagcagccccaaggacccggtggatatcccccagctatgcagcaacaacaacggatgcagcaacacttgcccctacaaggtagcagcatgggacagatggcagctcagatgggccagctgggacaaatgggtcagccgggtttaggagccgactctactcctaatatccaacaggcactgcagcagaggatcctccagcagcagcaaatgaaacaacagataggctccccaggccagccgaatcctatgtccccccagcagcatatgctaagcggacagcctcaggcctctcacctacctgggcagcagattgcgacatcgctcagcaaccaggttagaagcccggcacccgtgcagtcgccccgaccgcagagccagccccctcactcctcaccctccccgcgaatccagccccaaccctctccccatcacgtgtcaccccagacgggctccccccatccaggcctcgcagtgaccatggccagctctatcgatcaaggccatttagggaacccggaacagagcgccatgcttcctcagcttaacaccccctcgaggtctgcactgagctccgaactgtccctggtgggagataccacgggcgataccttagagaagtttgtcgagggcttgta

SEQ ID NO: 219349 - DNA, 7418 bp, synthetic construct
  misc_feature 1..7418: note = Description of Artificial Sequence: Synthetic coding sequence
  source 1..7418: mol_type = other DNA
ctgcggggtgccgtagcggttgccgagatctggccccctccccctcccccagggctgaggccacccagtccctctgcacctgcccgtcccctcgcagcaagggcccgatccagtccatcccaacccgctggacccccaactcctgtccgggcactcgcgggacccgctgccagggcaaggggatgtttcagagaacaggtaaagatggccgagaatctgttggacggccctccaaacccaaagagagctaaactcagttcgccagggttctccgctaacgactcaaccgactttggaagtctgttcgacctggagaacgatctccccgatgaactcatccccaatggcggagagttaggccttctcaactctggcaaccttgtgcccgatgcggcatcaaaacacaagcaactctctgaacttttaaggggagggtcgggctctagcatcaaccctggaattgggaatgtaagtgccagctccccggtgcagcagggcctaggcggtcaggcacagggacagccaaattctgctaacatggcttccttgagtgccatgggaaagtcacctctttcacagggggattctagtgcacctagccttcccaaacaggccgcatctacttccggccctacccccgctgcttctcaggccctgaaccctcaggctcagaagcaagttggtctggctacatcaagccccgctaccagccaaactggaccagggatttgcatgaacgcaaactttaaccagacacatcctggtctgctgaattccaatagtgggcactccctgattaatcaggcttctcaggggcaggctcaggtgatgaacggctcgcttggcgcagcaggtcggggaagaggcgcagggatgccctatccgaccccagctatgcagggcgctagtagcagcgttctcgccgagacactgactcaagtcagtccccagatgacaggccacgcagggctcaataccgcccaagcaggcggaatggcaaagatgggaatcacagggaataccagcccttttgggcagccatttagccaagccggtggacagcctatgggagcaacaggtgtgaacccacagcttgcttccaagcagagtatggtcaactcattgcccaccttccctaccgacatcaagaacacaagtgtgactaacgtgcctaatatgtcccagatgcagacgagcgtcggaattgttcccacacaggcgattgccaccggacctactgccgaccccgagaaaaggaaactgatccagcaacagctggtgctccttctgcatgcccacaaatgccaacggagagagcaggcaaatggcgaagtgagagcctgctccttgccacactgtcgtacaatgaaaaatgttctgaaccacatgactcattgccaggccggaaaagcttgtcaggcaattctgggcagtcccgcttcaggaatccagaatacaattggcagtgtggggaccggacaacaaaatgccacaagcctgtctaaccctaatccaattgacccaagcagtatgcagagggcttatgcagccctggggcttccttacatgaaccagccgcaaactcagctccagcctcaggtgcctggccaacagcccgcacaaccacagacccatcagcagatgagaaccctgaatccactcgggaacaatccgatgaatattccggctgggggaattaccaccgaccagcagccccctaacttgatatccgaaagcgccctccccactagcctgggagcgacaaaccccctaatgaacgacgggtcaaactccggcaacatcgggactctttcaactattcctactgccgcacctccatcaagcacgggagtaagaaagggatggcacgagcatgtgacacaggacttgcggagccatctagtgcacaaactggttcaggcaattttcccaaccccagaccccgcagccctaaaagaccgtagaatggaaaatctggttgcctacgccaagaaggtggagggtgatatgtacgagtcggccaactctcgggatgaatactatcacctgctggccgagaagatctacaagatccagaaagagctagaggagaaaaggcggtctcgacttcacaagcagggaatccttggaaaccagcctgcgctgccagcacctggggctcaaccgcctgttatccctcaggctcaaccagtcagacctcccaacggccctctgagcttacctgtgaataggatgcaagtcagtcaggggatgaattcatttaaccccatgtccttaggaaatgtgcaattgccacaagcccctatgggcccaagggctgcgagcccgatgaaccactcggtgcaaatgaacagtatgggcagcgtgcccggaatggccatttccccctcacggatgcctcagcctcctaacatgatgggggcacacacaaataacatgatggcgcaggccccagcccagtctcaattcctacctcagaatcagtttccgagttcttccggagctatgtccgttggaatgggacagccaccggcacaaaccggagtgtctcagggtcaggtgcccggagccgcactgccaaaccccctgaatatgttaggtccacaggcctcccagctgccttgtcctcccgtcacccagagcccattgcacccaacacctccccctgcctctactgctgccggtatgccaagcctacagcacacaacgccccctggcatgacacctcctcagcccgcagcaccaacacagccatccacgccagtgtcgtcatctggacagaccccaacgccaacaccagggagcgtaccctccgctactcagacccagtctacacccacagtacaagcagctgcgcaggcgcaggttactccacaacctcaaacccctgtccaacctccatcggtggccactcctcaatcatcccagcagcagcccacccccgttcacgcgcagcctccaggaacgcccctttctcaggccgcagccagcattgacaaccgcgtgcctactccttcatccgtagcctccgccgaaacaaattcccagcagcccggtcctgacgttcccgtgttggagatgaaaactgaaacacaagcggaggacacagagcctgacccaggggaaagtaagggcgaacccaggtcagaaatgatggaagaggatcttcaaggagcttcccaagtgaaggaggaaaccgacattgctgagcagaaatccgagcctatggaggtggacgagaagaaacccgaggtaaaggtggaagttaaagaggaagaagaatcctcgtccaacggaactgcttcccagtctacatcaccctctcaacctaggaagaaaatctttaagccggaagagctgaggcaagcactcatgccaacactggaggcactgtaccggcaggaccctgaatccctgcctttccgtcagcctgtggacccacagctgcttggcatcccagactatttcgacatcgtgaagaatccgatggacctatctacaattaaacggaaactggacacagggcagtatcaggagccatggcagtacgtggacgacgtctggttaatgtttaataacgcctggctgtataaccgcaaaacatctagggtctacaaattttgttcaaaattggccgaagtcttcgaacaggagattgaccctgttatgcagagcctcggatactgctgcggcaggaaatacgagttttcgccgcaaactctctgctgctatggtaaacagctttgtacaatacctcgggatgcggcatattatagttaccagaatagataccacttctgcgagaaatgcttcaccgaaatccagggtgagaacgtgacactgggagatgacccgagccagccgcagaccacgatctccaaggatcagttcgaaaagaagaaaaacgacaccctggacccagaacctttcgtggattgcaaagaatgtggtcggaaaatgcatcagatctgtgttctgcattatgacattatttggcctagtggtttcgtgtgcgacaattgcctaaaaaagacaggcagacctcgaaaggaaaataaattttctgctaagcgactgcagaccactcggctgggcaaccacctggaggatcgcgttaataagttcctgagacgccagaaccatcccgaggctggcgaagtgtttgttagggtggtcgcatccagcgataaaaccgtggaggtgaagccgggtatgaaaagcagattcgtggacagcggcgagatgagcgaaagctttccttaccggaccaaagccttatttgcttttgaggaaattgatggagtggacgtatgtttttttggcatgcacgtccaggaatatggttctgactgtccacctcctaataccagacgggtgtatatttcttatctggattcaatacattttttccgacctcgatgtcttcgtactgctgtgtaccacgagatcctgattgggtatctggagtacgtgaagaaactcggttatgtcacggggcacatttgggcgtgccccccatcagaaggcgacgattatatctttcactgtcaccctccagaccagaaaattcccaaacccaagaggctgcaggaatggtacaaaaaaatgctggacaaggcctttgctgaacgtatcattcatgactataaagatatctttaaacaggctactgaggataggttgacgtcagcaaaagaactgccttatttcgaaggggacttctggccgaatgtactcgaggaatccattaaggaactagaacaggaggaagaagaacgaaagaaggaggaatctactgccgcaagtgaaacgaccgaaggaagtcagggcgacagtaaaaacgctaaaaagaaaaataacaaaaagacaaataaaaataaatcctccatcagccgtgcaaataagaaaaaacccagcatgcctaatgtcagtaacgacctgagtcagaagctatatgctactatggaaaaacataaggaggtgtttttcgtgatacacttgcacgcgggtccagtaattaacaccctgccacccattgtcgaccctgacccactcttgagttgtgacctaatggatggtagagacgctttcttaactctggcccgagataaacactgggagttctcctcactgagaaggagcaagtggtcaacgctgtgtatgctcgtggagctgcatacacagggccaggaccgcttcgtgtatacctgtaacgaatgcaaacatcacgttgaaaccaggtggcactgcacagtgtgcgaggactacgacctgtgcattaattgctacaacacaaagtctcacgcacacaagatggtcaagtgggggctcggactcgatgacgaagggtcctcccagggtgagcctcaatcgaagagccctcaggagagccgaagactgtctatacaacggtgtatccagtcactggttcatgcctgtcaatgtcggaacgctaactgctccctccccagctgccagaagatgaagcgggtggtacagcacaccaagggatgcaagcgcaagaccaacgggggttgtcctgtatgcaagcagctgatcgctctgtgctgctaccatgcaaagcactgtcaggaaaacaaatgccctgtccctttctgcctgaacattaagcacaaactgagacaacagcaaatccagcaccgactgcagcaagctcagctgatgcgaaggcggatggccacaatgaatactagaaacgtccctcaacagtccctgccttcgccaacatctgccccacccggaacccctacacagcagccatcaacaccacagactccacagcccccagctcagccccaaccctcacctgtgtcaatgtcaccggcaggattcccgtccgtggcaagaacacagcccccaaccacagtgtccaccggaaagccaacatctcaagtgcccgcaccaccacccccagctcaaccgcctcctgcggctgtggaagcagccagacaaatcgagcgggaagcccagcagcagcagcacctttaccgcgtgaatattaacaacagtatgccacctggacggaccggcatgggcacccccggaagccaaatggcgcctgtatctctcaatgtacctcgtccgaaccaggtctccgggcctgtcatgccgtcaatgcctcccggacagtggcagcaggctcctttgccccagcaacaacctatgccaggcctgccacggccagtgatcagcatgcaggcccaggccgcagtagccggacctcgcatgccttccgttcagcctcctagaagtatctccccaagcgcattacaagatctacttcgcacacttaaaagccccagctcccctcagcagcagcagcaggttctgaatatactgaaaagtaaccctcagttgatggcagcttttattaagcaaagaacagctaaatatgtggctaatcagccagggatgcagccccagccaggtctgcagtcacagccaggcatgcagccccaaccgggtatgcaccaacaaccgagtctgcaaaacctaaacgcgatgcaagctggcgtacctcgtcccggagtgccaccacaacagcaggcaatgggcggtctgaacccacaaggccaggcccttaacattatgaacccaggccacaatcctaatatggcaagtatgaacccacagtatcgggagatgctgcgaaggcaactgctgcagcagcagcagcagcaacagcaacagcaacagcaacagcagcagcagcagcagggtagtgcagggatggcaggtggcatggctggacacggacagtttcagcagccccaaggccctggaggttatccacctgcgatgcagcagcagcagaggatgcaacagcacctcccgcttcagggatcatcgatgggtcagatggccgctcagatggggcagctggggcagatgggacaacccggactgggagctgattccacccctaacatccagcaggccttgcaacaacgaatactgcagcagcaacagatgaagcaacagatcggtagtccagggcagccaaaccccatgtcgccacagcagcatatgctgtcaggacagccacaggctagccacttgccaggacagcagattgctacctcattgagcaaccaggtcaggtcgcccgcaccagtgcagagtcctcgaccacaaagccaacccccacacagttctccatccccaaggatccagccgcagcctagtccccatcatgttagcccacaaaccggctctccccaccctggcctcgccgtaactatggccagctcgattgaccagggccatctcggcaatccagagcagtcagcgatgctcccccagcttaacactcccagcaggagcgcactgtcttcagagctgagcctggtcggcgacactaccggcgacaccttagagaagttcgttgagggattgta

SEQ ID NO: 219350 - DNA, 1782 bp, synthetic construct
  misc_feature 1..1782: note = Description of Artificial Sequence: Synthetic coding sequence
  source 1..1782: mol_type = other DNA
atggctactagtaacaaccctaggaagtttagcgaaaaaatcgcactgcacaaccaaaaacaggctgaagaaactgcagcgtttgaggaggtgatgaaagacctgtccttgacgcgagctgcgagactgcagcttcagaaatcacaatacctccagctgggaccctccagaggtcaatactacggcggatccctcccaaacgtcaatcagatcgggtccgggactatggatctgccattccagacaccgtttcaatctagcggtttagacacttcccggaccaccagacatcacggcttggtcgaccgcgtgtaccgggagcgaggtcgattgggttctcctcaccggcgtccgctgagcgttgataaacacggcaggcaggctgattcctgcccatatggaacaatgtacctgagcccgccagctgatacttcctggaggagaacaaatagcgattcagccctgcatcagtcaaccatgactccaacgcagccagaaagcttcagttccggctctcaggacgtacaccaaaagcgagtgctgttgctgaccgtccccggaatggaggagactacgagcgaagccgataagaacctgagtaagcaggcatgggacacaaagaaaactggcagccggccaaagagttgcgaggtacccggtatcaacatcttcccatctgcggatcaagagaataccactgcattgatccctgcgacacataataccggtggcagtctaccagacctgactaacattcatttcccttcccctttgcctacccccctcgatcccgaggaacctaccttccccgctctgtctagctcaagttcaactggaaacttagcagctaatctcacccacctgggcataggaggcgctggccaagggatgtctacacccggttcttcaccgcagcacaggcccgctggggtaagtcctctttccttgagcaccgaagctcggcgacagcaggcgtctcccacactctcaccattgagccccattacacaggctgttgcaatggacgctctgagtctcgagcagcagcttccatatgctttttttacccaggcgggttcgcagcagccccctcctcagccacaacccccaccgcctcccccacccgcttctcaacagcctccccctccaccacccccacaggctcccgtgcgcctgcctcccggaggacccctgctgccatctgcctcccttacccgcggaccacagcccccaccccttgccgtgacggtgccatctagcctccctcaaagtcccccagagaatcctggccaaccatctatggggatcgatatcgcatccgcccctgccctgcagcaatatcggaccagcgccggatctccagcgaaccagtctcccaccagcccggtgtctaaccagggattcagccctgggagctctccccagttagaacagttcaacatgatggagaatgcgataagctcttcctcattatatagccctggcagcacgctcaattactcacaggcagccatgatgggtttgaccggatcgcacggctctctcccagatagccagcagcttggttatgccagccacagtggcattcctaacattattctcaccgtcaccggtgagagtcccccatctctctccaaagagcttacctcacacaggggacatctgcctgacggcccacctgtctccggacacgctggcaccctacctctgtcgcgacctgacggcgcaagccctgcaaggggccgaccatgcagcgtgcccaggcagaggcctagtttatag

SEQ ID NO: 219351 - DNA, 1905 bp, synthetic construct
  misc_feature 1..1905: note = Description of Artificial Sequence: Synthetic coding sequence
  source 1..1905: mol_type = other DNA
atggccacctccaataaccctagaaaattctctgagaaaatagctcttcataaccaaaaacaggcggaagagacagcggcatttgaggaggtcatgaaggatctatctctcaccagagcagcccgattacaattacaaaagtctcagtatctgcagctagggcctagtaggggccagtactacggcggatccttacccaacgtcaatcagataggatcaggaaccatggatctgccttttcagacaccgtttcagagctcaggcctagatacttctcgcactacccgacaccatggtctcgtggaccgagtttatcgggagcggggtagattgggcagcccgcaccgtcggccactcagcgtcgataagcatggtagacaggcagattcctgcccttacggcactatgtacctgagtccccctgctgacacttcctggaggagaactaattccgattccgctctgcaccagagcacaatgacaccaacccaacccgagtccttttcctcaggatcccaagatgtgcaccagaagcgcgtgctgctgctaactgtgcccggaatggaagaaacaacttccgaagctgataaaaacctctccaagcaggcgtgggataccaagaaaaccggatcgcggccaaaaagctgcgaggtcccaggtataaatattttcccatccgccgatcaggaaaacacaacagctctgattccggctacacacaacacaggaggatccctccctgacctcacgaatatccactttccgtctcctctccctacaccgctggacccggaggagccaacattcccagcattgagttctagtagctctactggcaatctggcagctaatctaacccatctgggcataggtggcgctggacagggaatgtccacaccgggatcatccccacaacatcgccctgccggtgtatccccattgtcgctgtcgacagaagctagaagacagcaggcgtccccaaccctctcacccctgtcacctattacccaggccgtcgctatggatgccctcagccttgagcagcaactgccatatgctttctttacacaggccggttctcagcagccgccacctcaacctcagccaccacctcccccaccaccagcttcacagcaaccaccacccccacctccccctcaagcccctgtccgacttcctcctggcggacccttactccctagcgccagtctcacgagaggcccacaacctcccccattggccgtcacggttccaagcagcctaccgcagtcaccccctgagaacccagggcagccctcgatgggcatcgatattgcatctgcacctgctctgcaacaatataggacctccgctggcagccccgcaaatcagtctccaacctctcccgtgtctaaccaaggatttagccctggctcaagcccacagcatacatcaacgctaggcagtgtcttcggggatgcctactatgagcagcagatggcagcacgccaagctaacgccctatcgcaccagctggaacaattcaacatgatggaaaacgccatttctagctcctccttatacagccctggttccacgcttaactattctcaggccgcaatgatgggtctgacaggcagccacggttcactccctgactctcagcaattaggttacgcaagccattcaggaatacccaatatcattttgacagtcaccggagagtcgcctccatcgctgtccaaagaattgacctcttcactggctggggtgggggacgttagttttgattcggactcgcagttcccgcttgatgaattaaagatcgaccctctcaccctagacggattacacatgctcaatgacccagacatggtgcttgcagaccctgcgaccgaagacaccttcaggatggatcgcctttag

SEQ ID NO: 219352 - DNA, 1953 bp, synthetic construct
  misc_feature 1..1953: note = Description of Artificial Sequence: Synthetic coding sequence
  source 1..1953: mol_type = other DNA
atggccacctcaaataatcctcgcaaatttagtgagaagatagcccttcacaatcagaaacaagcagaagaaacggcggctttcgaggaggtgatgaaggatttgtctcttaccagagctgctcggctacaactgcagaagagtcaatatcttcagctgggacccagccgcggacaatactacggaggctctctgccgaacgtgaaccaaattggctcaggtaccatggacctgccctttcagccttctggctttctcggagaggcactcgcggctgctcccgtctcgctgaccccttttcagagctcaggcctcgatacctctcggacaaccagacaccatggtctggtggatcgggtttaccgagagagggggcgactggggagcccccaccgaaggccattgagcgtggataagcatggtaggcaggctgactcgtgtccctatggcacaatgtatctgtctcccccagccgatacaagctggaggcggaccaatagcgattccgccctccatcagtcaaccatgacccctacgcagcccgagagtttcagtagtggatctcaggacgtgcaccagaaacgcgtactactgctgactgtccccggtatggaagagaccacgagcgaggcagacaaaaatctgagtaagcaggcctgggacaccaaaaaaacagggagtcgtcctaagagttgcgaagtgccaggcattaacatatttccctccgcggatcaggagaacactacagcactgataccagcgacgcataacactgggggaagcttgccggatctgactaacatacacttccctagccctctccctacccctttagaccccgaagaaccgacattccccgcactttcatcaagctcttcgaccgggaaccttgctgccaacttaacccacctggggatcggcggagcaggtcaaggaatgagtacccccggaagctccccgcagcatcgcccagccggagtgtcacctctgtcactttctaccgaggccagacgtcagcaggcctctccaacgctttccccattaagccctatcacccaggccgttgctatggatgctttgtcactggagcagcagcttccctatgcgttcttcactcaggccggatcacagcagcctcctccccagccacaacccccacccccaccccctccagcatcccagcagccaccgcctcctccacccccacaagctcccgtcaggctcccacccggagggccactactgccaagtgcctccctgaccaggggacctcagccacctcccctcgctgtgacagtgcctagctctttaccacagagtcctcctgagaaccctgggcagccttcaatggggattgacatcgcctccgctcctgcactccaacaatatcgtacatcagccggatctccggcaaaccagtcccccacatctccggtgagtaatcagggattttctcccggtagttcaccacagcatacctcaaccctgggaagcgtgtttggggatgcatactatgaacaacaaatggccgcacgacaggccaacgccttaagccatcagttggaacagttcaacatgatggagaatgccattagcagttccagtctctattcacctggctccacgcttaattacagccaagctgccatgatgggactaactggctcccacggaagcctcccagactcacagcagctggggtatgcctctcattcaggtatccctaacataatcttaactgtaactggcgaatctccccctagcctgagtaaggagctgacatcaagtctcgcaggcgtcggggatgtctctttcgacagcgattcacagttccccctggatgaactcaagattgatccattgacactcgacgggctacacatgctcaatgatcctgacatggtactggctgatccggcaaccgaggataccttcaggatggaccggttatag

SEQ ID NO: 219353 - DNA, 2082 bp, synthetic construct
  misc_feature 1..2082: note = Description of Artificial Sequence: Synthetic coding sequence
  source 1..2082: mol_type = other DNA
atggcgacttccggagctaacggccctggtagcgcaactgcctccgcgtccaacccgcgtaaattcagcgagaaaatcgcgttacagaagcagcgtcaagcggaggagaccgccgcattcgaggaagtgatgatggacattgggtcaaccaggctgcaggcgcaaaagctgagacttgcttatacccgctctagtcattatggcggatcactccctaacgtgaaccagattggatccggcttggccgagttccagagtccgctgcacagcccactcgatagctcacgcagtaccaggcatcatggtctggtcgaaagggttcaacgcgacccgaggagaatggtaagcccactccggagatacacacggcacatcgacagctctccttactcgcccgcttatctgtctcctcctcccgagagttcttggcgccgaacaatggcatggggcaatttcccagccgagaagggccagttgttccgcctgccatccgccctaaatcggacgagctctgattccgcactgcatacgagtgtgatgaacccaagcccccaagatacatacccgggaccaacaccacctagcattttgccctcacggagaggcggaattctggatggggagatggatcctaaagtgccagccatcgaggaaaacctgctggatgataagcatttgctgaaaccttgggacgccaagaagttgtcttctagcagctcaaggccccgttcgtgcgaagtacccggaatcaacattttccctagcccagaccaacccgctaatgtgcccgtgcttcctcccgctatgaacaccggcggttcactccccgatttgacaaatctgcactttccccctcctttaccgacacccctggaccccgaagagactgcctaccctagcctaagcggtggtaatagcacaagtaacctaacccatactatgacccacctggggatatccagaggcatgggactcgggcctgggtacgacgcgcctgggcttcactcccccctctcccacccatccctccagagcagtttgagcaaccccaacttacaggccagtctatcctccccgcagccgcagttacagggctcccatagccatccctctctgcctgcctcttctctggctcgacacgtcttacctaccacaagcctcgggcatccctcgctgtccgctcctgctttgagcagttcatcctcatcaagctccacatcctcccctgtgcttggtgccccatcctaccccgcaagtacgccgggagcgtcccctcaccatagacgggtacctctgagccccctcagtcttctcgcagggcctgcagatgccaggcggtcacaacagcagttaccaaagcagttctcgcccactatgtcccctacactgagctccattacacagggcgtgccactcgatacctccaagctctctaccgaccagcgtctgcctccttatccatattcctcaccatcactcgtgctgccaactcagccgcatacacctaagagcctgcagcagcccggattgccaagtcaatcttgctcagtgcagagttcagggggacagcctcccggtcggcagtcacactacgggacgccgtacccccctggaccctcaggacacggtcagcagtcctaccaccgacccatgagcgactttaacctggggaatcttgagcagttctcaatggagtcccccagcgccagccttgtcctggatccgccaggcttcagtgagggccctgggtttcttggcggtgaaggacctatgggaggcccacaggatccccacaccttcaaccatcagaatctgacccactgctcccgacatggttcgggtcccaacataattctgacgggcgattccagcccaggcttcagcaaagaaatcgccgctgccctagcgggtgttccaggctttgaagtttcagcggctggcctggagctaggtctcgggctggaggatgaactccggatggaaccacttggactggaaggcctgaacatgctgtctgacccctgtgccctgttgcctgatccagccgttgaggagtcctttagatctgaccggcttcagtag

SEQ ID NO: 219354 - DNA, 1860 bp, synthetic construct
  misc_feature 1..1860: note = Description of Artificial Sequence: Synthetic coding sequence
  source 1..1860: mol_type = other DNA
atggcagcgtcccccggatccggctctgctaatcctaggaagttctccgagaaaatcgccctccacacacaaagacaggcggaagagacccgggcttttgagcagctgatgaccgacctgactttgtcaagggtgcagttccagaaattgcagcagctgcggcttacacagtatcatggcggatccctgccgaatgtgtcccagctgagatcttccgcctctgaattccagccctctttccaccaggcagacaacgtccggggaactcggcatcacggccttgttgagagaccatcacggaatcgtttccacccgctgcacagacggtcaggagataagcctgggagacaatttgacggctctgcctttggggcaaactactcgtcgcagcctctcgacgaatcgtggcctcggcagcagccaccctggaaggacgagaaacaccccggattcaggctgacatcagcactgaacagaacaaatagtgattccgcactgcacacttcagctttgagcactaagccccaggatccttacggcggaggaggtcagtccgcctggccagccccttatatgggcttttgcgacggagaaaacaacggtcacggcgaggttgccagctttccaggaccattgaaggaggaaaaccttctcaatgttccaaagccactgcctaaacagctatgggaaactaaagagatccaatccctttccggccgtccaagaagttgtgatgttgggggtggtaatgccttcccacacaacggacagaacctgggacttagcccctttctcggcaccctgaataccggcggatctctcccagaccttacgaacctgcactattcaacccccctgccagcaagcctggacacaacggatcatcatttcggctcgatgtccgtggggaactctgtgaacaatattccggctgctatgacacatctcggaattagatcctcgagcggtcttcaatcatctcgcagtaacccatccattcaggcaacactgaataagaccgtcctgtccagttccttaaacaatcacccacaaactagtgtgcccaacgccagtgccttacatccatcgctgaggctgtttagcctatctaatccaagcctgtcaactacaaatttatcagggccatccaggcggcgacagccccctgtaagtcctctgaccttgagccccggaccggaagcgcaccaggggttttcacggcagctgtccagcaccagcccactcgccccataccccacaagtcaaatggtgtcatctgatagatcacagcttagcttcctgccgacagaggcccaagctcaggtaagccctccacccccttacccagcccctcaggagctgactcagccactcttgcagcagcctcgtgctcccgaggcccctgcacagcaacctcaagccgcaagctctctgcctcagtcagattttcagttattgccagcccaaggtagctctctaacaaacttttttccagatgtgggatttgaccagcagtcaatgcgacccggaccagcatttccgcagcaggtccctctggtgcagcaaggcagccgggagttgcaagactcatttcacctgcgccctagcccctactcaaattgtggctccctgccaaacaccatcctccccgaagacagctccacaagcctctttaaggatctcaacagtgcactggccggtctcccagaagtgtccttgaacgtagacacccctttccctttagaggaggaacttcaaatagagcccctcagcctggacggcctgaatatgctaagcgactcctccatgggacttctcgatccaagtgttgaggagactttccgcgcagacagactatag

SEQ ID NO: 219355 - DNA, 1857 bp, synthetic construct
  misc_feature 1..1857: note = Description of Artificial Sequence: Synthetic coding sequence
  source 1..1857: mol_type = other DNA
atggccgctagcccaggtagcgggtccgctaaccctcgtaagttttccgagaaaattgccctgcacacacagaggcaggccgaggagacaagagcattcgagcagctgatgaccgatttgactttgtcgagggtgcagttccagaaactacaacagctgcgtttgacccagtatcacggagggtccctgcccaatgtgtcccagcttaggtcatctgcatctgaattccaaccctctttccaccaggccgataacgtaagaggcactcggcaccacggtctggtggaaaggccgagtcggaaccggtttcaccctctgcaccgaaggagtggagataaaccgggtcgccagtttgatggatctgcgttcggcgcaaactactcttctcagcctctggacgaatcctggccccgacagcagccaccatggaaggacgaaaagcatcccggatttcgacttacttccgccctgaacaggaccaactctgacagtgcgctacacacatctgccctctccacaaagccccaggacccatacggagggggagggcagtcagcctggccggctccttacatggggttctgtgatggggaaaataatggtcacggagaggtagcatcttttcccggacccctcaaggaggaaaatttactgaatgtccctaagcccttgcctaaacaactgtgggaaacaaaagaaattcagtctctctccggcagacctaggagctgtgacgtggggggaggtaacgcctttcctcacaacggtcagaacctgggcctctccccctttctcgggacacttaataccggtgggtctctgccagatctgactaacttgcactactccactcctctccctgctagtctggatacaaccgatcaccacttcgggagcatgagcgttggcaattcggttaacaatattcccgcagcgatgacccatctcggcattcggagtagctcaggactccaatctagcaggtccaaccctagcatacaggctacactcaacaaaactgtgctgtcctcatcactcaacaaccatccgcaaacgtccgtgccaaatgccagcgcactgcatcccagcctcagactgttttccttatctaatccgtctctatcaaccacaaacctgagcggccctagtaggcgccgacaacctccagtgtcccctctcactttgagcccaggaccagaagcccatcaaggattctctcggcaactcagctccacctctcccctggcaccataccctacatcacagatggtgtcttcagaccgatcacagttatcttttttaccgacagaggcccaggcccaggtgtcccctccccctccctatcccgcacctcaagagctgacccagccgcttctgcagcagccaagggctccagaagcacccgcacaacaacctcaggcggcaagtagccttccgcagagtgatttccaactgctccctgcccaagggtcatcgctgacaaatttttttcctgacgttggcttcgatcagcagtctatgcgccctggtccagctttcccacagcaggtgcccctggtgcagcaagggagcagggaattgcaagatagcttccacctgcgccctagcccttacagtaactgcggatcattgccaaatactattctaccagacagctcaaccagtttgttcaaggaccttaactccgcgctggccggtcttccggaggtctcgctgaacgttgacacacctttccccctcgaggaggagctccagatcgagcctctctccctggacggactgaatatgcttagtgattcatctatgggccttctggatccttccgtggaagagacatttagagccgatcggctgtag

SEQ ID NO: 219356 - DNA, 1749 bp, synthetic construct
  misc_feature 1..1749: note = Description of Artificial Sequence: Synthetic coding sequence
  source 1..1749: mol_type = other DNA
atgaccgacctaactttatcgcgggtgcagtttcagaagcttcagcagctaagactgacccagtaccatgggggatctctccccaacgtgtcccaactgaggagcagcgcttccgagtttcagccatccttccatcaggcagataacgttcggggaacaaggcatcatggtctggtggaacgaccttcccgtaatcggtttcatcctctgcacagaaggagtggcgacaaaccgggtcgtcaattcgacggcagtgctttcggtgctaactactcttcccagccgctggatgaatcgtggccccgacagcaacccccttggaaagacgagaaacatcctggctttaggctgacgtccgctttgaaccggactaattctgatagtgccctgcacacgtctgccctttctacaaaaccccaggatccgtatgggggaggcggtcagagtgcgtggcccgctccctatatgggattttgtgacggggagaacaatggtcacggcgaggtggcctcctttccaggtcccctgaaagaggagaatctgcttaacgtgccaaagccactccccaaacagttgtgggaaaccaaggagattcagagtctgtcaggcagaccaagatcctgtgacgtcggtggcggtaatgcctttcctcacaacggtcagaatctgggcctgtcaccatttctgggcactctgaataccgggggatctctacccgatttgacaaatctacactactcaacaccgctacctgcctcactggatacaaccgatcaccatttcgggtctatgtctgtcgggaattctgtgaacaacatccccgcagccatgactcacttaggcattaggtcctcatcaggccttcagagcagtaggagcaacccttcgatacaggccacactgaacaaaacggtgttatcttctagtctgaacaatcatcctcagacaagtgtgcccaacgcgtctgccctgcatccctcattgagactgttttctctgtccaatccttccctcagcacaaccaacctgagcggacccagccgtagacggcagccgcctgtgagtcctttgaccttaagtcccggaccagaagcgcatcagggcttctcccggcagctgtcttccactagccctctcgccccttacccaactagccagatggtgtcatcagataggagtcaactgtccttcctgccaaccgaggcccaggcccaggtcagtccaccccctccttatcccgctccccaagagctgactcagcccttgctgcagcagcccagagctcccgaagccccagcacaacagcctcaggccgcatcctccctgccccagtccgacttccaactcttgcctgcccagggatccagtctcacgaattttttccccgatgtcggatttgaccaacagtccatgcgcccaggccctgcctttccacaacaggttccccttgtgcagcagggcagcagggaactgcaggattcatttcatcttaggccctccccttactccaactgtgggtcactgccaaataccatcctcccggatagctcaaccagcttatttaaggacctgaattctgcgctggctggactgcctgaggtatcactcaacgtcgacaccccattccccctggaggaggagctgcagattgagcctctgtctcttgacggtttaaacatgctgagtgattccagtatggggctgttggatccctctgtggaggaaaccttccgggcagacaggttatag

SEQ ID NO: 219357 - DNA, 672 bp, synthetic construct
  misc_feature 1..672: note = Description of Artificial Sequence: Synthetic coding sequence
  source 1..672: mol_type = other DNA
atgacttggcgacatcatgtcaggttacttttcacggtgtcactcgccctgcagattattaatctgggcaacagttatcagcgggagaagcacaatgggggacgggaggaagtaaccaaagttgccactcagaaacacaggcagtctcctttgaactggaccagctctcatttcggtgaagtgacgggctcagcagaaggctggggacctgaagagcctctgccctactctagggccttcggtgaaggggcaagcgctagacccagatgctgccgtaacgggggtacatgcgtcctcggttccttctgcgtgtgtcccgctcatttcacagggaggtactgtgaacatgatcagaggcggagtgaatgtggagccctagagcatggggcatggaccttgcgggcttgtcacctgtgtcgctgcatcttcggagcattgcattgcctgcccctccaaacacccgatagatgcgatcctaaggactttctggcgagtcacgctcacggcccttctgctggtggagccccttcccttctgctactcttgccatgtgccctcctgcaccggctattgaggccagacgcacctgcccacccaaggtctctggttcccagcgtattgcaaagagaaagacggccatgcggtcggcctggcctcggccacagactgtag

SEQ ID NO: 219358 - DNA, 2511 bp, synthetic construct
  misc_feature 1..2511: note = Description of Artificial Sequence: Synthetic coding sequence
  source 1..2511: mol_type = other DNA
atgacggcaaccgtggaaaatctcaccttccagaaggataccctggggaacgcggtggataagaatcgcagacacggctcgacagagccattggtcctcgcttggtcttcccagttccgacggctcacatggggctgtgccctggatgcgctgcacaggtccccttgcgtggctgcctcgcagcacggagtgacgcatctcatccggtcttcccgcacgccacactcaacccgctgtagaaaagaagacgctcagccaggccatcatggtaacggggcagctagtgtcaccgcgcaggccaggggccagagatccgtgctccaggtcccgcttcccgttcctcgatcctgcctgttctctgaatcgttcgtcgtttccgtgagctcgcagtcccgctttcttgctagtgtgcccggaacaggtgttcagcgtagtacggccgctgacatggctgcaagcacggccgctggcaaacaaagaatcccaaaggtggctaaagttaagaacaaggcacccgctgaagtccaaattacagctgaacagctgttaagagaagccaaggagagggaattggaactgctgcctccaccaccgcagcagaagattactgacgaagaagagctcaatgattacaagctgcggaagcggaaaacatttgaagataatatcagaaaaaacaggactgtgatcagtaactggattaaatatgctcaatgggaggaaagcctgaaggagatccagcgggcaagaagcatctacgaaagagccctggacgttgactatcgaaacataactctatggcttaaatatgccgagatggaaatgaagaacagacaggtcaatcatgcccgtaacatctgggacagggctatcacaaccttgccacgagtgaaccagttctggtacaagtacacttatatggaggagatgttgggcaatgtggctggcgcaagacaggtgttcgagcggtggatggagtggcagcccgaagaacaggcgtggcactcctatattaatttcgaattaagatacaaggaggtcgaccgagccaggacaatttacgagcggttcgtcctggtccatcctgatgtaaaaaattggatcaaatacgcaagatttgaggagaagcacgcttatttcgcccatgcacgaaaagtctacgaacgggcagtcgagttttttggagatgagcacatggatgagcacctctatgtggcattcgctaaattcgaagagaaccagaaagagttcgagcgagtccgcgttatctataagtacgcccttgacaggatctcaaagcaagatgcccaggaactgttcaagaattataccattttcgagaaaaaattcggtgaccgcaggggcattgaggacatcattgtctccaaaagaaggttccagtacgaagaggaagtgaaagctaaccctcacaattacgatgcctggtttgactacctgcgcctggtagagtctgatgctgaggctgaagccgtgcgtgaggtttatgaacgcgctatcgccaatgtgcctcccattcaagagaagagacactggaagaggtacatctatttgtggatcaattatgctctatacgaggaactggaggcgaaagacccagagcggactaggcaggtgtatcaagccagcctcgagctcatccctcacaagaaattcacattcgccaagatgtggatcctgtatgcccagtttgaaataagacagaaaaacctttccctggcacgcagggcattggggacatccattgggaaatgccctaaaaacaaactgttcaaggtctacatcgagcttgagctgcagttaagagaattcgaccggtgcagaaaattatacgagaaattcctggaatttggtccggaaaactgtacctcttggatcaagtttgcggagttggagactatcctcggggatatcgaccgggctcgtgctatttacgagcttgcgatctcgcagccaaggttagacatgccagaggtactgtggaagagttacattgatttcgaaatcgagcaggaggaaacggagaggaccagaaacctttatcggaggcttctccagcggacccaacacgtgaaggtatggatctcttttgctcagtttgagttatcatccggcaaagaaggatccctgactaagtgtaggcagatctatgaagaagcaaacaagacaatgcgtaactgcgaggagaaggaggagcggctcatgctcctcgaaagctggcgtagttttgaggaggagttcggaaccgcttcagataaagaaagagtggacaaactcatgccagagaaagtgaaaaagagaaggaaagttcagaccgatgatggatctgatgccggttgggaggaatactttgattatatcttcccagaggacgccgcaaatcagcctaatctcaagctcctggccatggctaaactgtggaaaaagcagcagcaggaaaaggaggacgctgaacaccatccagatgaagacgtggacgagagtgagagttag

SEQ ID NO: 219359 - DNA, 2547 bp, synthetic construct
  misc_feature 1..2547: note = Description of Artificial Sequence: Synthetic coding sequence
  source 1..2547: mol_type = other DNA
atgacagccacagtggaaaatctgactttccaaaaggataccctcggtaatgctgtggacaaaaatacatctcgactcgagcttcgctcctactcccttgcgggaagacacggctccactgagcccttggtgctggcctggtcctcccagttcagaaggctcacttgggggtgcgccttagacgcgctgcacagatcgccctgtgttgctgcctcccagcatggggttacccacctgataaggtcttcacgcacaccgcacagcactaggtgtcggaaggaagacgctcagcccggacatcacggaaatggtgcagcaagcgtcacagcccaggctcgaggccaaaggtccgtcttacaggtacctctgcccgtgcccaggtcctgcttattctccgagagtttcgtcgtcagcgtctcgtcccagagtagattcctggccagcgtccctggaaccggcgtccaaagatccacggccgcagacatggctgcaagcacagccgctggaaaacagagaattcctaaggtggctaaagtcaaaaataaggctccggctgaggtgcaaattaccgctgagcagcttctgcgcgaggccaaagagcgcgaactcgaacttctcccgcctcccccacagcaaaagattactgatgaggaggaactaaacgattacaagttaagaaaaagaaaaactttcgaggataacatccgcaaaaataggactgtgatctccaactggatcaagtacgcccaatgggaggaaagcttaaaggagatccagagggcacgcagcatttacgagagggccctcgatgtggactatagaaacattacattgtggctcaagtacgcagagatggaaatgaaaaatcggcaggtgaatcatgccaggaacatatgggatagggccatcacaaccttgccaagagtgaatcagttctggtacaaatacacctatatggaggagatgctaggtaatgtggctggggcacggcaggtctttgagaggtggatggagtggcaaccagaagagcaggcttggcatagttacatcaactttgagttgcgctacaaagaggtggaccgggcacgcaccatctatgagcgcttcgtgctcgtccacccagacgtaaagaactggatcaagtatgcaaggtttgaggaaaagcatgcatacttcgcccacgcccgaaaggtctatgaaagggccgtggagtttttcggggacgagcacatggacgagcacctctatgtggctttcgccaaatttgaagagaatcaaaaagagttcgagagagtgagagtcatctataaatacgctcttgacagaatttccaagcaagacgcacaagagctgttcaagaattacactatatttgaaaagaagttcggcgaccgcaggggcatagaggacataattgtttcaaagagacgattccaatatgaggaagaagtaaaagcaaatccccacaattacgatgcttggtttgattatctgcgtctggtggagagtgacgctgaagctgaagcagtccgcgaagtgtatgagagggccattgcaaacgtgcctccaatacaggagaagcgtcactggaagcgatacatctatctgtggattaattacgccttgtacgaggagctggaagccaaggacccagaaagaactaggcaggtctaccaggccagcctcgagttaatcccccacaaaaaatttaccttcgccaaaatgtggatcctctacgcccaattcgagatccggcaaaaaaacctgtctctggctaggcgggctcttggaacaagtatcggcaaatgtcccaagaataaacttttcaaggtgtatatcgaactggaactgcagcttagggagttcgatagatgtcgcaagctctatgagaaatttcttgagttcggacctgagaactgtacgtcatggatcaaatttgctgaactcgaaacaatcctgggcgatatcgacagagcacgcgctatttacgaactggctatttcacaacctaggctggacatgcccgaggtgctgtggaaaagctacatcgactttgagattgagcaggaggagaccgaacgcacccgaaatctgtaccgtcggttgttgcagcgaactcaacacgtgaaggtgtggatttcgttcgcccagttcgaattatcaagcggcaaagagggcagtctgaccaagtgtcgccaaatttacgaagaagccaacaagactatgcgcaattgcgaggagaaggaagagcggctcatgctgctggagtcttggaggtcattcgaggaggaatttggcactgccagtgacaaagaacgggtggataagctgatgcccgagaaagttaagaaacgccgtaaagttcagacagacgatgggtctgacgcgggatgggaagagtacttcgattacatttttccggaggacgccgctaaccagcccaacttaaaactcctcgctatggcaaagctatggaagaagcagcaacaggagaaagaggacgcagaacatcaccccgatgaagacgtggacgagtccgaaagctag

SEQ ID NO: 219360 - DNA, 7025 bp, synthetic construct
  misc_feature 1..7025: note = Description of Artificial Sequence: Synthetic coding sequence
  source 1..7025: mol_type = other DNA
atgaaaaacatctactgtctgattccaaaactggtcaattttgccaccctggggtgtttgtggattagtgtggtgcagtgtaccgtactgaattcatgcctgaagagctgtgtaactaacttgggccagcagctggatctaggtacccctcacaatctgtctgaaccatgcatccagggatgccacttctggaattcagtggaccagaagaattgcgcactgaaatgtaacgacacatacgccactgtatgcgaaagggagtcctgcgaagtgggctgttcttccgcggagggcgcttacgaagaggaggtgttggaaaatgccgatttgcctactgctcctttcgcctcttccatcggtagccacaatatgacactgcgctggaagtccgccaatttttctggggttaaatacataatccagtggaagtacgctcaactgcttggctcatggacatacacaaagactgtgtcaaggcccagctatgtggtgaaaccgctgcaccccttcactgagtacatcttcagggtggtttggatatttacagcacagctgcagctgtactcaccaccgtctccttcttatagaacacacccccacggcgtgcccgagaccgcccctctgataaggaacatagagagctcaagccctgacacagtcgaggtgtcatgggatcctcctcagtttcctggtgggcctattttgggatacaacctgaggctgatctctaagaatcagaagctggacgctggaacacagcgaaccagcttccagttttactctactttacccaacacaatttataggttcagcattgccgcagtgaatgaggtcggcgaaggaccggaagccgagagctctattaccaccagctcctcagcagtccagcaggaggagcaatggctcttcctgagccggaaaacatcactgagaaagcggagcctcaaacatctggtggatgaagctcattgcctcagactggacgccatttatcacaatatcacaggcatcagcgtagatgtgcatcagcagatcgtgtatttcagtgagggcaccctaatctgggccaaaaaggctgcgaatatgtccgatgtgtctgatctccgaattttctacagaggcagtggactgattagctctatttccatcgattggctgtatcagcgcatgtactttattatggacgagcttgtgtgcgtttgcgacctagaaaattgctccaatattgaggaaattaccccacctagcatcagcgcgccacaaaagattgttgcggactcttacaatgggtacgttttctacctgctgcgcgacggcatatacagagctgacctgcccgttccaagtggtaggtgtgctgaggccgtccggatcgtcgaatcttgtaccttgaaggatttcgccattaagccccaggctaagcggatcatttatttcaacgacacagcccaggtgtttatgtccacgtttcttgatggcagcgcctctcacttaatcctgcccagaatccctttcgccgacgtcaagtcattcgcgtgtgagaataacgattttcttgttacggatgggaaggtgatctttcagcaggatgctctaagcttcaacgaatttatagtgggctgtgacttaagccacatagaggagttcggtttcggaaacctcgtgatcttcggaagtagttctcagctgcaccccctcccagggcgaccacaggagcttagcgtgctgtttggatcgcaccaggccttagtccaatggaaacctccagccctcgctatcggagcgtcaccctcagcctggcaaaactggacctatgaggtaaaagtgtccacccaggatcccccagaagtcacgcatattttcctgaacatctccggcaccatgttaaacgttccagaacttcagagcgcaatgaagtataaggtgagtgttagagctagcagtcctaagcggcctggcccttggagcgagcccagcgtgggaaccactcttgtcccagcatcagagcctcccttcattatggcggtgaaagaggacggactgtggtcaaagccattgaactcatttggccctggtgagtttctaagttctgatatcgggaacgtgtctgatatggactggtacaataactcactgtattattctgacactaagggtgatgtttttgtatggctgctgaacggcaccgacatctccgagaactaccatctcccttcaatagctggtgctggcgcattggccttcgagtggctggggcactttctgtactgggccggtaagacatatgtcattcagagacagagtgtcttgaccgggcacactgacatcgtaacccacgtcaagctattagtcaatgacatggttgtggacagcgtcggcggatatttgtattggaccacactgtactccgtcgaatctacacgtctgaacggagagagctcactggtcctgcagactcagccctggttttccggaaagaaggtgatagctctcactttggacctgagcgacggactgttgtattggctcgtgcaggattctcaatgtatccatctatacacggctgtgttgcggggtcaatcaaccggggatacaaccatcaccgagtttgccgcatggagcacctccgagattagccagaatgccttaatgtattattctggcagactcttttggataaacggctttaggatcatcacaacccaagaaatcggccagaagacgtcagtatcagtgctggagccggctagattcaatcagttcactataatccaaacatccctcaagcctctgcccggaaacttcagtttcactcctaaagttataccagattctgtccaggagtcctcattccggatcgaggggaacgccagcagcttccaaatcctgtggaatgggcctccagctgtggattggggtgtggtcttttacagtgtggaattctccgcgcactccaaattcttagcatctgagcagcactcattgcctgtctttacggttgaaggcctggaaccttatgcccttttcaatctttccgtgacgccgtatacctactggggaaaggggcctaagacaagtctgagcctgagggcccctgagacggtgccatctgcaccggagaaccctcggatatttatcctcccgagcggaaaatgttgcaacaaaaacgaagtggtcgtggagtttcggtggaataaacctaagcacgagaacggcgttcttactaagtttgagatcttctataacatctcaaatcaatcgattaccaacaaaacatgtgaagactggatcgccgtaaatgtaacaccttccgtaatgagcttccagttagagggtatgtcacctagatgctttatcgctttccaggtgcgggcatttaccagcaagggccctgggccttatgcggacgtggtgaagagcacaacatctgaaattaacccctttcctcatctcattaccctactagggaataagatcgtcttcctggacatggatcagaatcaggtggtctggaccttttcagctgaacgcgtaatttccgccgtctgctatacagcagacaacgagatggggtattacgccgagggggattccttattcttactccatctgcacaacaggagcagttccgaattgtttcaggactcgctcgtttttgacattactgtcatcaccattgactggatctctcggcatttatactttgcattgaaggagagtcagaacgggatgcaggtgtttgacgtggatctggaacataaagtgaagtatcccagagaggtaaagatccacaatcggaacagcacaattatttccttctctgtatatccactcttatccagactgtattggaccgaggtgtcgaattttggataccaaatgttttactacagcatcatctcccatactctgcacagaatcctgcagccaactgccactaatcagcaaaataagcgcaaccagtgttcctgcaatgtgacagaattcgagcttagtggagccatggcaattgacacctccaatcttgagaagcccctcatttattttgccaaagcacaggagatttgggccatggacctagagggatgccagtgctggagggttatcacggtccctgcaatgctgggcaagacactggtatccctcactgtcgatggagatctcatctattggatcatcaccgctaaggactccactcaaatctatcaggcaaagaagggtaacggcgctattgtgagccaggtgaaggcccttcggtcccgacacatcctggcgtacagctctgtgatgcagccatttcctgataaggcgttcctgtcccttgcttccgataccgtcgaacccaccatcctcaacgccacgaacacctcgctgacgatccggttaccgctggctaagaccaatctgacctggtatggcattacttctcccactccaacatatctagtgtattatgcagaagtgaatgatagaaaaaattcgagcgatttgaaataccgaatacttgaatttcaggacagcattgccttgatagaggaccttcagccattttcaacctacatgatccaaattgctgtgaagaattattacagcgatcccctggaacaccttcctccaggaaaggagatttggggcaagaccaaaaacggggtccccgaggctgtgcagctcatcaatacgaccgtgcgatccgatacaagcctgatcataagttggagagagagccacaaacctaatggcccaaaagagtcggtgcggtatcaacttgccattagccacttagctctgattcccgaaacccctctgagacaatcagagttccctaacggcaggctcaccctcctagtgaccaggctctcaggaggtaacatctatgtgctgaaggtgctggcttgccattctgaagaaatgtggtgtacagaaagccaccctgtcacagtggaaatgttcaataccccagagaaaccttactctctcgtcccggaaaataccagtcttcagtttaactggaaggccccattaaatgtgaaccttatccgcttttgggtagaactgcagaaatggaagtacaatgaattctatcacgtgaaaacctcctgcagccaagggccagcttacgtgtgcaatatcactaatctgcaaccctatacctcctataacgtgcgcgtagttgtagtgtacaagaccggcgaaaactcaacaagtctgccggaaagtttcaaaaccaaggcaggcgtgccaaacaagcccggtattcccaaactgctcgaggggagtaagaactctattcagtgggaaaaagccgaggacaacggctgcaggataacttattatattcttgagattcgtaagtccaccagcaataacctacagaatcagaacctacgatggaaaatgactttcaacggaagttgcagtagcgtctgcacttggaagtctaaaaacttgaaggggattttccaatttcgcgtggtggcggcaaacaacctgggcttcggggagtactctgggatctccgagaatatcatacttgtaggggacgacttttggattcccgaaacctcctttatactgactatcattgtgggaattttcctcgtggtaactatccctctcactttcgtctggcatcgtagactcaaaaatcagaaaagcgctaaggaaggcgttactgtactcatcaacgaagataaggagctcgctgagctgaggggcttggcagctggcgtgggactagctaacgcctgctacgcgatccacacgctgccgactcaagaagaaattgagaacctccctgctttcccaagggaaaagttgactctccggcttctgctgggctctggcgctttcggagaggtctacgaagggacagcagtggacatactcggtgttggctccggagaaatcaaagtggcggtcaaaacactgaagaagggttctaccgatcaggagaagattgagttcttaaaggaggcacacctgatgtccaagtttaatcacccgaacattctgaaacagctgggagtgtgtctgctaaatgaaccgcagtacataattctggaactcatggagggaggcgatctgctaacctatcttagaaaggccaggatggcaacattttacggacctctgcttacactagtggatcttgtggatctgtgcgtagatatctctaaggggtgcgtgtacctggaaagaatgcattttatacaccgtgatctggccgctcggaattgtctcgtctctgttaaagactacacatccccccgaatcgtgaagatcggggattttggactcgcaagggacatttataagaatgattattatagaaagagaggggaaggactgcttcctgtccgatggatggctcccgaatctttgatggatggaattttcactactcagtcagatgtgtggtcatttgggatattgatctgggagatcctaacactgggacatcagccttatccggcacacagtaatttggacgtgctgaattacgtacaaaccggtggcaggcttgagccccctcgaaactgtccagatgatctttggaatttgatgacccaatgctgggcgcaagaaccagatcagcgcccaactttccaccggattcaagatcagctgcagctgttcagaaatttcttcctgaattcaatctacaaatccagagatgaagccaacaattccggagtgatcaacgagagttttgaaggggaggatggcgatgtgatctgtctcaatagtgatgatataatgcctgtggccctgatggagactaaaaacagagaaggactgaattatatggtgctggcaaccgaatgcggccagggcgaggagaaaagtgaggggccacttgggtcgcaagagtcggaatcttgtggtctgcggaaggaggagaaggagccgcatgccgataaggacttctgccaggagaagcaagtagcctattgcccttctggcaaaccagagggcctgaattacgcttgtctaacgcacagcggatacggggacggatccgatta

SEQ ID NO: 219361 - DNA, 7043 bp, synthetic construct
  misc_feature 1..7043: note = Description of Artificial Sequence: Synthetic coding sequence
  source 1..7043: mol_type = other DNA
atgaaaaacatatactgcctaattcctaagctcgtgaattttgccacgttggggtgcctgtggataagtgttgtgcagtgcacagtgctgaacagctgcctgaagagctgtgtcactaatcttggccagcaactggatctgggaactccacacaacctgagcgagccatgtatccaaggctgccatttctggaactctgtggaccagaagaactgcgcactcaagtgccgagagagttgcgaagtcggctgctctagtgctgagggggcttacgaggaggaagtgctcgaaaacgcggatcttcctaccgccccattcgcttcttctatcggcagccacaacatgaccttgcgttggaaaagcgccaacttttccggcgtaaagtatatcatacagtggaaatatgcccagctgctcggaagttggacatacacaaagacggtgagtagaccatcatatgtcgtgaaacctctccatccatttactgaatatatatttagggttgtgtggattttcacggctcagctccagctctattcgcctccatccccgtcctatcgcactcatcctcacggtgttcccgagactgcacctcttattaggaatatcgaatcgtcatcccctgatactgtcgaagtcagttgggacccaccacagttcccaggagggccaatcctcggatacaacctcaggctgatctccaaaaaccaaaaattagatgctggcactcagcgcacctccttccagttctacagcactctgcccaatacaatctatcgctttagtattgctgctgttaacgaggtgggagagggtcctgaggctgagagctccatcacaacctcgagctcagcagtccagcaagaggagcagtggctcttcttatcacgcaagacttcactgcgtaagcgcagtctgaaacatttggttgatgaggctcattgccttcgcctggatgccatctatcacaacatcacggggatttcggtcgacgtgcatcagcaaattgtttattttagcgagggtacactgatttgggcaaagaaggccgcaaacatgagtgacgtttccgatctgcgcatcttttatagagggagcggcttgatcagctctatatccatagattggctgtaccagaggatgtactttatcatggacgaactcgtatgtgtatgcgacttagaaaactgtagcaacatcgaagagatcacaccccctagcatatctgccccacagaagatcgtggccgactcctataacggctatgtcttttatctgcttcgggacggcatctacagggcagacttgcccgtgccgtctgggcgatgcgccgaggcagtgcgaattgtggagtcctgcaccttgaaagacttcgccatcaagccccaagctaagcgaattatctattttaacgatacggcacaggttttcatgtccacgttcctggatggctccgcctctcacctgatcctgcccaggattccatttgctgacgtgaaatctttcgcctgtgagaacaatgactttctcgtaactgatggcaaagtgatctttcagcaagacgcactgagtttcaatgaattcatagtggggtgcgacctgtctcatattgaagaatttggcttcggtaatcttgtgattttcggaagcagcagtcaattgcacccactccccggtagaccgcaagagcttagcgtcctgtttggatcccaccaagctctggttcagtggaagcctcctgccttggctatcggagccaatgtgatcctgatttcggacattattgagcttttcgagttggggccttctgcctggcaaaactggacctacgaagttaaagttagtacccaggatcctcctgaggtgacacatatcttcctgaatatctctggaaccatgctgaatgtacctgagctacagagtgccatgaaatataaagtgtctgtgcgagcaagctctcccaaacgccctgggccttggagtgagcctagcgttggaacaaccctggtacccgcatcagagccgcctttcataatggcagtgaaagaagacggattgtggtcgaagccactcaattcctttggacccggagaattcttgagcagtgacattggaaatgtgtcagacatggactggtacaataactccctctattattcagatacaaaaggcgacgtgtttgtatggctgctcaatggaaccgacataagcgaaaattaccacttacccagcatcgctggcgcaggcgcattagcattcgaatggctggggcactttctgtattgggccggtaaaacctacgttattcaacggcagagcgttctcacgggccacacagacatcgtgacacacgtcaaactgctggtgaatgacatggtcgtcgacagtgtgggaggctacctttactggaccactctgtacagcgtggagtccactcgactcaacggcgagtcgtccttggtactacagacacaaccatggttttcaggcaaaaaggtgatcgctctcacactcgacctttctgacggtctcctttattggctggtacaagacagtcagtgtatccatctttacacagcagtgttgcgcggtcagtcaacaggagacacgaccatcacagagttcgcagcctggagtacctctgaaatctctcagaacgccctgatgtactattcagggaggcttttctggattaacggtttcagaataatcacgacacaggagatagggcagaaaacctcagtcagcgttctggagcctgccagatttaaccagttcacaattattcagacatctcttaaacctctacccggaaactttagctttacacccaaggtgataccggatagcgtacaggagagctcttttagaattgagggaaacgccagttctttccagattttgtggaatggaccccctgccgtggattggggcgtagtgttttactctgtggagttctctgcgcacagcaagtttctggctagtgagcagcacagcttgcccgtttttactgttgaaggactcgagccatacgctttgtttaacctgtctgtgaccccctatacatattggggtaaggggcctaaaacctcactcagcttgagagcacctgaaactgtgccatcagcccctgaaaatcccagaatcttcattctgccaagcggcaaatgttgtaacaagaatgaagtggtcgtggagtttaggtggaataagcctaagcacgaaaatggcgttttaacaaaatttgaaattttttataatatctcaaaccaatctatcacaaataagacatgtgaagactggatcgcagtcaatgtaacaccatctgttatgagctttcagctggaaggtatgtcccccaggtgtttcattgctttccaggtgagggctttcacttccaagggacctgggccttacgctgacgttgtcaaaagcactacgagcgagatcaacccgtttccccatctgatcacgcttctgggtaataagatcgtgttcctggacatggaccagaatcaagtggtatggacgttttctgccgaacgcgttatatctgcagtgtgctacacagcagataatgagatggggtactacgccgagggagacagccttttcctcctgcaccttcataaccgcagttcttcagagctcttccaggattctctagtcttcgatataacagtcatcactatcgattggatctcgaggcatctctactttgcgttaaaggaaagccagaatgggatgcaagtgtttgacgttgacctggaacacaaggtgaaatatcctagagaggttaagatacacaacaggaacagtaccatcatctcattcagcgtttacccacttctgtctcgcctctattggaccgaggtgtcgaattttggataccagatgttttattattcgattataagccacacgttacaccgaattcttcaaccaaccgcaactaaccagcagaataaacgcaaccaatgctcatgcaatgtcactgaattcgaactgagtggagcaatggccattgatacatcaaacctagaaaagccgctgatctattttgccaaggcgcaggagatctgggctatggatctggaaggctgccagtgttggagggttataaccgtgcctgctatgctggcaggcaagacactggtgagtctgacagtcgatggcgatctgatctactggataatcacagccaaggactcaacacaaatttaccaggctaaaaaggggaatggggctatcgtgagccaagtaaaagccttgcgatcacgccatattcttgcctattcatccgtcatgcagccttttcccgataaagcttttctttcgctcgcctccgacactgtggagccgactatccttaatgctaccaacactagcctaacaatacgtttgcctctggctaaaactaatctgacatggtacgggattacaagccccactcccacttatttagtgtattacgcagaggtcaacgatcggaagaacagctccgacctgaaatatcggatcttagaattccaggactcgatcgccctcattgaggacctccaaccattctctacttacatgatccagatagcagtaaaaaattattatagcgaccccctcgagcatctgcccccaggaaaagaaatctggggaaagaccaaaaacggggttcccgaagcagtgcagttaattaatacgacagtcagatcagatacctcactgattatctcatggcgggagtcacataagccaaacgggccaaaagaatcggttcggtaccaattggcaatttcccatttagctcttatccccgaaactccgttgcgccagtctgagtttcccaatggcaggcttaccctcctggtcacaaggctgtctggcggaaatatctacgttctcaaggtgctcgcctgccatagcgaagagatgtggtgcacggaatcacaccccgtaacagtcgagatgttcaacactcccgaaaaaccatatagtctggttcctgaaaatacctcactgcaattcaattggaaggccccactgaacgttaatttaattagattttgggtggagctgcagaaatggaaatacaacgaattttaccacgtgaaaacgtcctgtagccaaggtcccgcttacgtttgtaacattacaaaccttcagccctacacctcgtacaacgtccgggtggtggtggtgtacaagaccggcgaaaattccacttccttacctgagagtttcaaaaccaaagccggagtccctaacaagcccggaatccctaagttactggaaggttcaaagaacagcattcagtgggagaaagcagaggacaatggctgtcggatcacctattacattctggaaattcggaagagtactagcaataatctccagaatcagaatctccgatggaagatgacttttaacggcagctgttccagcgtgtgtacgtggaaatcgaaaaacttaaaaggcatctttcagtttcgtgtggtggcagcaaataacctaggttttggggagtatagtggtatctcggaaaatataatcctggtgggcgatgatttctggattccagagacaagcttcatactgactatcattgttgggatctttttggtggtcactattccgcttacatttgtctggcatcggcgattaaagaatcagaagagtgccaaagagggggtgacagttctcatcaacgaggacaaggaattggccgaactgagggggctcgccgcaggggtgggtctggccaatgcctgttacgcgattcatactttaccaactcaggaagaaattgaaaacttgccagccttccccagggaaaagctgactctgcgcctcctactcggatcaggcgcttttggcgaggtctatgagggtacggccgtggatatactgggcgttggctctggggagattaaggtcgctgtgaagacccttaaaaaagggagcactgatcaagagaaaattgaatttttgaaggaagcccacctaatgtcaaaattcaaccaccccaatattctcaagcagctcggggtctgtctgttgaatgagccacagtacatcatcctggaactgatggagggcggtgacttgctgacctacctgcggaaagcaagaatggccaccttttacgggccattgctgaccctcgtggatctggtggatttatgcgttgacatttccaagggatgcgtgtacctggagaggatgcatttcatacaccgagatctggccgcacgaaattgtctcgtttcggtaaaggattacacctcccctcgtattgttaaaattggtgattttggattggcaagagatatttacaagaacgattattacaggaagcgcggtgagggcttgctgcctgtgagatggatggcgcctgaatctctgatggacggcatcttcaccacacagtccgatgtgtggagcttcgggattctcatctgggaaatactgactctcggtcaccagccttatccagcgcacagcaatctagacgtgctgaattacgtgcagaccggcggtagactggagccacctcgtaattgccccgatgatctgtggaatctgatgacccagtgctgggcccaggagcccgatcagcggcctaccttccatcggatccaggatcagcttcaactgttccgcaactttttcctgaattccatatacaagagtcgcgatgaggctaataatagcggcgtgataaacgaatccttcgaaggtgaggatggggacgttatctgcctgaattcggatgatatcatgcctgtggcccttatggagacgaagaaccgcgagggactaaactacatggtgctggccaccgaatgtggccagggcgaggaaaaatcagagggcccactaggatcacaggaatcagagtcatgcggacttcggaaggaggagaaggaaccccacgcagacaaggacttttgccaggagaagcaggtcgcgtactgtccatccgggaagccagagggcctgaattacgcttgtcttacccactccggctacggggatggttcggatta

SEQ ID NO: 219362 - DNA, 294 bp, synthetic construct
  misc_feature 1..294: note = Description of Artificial Sequence: Synthetic coding sequence
  source 1..294: mol_type = other DNA
tggaagtataatgagttctatcatgtgaagaccagttgtagccagggtccagcttacgtttgtaacatcaccaatcttcaaccctatacctcctacaacgttcgggtggttgtagtgtataagacaggagaaaatagcaccagtctcccagagtcattcaagacaaaagcaggtgtgcctaataagccaggaatccccaagctgctcgaaggatccaaaaactcaatccagtgggaaaaagccgaagacaatgggtgccggataacctattatatcctcgaaataagagactag

SEQ ID NO: 219363 - DNA, 2025 bp, synthetic construct
  misc_feature 1..2025: note = Description of Artificial Sequence: Synthetic coding sequence
  source 1..2025: mol_type = other DNA
atgacatccaacggtgtggccctgctgaacttctacaacatgccttccacaccctcattcgtggggtgcctacaggacatcaagattgactggaatcacattaccttggagaatatcagttcaggttcttccctcaacgtaaaggctggatgtgtgagaaaagactggtgtgagagccagccctgtcagagtcggggaaggtgcatcaatctgtggctgtcctaccaatgcgattgccaccgcccttatgaggggcctaattgtctgcgtgaatacgtagccggtaggttcggtcaggacgattctaccgggtacgtgatattcaccctggatgagagctacggcgacaccatatccctgtctatgtttgtgcggaccctccagccttctggcctgttgctggctttagagaatagtacttaccagtacatccgggtgtggctggagaggggacgcctagccatgctgacacctaatagtcccaagttggtagttaagtttgtactcaatgatgggaatgtgcatttgattagcctgaaaatcaagccatacaaaattgagctttatcagagttctcagaacctgggctttatcagcgcctccacctggaagattgagaaaggagacgtcatatatatcgggggactgcctgacaaacaagagaccgagctgaatggtggtttctttaagggctgtatccaggatgtcagacttaataaccagaatcttgagttcttccctaatccaactaacaacgcaagtctcaatccagtattggtcaacgtcacccagggttgtgcaggcgataatagctgcaaaagcaatccatgccacaacgggggagtctgtcacagtcggtgggacgattttagctgctcatgtcctgccctgacgtcaggcaaggcctgtgaggaagtccagtggtgcggcttctcaccatgtccgcacggcgctcaatgtcaaccggtactgcaaggcttcgagtgtattgctaacgcagtctttaatgggcagagcggccagattctctttcgaagtaatggtaacatcaccagggaactgacaaatatcactttcgggttccggactagggacgcaaatgtaattatcctacatgctgaaaaggaaccagagttcttgaacatctcaatccaggattcacgtctctttttccagttgcagagcggtaattccttttacatgttgtccctgacatcactgcagagcgtgaacgacggcacctggcatgaagtcactctcagtatgactgatccactgagtcagacgtcccgatggcagatggaagtggataatgaaacccctttcgttacctcaaccatcgccacaggcagtcttaattttctgaaggacaacacggatatctatgttggggatcgcgctattgataatataaaaggcctccaggggtgcctgagcaccatcgagataggcggtatatatctaagttacttcgagaacgtgcatggatttataaataaaccacaggaggagcagtttttaaaaatttctactaattccgtggtcacaggatgcctgcagctcaacgtatgtaattcaaacccttgtctgcacggaggcaactgcgaagatatctactcatcataccactgctcttgccctctcggatggagcggtaagcattgcgaattgaacatagatgagtgcttctctaacccatgtatacacggcaactgctcagaccgggtggccgcttaccactgtacctgcgaaccaggctacaccggcgtgaactgtgaggttgatattgacaactgccagagccatcagtgcgcaaacggagccacttgtatctcccatacaaatgggtacagctgtctctgcttcgggaatttcaccggcaagttctgtcggcagagccgactccccagtacagtgtgcggtaacgaaaaaactaacctgacatgttataacgggggtaactgcacagaatttcaaactgagctcaagtgcatgtgtcgacccggatttactggggaatggtag

SEQ ID NO: 219364 - DNA, 4221 bp, synthetic construct
  misc_feature 1..4221: note = Description of Artificial Sequence: Synthetic coding sequence
  source 1..4221: mol_type = other DNA
atggcactcaagaatatcaattatctgctgatattctacctgtctttctctctcctgatatatatcaaaaactctttttgcaacaaaaacaatacacggtgtttgtctaactcatgtcagaataatagcacctgcaaggacttctctaaagataatgactgctcttgctccgacaccgccaacaaccttgacaaagactgtgataatatgaaagatccttgttttagcaacccttgtcagggctccgcgacctgcgtgaacaccccaggtgagagatctttcctctgtaaatgccctccaggatactcagggaccatctgcgagactaccatagggtcctgtgggaagaacagctgccaacatggcggtatctgccaccaggatcccatctatccagtatgcatttgcccagctgggtatgcaggtcgcttttgtgaaatcgaccacgatgagtgtgccagcagtccttgtcagaatggggcagtctgtcaggatggtattgatggatatagctgtttttgcgtgcccggttaccagggtcgccattgtgacttggaagtcgacgaatgcgcctctgacccatgtaaaaacgaagccacctgtctgaatgagataggccgttacacatgcatctgcccgcataattacagcggggtgaactgcgagctggagattgatgaatgctggtctcagccctgtctcaatggcgcaacctgccaggacgcacttggagcctatttctgcgattgcgctcccggattcttaggtgatcactgcgagctgaatactgacgagtgtgcgagccaaccatgcctgcatggtggtctgtgcgtggacggggaaaataggtactcctgcaattgtactggttcaggcttcacaggcacacactgtgaaactctgatgccgctgtgctggtctaaaccttgtcataataatgccacctgcgaggactcagtcgataattacacgtgtcattgttggcccggatacactggcgctcagtgcgagatagatctcaatgagtgtaactccaacccatgccagtccaatggcgaatgcgtcgaactttcctcagaaaaacagtatggaagaatcactgggctcccatccagttttagctatcatgaagccagtgggtacgtgtgcatatgccagcccggattcaccggcattcactgcgaagaagatgtcaatgaatgctcgagtaatccgtgtcaaaacgggggaacatgcgaaaatctcccaggcaattacacatgccattgtcctttcgataatcttagcaggacattctacggcggaagagactgcagcgatattctactgggctgcacccaccagcaatgccttaacaatggtacctgtatacctcactttcaggacggacagcacggattttcatgtctctgccccagcgggtacacaggcagtctctgcgagatcgcaacaaccttaagcttcgaaggagacgggtttctgtgggtcaagtcaggtagcgtaacgaccaaaggatctgtatgtaatatcgcccttagattccaaaccgttcagccaatggccttgctgctctttagatccaatagggacgtgtttgtcaagctcgagttactctcaggatacatacacttatcaatacaggtgaataatcaatctaaggtgttgctgttcatatcccataatacatcagatggcgaatggcacttcgtagaagtcattttcgcggaagccgtgactctgaccctaattgatgacagttgtaaggagaagtgcatcgctaaggcacctacccccctggagtctgatcagtctatttgtgcctttcagaactctttcttgggtggattgccagttggaatgacatctaacggggtggccctattgaacttttataatatgccatcgacaccctcctttgtcggctgtttacaggatattaagatcgactggaaccatatcaccctggaaaatataagctccggcagctccctgaacgtcaaggccggatgcgtcagaaaagactggtgcgaatctcagccctgtcagtcccgaggcaggtgtatcaacttgtggctgagctatcagtgcgactgccacagaccctatgaaggcccaaactgtctccgagaatatgtggccggtaggtttggccaagacgattcaaccggttatgtgattttcacccttgatgagagttatggagacaccattagcctcagcatgttcgttaggactctccaacccagtggtctgttattggccctggagaactccacctatcagtacattcgagtgtggttggaacgcggacgcctcgccatgctcactccaaacagccctaaactcgtggtcaagttcgtcttgaacgacggaaacgtgcaccttatttcgcttaaaatcaaaccatataagatcgagctgtatcagtcatcacaaaaccttggtttcatctctgccagtacctggaagatcgaaaagggcgacgtaatctatattggcggactcccagacaaacaagaaaccgagctgaacggcggattttttaaagggtgcattcaggacgtgaggctcaataatcaaaacttggaatttttcccaaatccgaccaataacgcttccctgaaccccgtcctagtgaatgtgacccagggctgtgccggtgataatagctgcaaatcaaacccttgccacaacggaggagtgtgccattcccgctgggacgacttttcttgttcctgtccagcactgacgtcaggcaaggcatgcgaagaagtccagtggtgcggcttctccccctgccctcatggggctcagtgccagccagtgctccagggcttcgagtgcatcgctaacgccgttttcaatggacaatcagggcaaattttgttccgttccaatggtaacatcacaagggagctgaccaacataacatttgggttcagaacacgggacgcaaacgttatcatcctgcacgctgagaaagaaccagaattcttaaatatcagtattcaggacagccgcctgtttttccagttgcagagtggaaattcattttacatgttatcactcacatccctccagtctgtcaatgacgggacctggcatgaggtcaccctctccatgaccgatcctctgtctcagacgtcaaggtggcaaatggaagtcgataacgaaacccctttcgtcacatcaaccatcgctaccggtagccttaattttctgaaggacaatacagacatatatgtgggggaccgtgccatagataacatcaagggcctgcagggttgcctgtccaccatagagatcggaggcatttacctgtcatatttcgagaacgtgcacgggtttataaataaaccacaggaggagcagttcttgaaaatttcaaccaattcggtggtcaccggctgtctccagctgaatgtgtgtaacagcaatccctgcttgcatggaggcaactgtgaggatatttattcatcataccactgctcatgtcctttaggctggtccggcaagcactgcgaattaaacatcgatgaatgcttcagtaacccatgtatacacgggaactgctccgatcgggtggcagcctatcattgtacatgcgagcccggttatacaggagtgaattgcgaagtggacatcgataactgtcagtctcatcagtgcgccaacggcgcaacctgcatctcacatacaaatggctatagctgcctttgctttggcaattttactgggaaattttgccgccagtctcgcctgccgtcaacagtgtgtggaaacgaaaagactaacctcacgtgttataatggaggtaactgcacagaatttcagaccgagctcaagtgcatgtgtaggccgggttttacaggagagtggtgcgagaaagacatcgacgaatgcgcgtccgatccatgtgtgaatggaggtctctgtcaggacctgctgaacaagtttcagtgcctctgcgatgtggccttcgctggggagcgctgcgaagttgacctcgctgatgatttaatctctgacatcttcaccactatcggatccgtgactgtggcattgctgctcatactgttactggccatagtcgcgtccgtggtcaccagcaataagcgcgcaacacagggaacctactctcccagcagacaggagaaggagggctctagagtggagatgtggaacctcatgcccccaccagcaatggagcgcctcatatag

SEQ ID NO: 219365 - DNA, 2826 bp, synthetic construct
  misc_feature 1..2826: note = Description of Artificial Sequence: Synthetic coding sequence
  source 1..2826: mol_type = other DNA
atgattcgtaatagtttgtgccaaccaagcaggtgtctggatggctatctcttcttcaatagaaagatgtttggcgcacgcacccatggcttccatatactgatggcaatgctcattggtatccactgcgaagaggatgtgaacgagtgtagctccaacccttgccagaacggtggcacgtgtgagaatcttccaggcaattatacctgccactgtcctttcgataacctgagtagaactttctacgggggacgcgactgcagcgatattttactgggttgcacccaccagcagtgccttaacaacggaacctgcataccacacttccaggacggtcaacacggtttttcatgtctgtgcccaagtggctacaccgggagcctctgcgagattgctactaccctatcctttgaaggcgacggctttctttgggtaaaatcagggtctgtgacaacgaaaggctctgtgtgtaatatcgccctgcgtttccagacagttcagccaatggctttactcctattccgaagcaaccgcgatgtatttgttaagctggaattgctttcggggtatatacatctctcgattcaggtgaacaaccagagcaaagttctgctgttcatctctcacaacacttctgacggcgagtggcattttgtggaggttatctttgcagaggccgttaccctcactctgattgatgacagctgcaaagaaaaatgtatcgccaaagctccaactccacttgaaagcgaccagtctatctgcgccttccagaacagtttcttgggtggcttacctgtgggaatgacctctaatggcgtggcactgctcaatttttacaacatgccttccactccctcgttcgtgggctgcctgcaagatataaagatcgattggaaccatatcactctggagaacatcagcagcggctctagcctgaatgtgaaggcgggatgcgtgaggaaggactggtgtgagtctcaaccttgccagtctagaggcaggtgtattaacctgtggctgagttaccagtgcgattgtcaccggccttatgaaggtcccaattgcctcagggagtacgttgccggtcgatttgggcaagatgacagcactggatatgtcatctttactctagatgagagttacggagacaccatatccctgtctatgttcgtgaggacactgcagccctcagggcttctgctggccctagaaaattccacctaccaatatattcgggtgtggctggaacgcggaaggcttgcaatgctgacgccaaattccccaaagttggtcgttaagtttgtattgaacgacggcaatgtgcatctcattagtcttaaaatcaaaccatataagatcgagctttaccagagttcccaaaaccttggctttattagtgccagcacctggaagattgagaagggggacgttatttatataggaggcctgcctgataagcaggaaaccgagctaaatgggggatttttcaagggatgtatccaggatgtaagactcaataaccagaacttagaattcttccctaatccgacgaacaatgcctccctcaaccccgttctcgtgaatgtgacccagggttgcgccggagataatagttgtaaatcaaacccctgtcacaatggcggagtgtgccattctcggtgggacgatttttcgtgcagctgccctgctctcacttcaggtaaggcgtgcgaggaggtgcaatggtgcggcttctccccttgtccgcacggcgctcagtgtcaacctgtgttacagggtttcgagtgtatagctaatgcagtcttcaacgggcagagtggacagatactgtttcgttccaacggcaacattacccgtgagctgacgaatattacttttgggttcaggaccagggatgctaacgttataatcttgcatgcggagaaagagccagaatttctgaacatatctattcaggattcaaggctcttttttcagctgcagtcagggaatagtttctacatgcttagcctaactagtctgcagtccgtgaacgacggcacttggcatgaggtaacccttagcatgacagaccccctgagccagactagccgatggcaaatggaagttgataacgaaaccccattcgtgacttccactatcgccaccggtagtctaaattttcttaaggacaatacagacatctatgttggagatcgggcaatcgataacattaagggcttgcaaggctgtctttcgacaatcgagataggcggtatctatctgtcttactttgagaacgtgcatgggttcatcaacaagccccaggaagaacagttcttgaaaatatccacaaatagtgtggtcactggctgcttgcagctgaacgtttgcaattcaaatccatgcctgcacggcggaaactgcgaagacatatacagcagttaccactgctcatgccctttgggttggtctggcaaacactgtgaactcaacatagatgagtgtttcagcaacccctgtatccacggtaattgtagcgacagggtcgcagcgtaccactgcacatgcgaacccggttacaccggagtgaactgcgaggtcgacatcgacaactgccaatctcaccagtgcgccaacggggctacctgtattagccatacaaacggttatagctgcctttgcttcggcaactttacaggcaagttttgtaggcagagcaggctgccatcgactgtttgtggtaacgagaaaactaacttaacatgctataacggcggaaattgcacggaattccagaccgagttgaagtgcatgtgtaggcccggatttacaggcgagtag

SEQ ID NO: 219366 - DNA, 129 bp, synthetic construct
  misc_feature 1..129: note = Description of Artificial Sequence: Synthetic coding sequence
  source 1..129: mol_type = other DNA
gagaaagacatcgacgagtgcgccagtgacccttgcgtgaatggcggactttgccaggaccttctaaataaatttcagtgcctttgtgatgtggcattcgctggggagcgctgcgaggtggattattag

SEQ ID NO: 219367 - DNA, 4149 bp, synthetic construct
  misc_feature 1..4149: note = Description of Artificial Sequence: Synthetic coding sequence
  source 1..4149: mol_type = other DNA
atgaaagatccatgctttagcaacccttgccagggaagtgccacatgtgtaaatacccccggagagaggagtttcctgtgcaagtgtccgccaggctactcgggaacaatctgtgaaactacaattggcagctgcgggaaaaattcctgccagcacggtgggatatgtcaccaagaccctatctatcccgtgtgcatttgccccgctgggtacgctggcagattttgcgaaatcgaccacgacgagtgcgcgagtagcccctgccaaaacggggcagtgtgccaggatggaattgacggttattcatgtttctgtgtgcccggatatcagggcagacactgtgatctcgaggtcgacgagtgcgcctctgacccctgcaagaatgaagccacctgtcttaacgagataggaagatacacctgcatctgccctcataactactctggcgtgaattgtgaacttgagattgacgagtgctggtcacagccatgtcttaacggagcaacatgtcaggatgccctcggggcatacttttgcgattgtgctcccggtttcctcggcgatcactgtgaactgaatacagatgagtgtgcctcccagccatgtctgcacggtggcctgtgcgtggacggcgagaacagatatagctgcaattgcacagggtccggcttcacaggcacacattgcgaaaccctcatgccactgtgttggtccaaaccctgtcataacaacgcaacttgcgaggacagtgtggacaactacacctgccattgttggcctggctacacaggcgcacagtgcgagatagacctcaatgaatgcaactctaacccctgtcagagtaacggagagtgtgtcgagcttagctcagagaagcagtacgggaggatcacaggcttgccgagcagtttttcttaccacgaggcctctggatacgtctgtatctgtcagccagggtttacagggatccactgcgaggaggacgttaacgagtgctcttcgaacccatgccagaacggaggcacctgcgaaaatctgccgggaaattatacctgtcactgcccttttgacaatctttcgcggaccttttatggtgggagggattgttccgatattctccttggctgcacacaccaacagtgcctgaacaacggcacctgcatccctcatttccaggatgggcagcacggattttcttgcttatgcccgagcggatatactggatcactgtgtgaaatagccacaacactgtctttcgaaggagacggcttcctttgggtgaagtccggaagtgttacaaccaaaggcagtgtttgtaacatcgcattgagattccagacggttcagccaatggccttgctgctgtttcgtagcaatcgggacgtattcgtgaagctggaactgctgtctgggtacattcacctctcaatccaggtcaataaccagtctaaggtgttgctgttcatctcccacaacacttctgacggggagtggcacttcgtggaagttatattcgccgaggcagttaccctgaccctgatagacgatagctgcaaagaaaaatgtatcgcgaaggcccctacacccctggagtcagatcaatccatttgtgcgtttcagaacagctttctcgggggtttacccgtagggatgacttccaatggggtcgctctgttaaacttctacaacatgcccagcactccaagttttgttgggtgcctgcaggacattaaaattgattggaatcacatcacattagagaacatttctagcgggagctcactgaatgtcaaggcagggtgcgtaaggaaagattggtgcgagtcgcagccatgtcagagtcggggtcgttgcatcaacctttggctgtcctaccagtgtgactgccaccgaccttatgaaggcccaaattgcctgcgtgagtatgtggcagggaggttcggccaggacgactctaccggctacgtgatttttaccttagatgagtcttacggggacaccatttctctcagcatgtttgtgcggaccctccaaccatccggcttgctgcttgcactcgaaaatagcacctaccagtatatcagggtgtggcttgaacgcggaaggctcgccatgctcactcccaactctcctaaacttgttgtaaaatttgtgctgaatgacgggaacgttcacctgatatctttgaagataaagccctataaaatcgagctgtaccaatcttctcagaatttgggattcatctctgcttccacatggaagatcgagaaaggagatgtcatttacatcggaggtctccctgataagcaagaaactgagcttaacggaggctttttcaagggctgcattcaggatgtgcggttgaacaatcagaacttagaattctttcccaatccaaccaacaacgccagtttgaaccccgttttggtcaatgttacccagggctgcgccggtgataatagttgcaaaaggcaaacaaatgtggggagagctctgaccgagctagggagtcggggtccgaaatatcaggttagcctctttcggttttgcgtaggcagctgggctacaggcaacacttttttcctttccagcatcaaacctggatccaacccttgtcacaatgggggagtgtgccattccaggtgggacgactttagctgctcctgccccgcattaacgtctggcaaggcgtgtgaggaagtgcagtggtgcggcttctctccatgcccacacggcgcacaatgtcagcctgttctgcaaggatttgaatgcattgccaatgcggtcttcaatggccagagtggtcagatcttatttagatcgaatggtaacatcaccagagagctgacaaacattacatttgggtttagaacgcgcgacgcaaacgtcattatactccacgcagaaaaggaacccgaatttctaaatatatctatccaggatagtagactgttttttcaactacagtccggcaattcattctacatgttatctctgaccagcctccagagcgtgaacgatgggacgtggcatgaagtaaccttatcaatgaccgatcccctgtcccaaacctcaagatggcagatggaggtcgacaacgagaccccctttgtcaccagcaccatcgccacagggtccctgaatttcctaaaggacaataccgacatctatgtgggcgaccgcgctattgataatatcaaagggttgcaaggatgtctttccacaatcgagatcggaggaatatatctgtcatatttcgagaacgtgcatgggttcatcaataagccccaggaggaacaattcctcaaaatttcaaccaactctgtagtgaccggttgtctccaattaaatgtatgtaactctaatccatgccttcatggcggaaactgtgaagacatatattcctcctaccactgcagctgtccactgggatggtcaggaaaacattgcgaactgaatatcgacgaatgtttcagtaatccatgcattcacggaaactgctctgatagagttgctgcttaccattgcacctgcgagcccggatataccggcgtgaattgtgaagtcgatattgacaactgtcagtcccaccagtgcgccaacggcgcaacatgtattagccacacaaatggctatagttgcctatgtttcgggaattttactggtaaattctgccgccagtctagactaccatccaccgtttgcggaaatgagaaaacaaatctcacttgctacaacggaggaaactgcacagaatttcagaccgaactgaaatgtatgtgcagacccggtttcacaggggaatggtgcgaaaaggatatcgatgagtgtgccagtgacccttgtgtgaacggagggctatgccaggacctgctgaataagttccagtgcctgtgtgacgtggcctttgccggtgagaggtgcgaggttgatctggcagatgacctgatttcggatatcttcacaactattggaagcgtcactgtggctctactgctgatcctattgctagctatagtggcctctgtcgtaacaagtaacaagcgcgctacccagggtacttacagtccatctcggcaagagaaagaaggatccagagtggagatgtggaacctaatgccacctcccgcaatggagagactcatatag

SEQ ID NO: 219368 - DNA, 2613 bp, synthetic construct
  misc_feature 1..2613: note = Description of Artificial Sequence: Synthetic coding sequence
  source 1..2613: mol_type = other DNA
atggctcttaagaacattaattatctgctaattttttatttatccttctcgctcttgatctacattaagaacagtttctgcaataagaataatactaggtgcctgagcaattcttgtcagaataactcaacctgtaaagactttagcaaagacaacgattgtagttgtagcgatactgctaataatctcgacaaggattgcgataatatgaaggacccctgtttctccaacccttgtcaggggagcgccacttgtgtgaatacacccggagaacgctcctttctgtgtaaatgccccccagggtacagtggtacaatttgtgagaccaccattggttcctgcggtaagaattcctgccaacatggtggtatctgccatcaggacccaatatatcctgtctgcatttgccccgcaggatacgccggtcggttctgtgagattgatcacgacgagtgcgccagctctccatgccagaatggcgcagtgtgtcaggacgggatcgacgggtacagctgtttttgtgtgcctgggtatcagggtcggcactgcgacctcgaggtggacgagtgcgctagcgatccctgtaagaatgaggccacatgcctgaatgagattggcaggtatacctgcatctgcccccataactactccggggtcaattgcgagctggaaatcgatgagtgttggagccaaccatgcttgaacggagcgacatgtcaagatgctttgggcgcttacttttgcgactgcgctccgggattcctgggcgatcactgtgagctcaacactgacgaatgcgcctcccagccttgtctccacgggggattgtgcgttgatggcgaaaacagatacagctgcaactgtaccggctccggattcacggggacacactgtgaaaccctaatgcccctgtgctggtctaaaccgtgtcacaataatgctacatgtgaagacagcgtggataattatacctgccattgttggccaggctacaccggagcccagtgcgagatcgacctcaacgaatgcaactcgaatccttgccaaagcaatggcgaatgcgtggaactgtcctctgaaaaacagtacggacgcatcactggattaccatcttcttttagctaccatgaagccagtggctatgtatgtatttgccagccgggattcactggcatccactgcgaagaggacgtgaatgagtgctcatctaatccgtgtcaaaatgggggtacctgtgaaaatttgccaggtaactatacatgccattgtccctttgataatttgagtagaactttctacggagggagagactgttctgatatcctattaggatgcactcaccaacagtgtcttaacaatggaacttgcatccctcacttccaggacgggcagcacggtttctcctgtctttgccctagcggatacacagggagcctgtgcgaaatcgctaccacactctccttcgaaggggatggctttttgtgggtgaaaagcgggagcgtcaccaccaagggctcagtctgcaacatagcgctgcgatttcagacggttcagccaatggcgctgttgctatttcggagtaatagagatgtattcgttaagctggaactcctttctggttatatccacttgtctatccaagtaaataatcagagtaaggtgcttctcttcatatctcataatacatcagacggtgaatggcactttgtcgaagtgatctttgcagaggccgtgacacttaccctgatagatgattcctgcaaggagaaatgcatcgccaaagcccctacccctctcgagtcggaccaatcaatttgtgcctttcaaaatagcttccttggcggtctccccgtggggatgacttcaaacggagtggctctgctcaacttctataatatgccatccaccccctctttcgtagggtgccttcaggatattaaaattgattggaatcatattacattggagaatatttcttctggctccagcttgaacgtcaaagccggatgtgttcgaaaggattggtgcgaaagtcaaccatgccagtcacggggaaggtgtattaatttatggcttagttatcagtgtgattgccaccgaccctacgagggccctaactgtctgagaggaaagttttgtagacagtcaaggctgcctagcacggtctgtggaaatgaaaagaccaacttaacctgttacaacggaggcaactgtacggagtttcaaacagagcttaaatgcatgtgcaggcccggttttacaggagagtggtgcgaaaaggacattgacgaatgtgctagcgacccatgtgttaatggcggactctgccaggatctgttgaataaattccaatgtctctgtgatgtggcgtttgccggagaaaggtgcgaagtggacctggccgacgatctgatttcggatatttttacgaccattgggtccgttaccgttgcccttttgttaattttactactcgcaattgttgcttctgttgtaacctcgaataagagagccacacagggaacttattccccgtcgcggcaggagaaagaaggcagtagagtggaaatgtggaaccttatgccaccccctgccatggaaagactgatatag

SEQ ID NO: 219369 - DNA, 882 bp, synthetic construct
  misc_feature 1..882: note = Description of Artificial Sequence: Synthetic coding sequence
  source 1..882: mol_type = other DNA
atgcctctgtgttggagcaagccttgtcataacaacgctacctgtgaggactccgtggataattacacatgccactgctggcccggttacactggtgcgcagtgtgagatcgacctgaacgagtgcaactccaacccctgtcagtcgaacggggagtgtgttgaactgagttccgaaaaacaatacggaagaataaccggcctcccaagtagctttagctatcatgaggccagcgggtacgtttgcatttgccagccagggtttactggcattcattgtgaagaggatgtgaatgaatgttcttctaacccatgccagaatggcggtacttgtgagaacttgcctgggaattacacttgccactgcccattcgacaacctttcacggaccttctacggtggacgggattgctccgacatcctccttgggtgcactcaccaacaatgccttaataacggcacttgtatccctcacttccaggatggacaacacgggttcagttgtctctgtccatctggatacactggttcactgtgcgagattgccaccactctttcgtttgaaggggacggcttcctgtgggttaaaagtggctcagtcaccaccaagggctctgtatgcaacatcgcccttagattccaaactgtacagcccatggcgctgttactctttcgttcgaatcgggacgtctttgtgaagctcgaactcctgtccggatatatccatctgtccatacaggtaaacaaccaaagcaaagttctgctcttcatctcccataacacaagcgatggcgaatggcatttcgtggaggccgtgagcaaaaccctgaaactgataggtatcactctgccatggcgtaccagccggttggctcatcactag

SEQ ID NO: 219370 - DNA, 2664 bp, synthetic construct
  misc_feature 1..2664: note = Description of Artificial Sequence: Synthetic coding sequence
  source 1..2664: mol_type = other DNA
atggctctattactgttccggagcaatagggatgtcttcgtgaaattggagttactgagcggctacatccacctgtccattcaagtgaataaccagtccaaggtactgctgttcataagccataatacatccgacggcgagtggcatttcgttgaggtcatcttcgctgaagccgtaacccttaccctgatcgacgatagctgcaaagagaagtgtatagctaaagcgccaactcccctggagagtgatcagagcatctgcgccttccagaactcttttttggggggactcccagtcgggatgacgtcgaacggcgttgccctgttgaatttctacaacatgccctccaccccgtccttcgtgggctgcctgcaagatataaagatcgattggaaccacattaccctggagaatatttcttctggtagctcgctgaacgttaaggcaggttgcgtaagaaaagactggtgcgagagtcagccttgtcagtctagagggagatgcattaacttatggttgtcttaccagtgtgactgtcaccgcccttatgaaggccctaactgcttacgcgagtacgtcgccggacgattcggccaggacgatagcactggatacgttattttcaccttggatgagagctatggagataccataagcctgagtatgtttgtcagaactctccagcctagcggattactgctggctcttgagaactcaacctatcagtatattagagtgtggctcgaacgaggtcggttagcaatgctgaccccgaactccccaaagctggtggtgaaatttgtgctgaacgacggcaatgtacacctgatcagcctgaagataaagccctataagatcgaactttatcagagcagccaaaacctgggtttcatctcagcctccacttggaaaatagaaaaaggagacgtgatctatattgggggtctgcctgataaacaggaaacagaactcaatgggggtttttttaaaggttgcatccaagatgtccggctgaataatcagaatttggagttctttcctaatccaaccaacaatgcatctctgaatcccgtgttggtgaacgtcacacaggggtgcgcaggagacaattcgtgtaagtcaaatccatgccataacggaggcgtgtgtcacagtaggtgggatgattttagctgttcttgtccagctctgacttcaggcaaagcctgtgaagaagtgcagtggtgcggctttagcccctgtcctcatggggcacagtgccagccagtgttgcagggctttgagtgcatagccaacgccgtgtttaacggacagtcgggtcagattctgtttcggtcgaacggcaatatcacgagagaattaactaacatcacgtttggattccggacaagggatgccaacgtgattattctccacgccgagaaagaaccagagttcctcaatatatccatacaggacagccgtttgttcttccagttgcagtccgggaacagtttttatatgcttagcctcacctccctgcaaagcgtgaatgatggcacttggcacgaagttaccctctccatgactgatcccttgagtcaaacaagccggtggcagatggaggtggacaacgagacaccctttgtgacttctaccatcgctaccggaagccttaactttctcaaggataataccgacatttacgtgggcgaccgcgctattgacaatattaaagggctccagggatgcctctctacgatcgagatcgggggtatatatttgagttacttcgagaacgtacatggtttcatcaacaagcctcaagaagagcagttcctgaagattagcaccaattcggtcgtgacagggtgtcttcagttaaatgtctgcaactctaacccttgcctgcacgggggaaattgtgaggacatctacagctcttatcactgcagttgtccactaggatggtccggtaagcactgtgagcttaacattgatgaatgctttagcaacccgtgcattcacggcaattgtagcgatagggttgctgcttaccactgtacctgcgagcccggatacactggggtaaattgcgaggtcgacatcgataactgccagagtcatcagtgtgcgaatggagccacttgtatctcccacaccaacggctacagttgtctctgttttggcaacttcaccggtaaattctgcagacagtccagactgcccagtacagtctgtggaaacgagaaaacaaacctaacctgctataatgggggtaattgtactgagtttcagactgagctgaagtgtatgtgcagaccagggttcactggtgaatggtgcgagaaggacatagacgagtgcgcgagcgacccatgtgtaaacgggggattatgccaagatctgctaaataaatttcagtgcctttgcgacgtggcctttgcaggcgagcggtgtgaggttgacctggcagatgacctaatatccgatattttcaccaccattggctccgtgacagtcgccctgctcctcattttattgttggccatagtcgcttcagtggtgaccagcaacaagcgggcaactcagggcacatacagtccgagcagacaagaaaaggaggggtctagagtcgagatgtggaacctgatgccccctccagctatggaacgcttgatttag

SEQ ID NO: 219371 - DNA, 3885 bp, synthetic construct
  misc_feature 1..3885: note = Description of Artificial Sequence: Synthetic coding sequence
  source 1..3885: mol_type = other DNA
atggctctgaagaatatcaattatttgttgatcttttaccttagtttttctctcctgatctacatcaagaattcattctgtaacaagaacaacacgcgttgtctgagtaactcttgccagaacaatagcacgtgcaaagatttctccaaggataatgactgcagctgttcggataccgctaacaatttggacaaagattgcgataacatgaaagatccttgcttcagcaatccttgtcagggatctgccacctgcgtcaatactcccggagagaggtccttcctgtgcaaatgcccgccagggtattccggcaccatctgtgagacgacaatcggcagttgcggcaagaacagctgccagcatgggggtatctgccaccaggatccgatatacccagtctgtatttgccctgcaggatacgcaggcaggttttgcgagattgaccatgacgaatgcgcatcgagtccgtgtcagaacggggctgtgtgtcaggatggcattgacggatattcttgtttttgtgtccctggttaccaggggcgtcactgcgacctggaagtggatgagtgcgcctccgacccctgtaagaatgaggccacctgcctcaacgagatcggcagatacacctgcatctgtccccacaattactcaggctataccggggctcagtgcgagatcgacctgaacgaatgtaactccaatccctgtcagtccaatggcgagtgcgtcgagctgtcatctgaaaagcaatacggcagaatcacagggctccctagtagcttttcctaccacgaagctagcggatatgtatgtatttgtcagcctgggttcaccggaatccactgtgaagaagatgtaaatgagtgcagctctaacccttgtcagaacggagggacttgtgaaaacctacctggtaactacacctgccactgcccatttgacaacctttctaggacattctacggcggacgcgattgcagcgatatcctgttaggttgcacacatcaacagtgtctcaacaacggaacgtgcatcccccactttcaggacgggcaacatggatttagctgcttatgtcccagcgggtataccggctccctatgcgagattgccaccactctgtcatttgagggcgacggatttttatgggtaaagtctggttctgtaactaccaagggatcagtctgcaatatcgcccttaggttccaaacggtgcagcctatggccctattgctgtttcggagcaatagggatgtctttgtgaagctcgagttgctgagcggatacatacacctcagcattcaggtcaataatcagtccaaagtgctcctgtttatcagtcataacacaagtgacggcgagtggcacttcgtcgaagtcatattcgcggaggctgtgactctgaccttgattgatgactcctgcaaggaaaaatgtattgcaaaggcgccaaccccacttgagtcagatcagtcaatctgtgccttccagaactcatttctcggagggttgcctgtgggaatgacctccaacggcgtcgcactcctgaatttctacaacatgcctagcacaccgtccttcgtgggatgcctgcaggatatcaaaattgactggaaccacataaccctggagaatataagcagtgggagttccctcaatgtcaaggcaggttgcgtgcggaaggactggtgcgaaagtcagccatgccagtctcggggacggtgcattaatttgtggttgtcataccagtgtgactgccaccgcccatacgaggggccaaattgtctccgtgagtatgtggctgggcgatttgggcaggatgacagcacaggctatgtgatctttaccctggacgaaagctacggggacacaatatcattgtcaatgtttgtccggacactgcagccctctgggctgctgttggcgctagagaacagcacataccagtacattagagtgtggctggaacgtggtcggttggctatgctcacaccaaactcaccgaagctggttgtcaagttcgtgctgaacgatggcaacgtgcatctgataagcctgaaaataaaaccctataagatagaactctatcagtcctcccagaacttggggttcatcagtgcctccacatggaagattgagaagggtgacgtgatttatatagggggactgcctgacaagcaggagacagaactgaatggtggattcttcaaaggatgtatccaggatgttagactaaataaccagaatctggagttcttcccaaatcctactaacaacgcctctctgaaccctgttctcgttaatgtgacgcaaggttgcgccggtgataactcatgcaaatctaacccttgtcacaatggaggtgtgtgtcactcaaggtgggacgatttttcctgctcgtgtcctgcgttgacatccggtaaggcctgcgaagaggtccagtggtgtggcttctcaccatgccctcatggcgctcaatgccaacccgtgctgcagggatttgaatgtatagcaaatgctgtcttcaacgggcagtctggccaaatactcttcaggtccaatggcaatattacacgggaactgaccaacattacttttgggttccggacacgagacgccaacgttataattttacacgcagagaaggagccagagttcctgaacatctcaatccaggattcacggctcttttttcaactccaaagcggcaatagtttctatatgctgtctctaacatccctgcagtcagttaacgacgggacgtggcatgaggtcacgctgtctatgacagatccacttagccagacatctagatggcaaatggaagtcgataacgaaacaccctttgttaccagcacaatcgctacagggtctctgaattttctgaaagataacacggacatctacgttggggaccgggcaatagacaacattaagggactgcaagggtgtctctccactatcgaaatcggcggtatctatttgtcttactttgaaaacgtgcacggattcatcaacaagccccaagaggagcagtttcttaagatcagcactaactcggttgttacgggttgtctgcaactcaatgtctgcaattcaaacccgtgtctgcacggaggaaactgcgaggacatctattcctcctaccattgctcttgccctctgggctggtccgggaaacactgcgagctgaatattgatgaatgcttctcaaatccctgcattcacggaaattgtagtgacagggtggctgcgtatcactgtacctgtgaacctggatacaccggggttaattgcgaagttgacattgacaattgtcaaagccatcagtgtgcgaacggggctacctgtatcagccacaccaacgggtactcatgcctttgtttcgggaatttcacaggcaagttttgtaggcaatctcgtctcccttccacagtttgtggcaacgaaaagacaaatctgacctgctataatggtggaaattgtaccgaattccagaccgagttaaaatgtatgtgccgcccagggtttaccggagagtggtgcgagaaagacatagatgaatgcgcctccgacccatgtgttaatggaggcctatgtcaggatctgcttaataaatttcagtgtctgtgcgacgtggccttcgccggagaaagatgtgaggtggatctggccgacgatcttatcagtgatatctttacaacaataggctccgtgactgtcgcactgctgcttattctgctcctggccatcgttgccagcgtcgtgacttcaaataaaagagctacacagggaacctactcgccctctcgccaggaaaaggagggtagccgcgttgaaatgtggaacctaatgcccccacccgctatggagagactcatttag

SEQ ID NO: 219372 - DNA, 3531 bp, synthetic construct
  misc_feature 1..3531: note = Description of Artificial Sequence: Synthetic coding sequence
  source 1..3531: mol_type = other DNA
atggctcttgcaaggcccggtacaccagacccccaagcactcgccagcgtgttactgctcctgctctgggcccctgccttatcactactcgccggaacagtcccctcagagccaccgtctgcctgcgcgagcgatccctgcgctcccggaaccgagtgccaggccacagaatcaggcggttacacatgcggacctatggaacctcgtggctgcgcaactcagccgtgccaccacggtgcactctgcgtgccccaggggcctgatccaaccggattccggtgttattgcgtgcctggttttcagggcccaagatgtgaactggatattgacgaatgtgctagtaggccctgtcaccatggggcaacgtgtcgtaacctggctgatcgatatgaatgccactgccctttgggctatgctggcgtaacttgcgaaatggaggtcgacgagtgcgcctccgcaccttgcttacacggcggaagctgtctggatggcgtaggtagctttcgctgcgtgtgcgcacccggatatggtggaactcgctgccaactggatctagacgagtgtcagagtcagccctgcgcccacggcggtacatgtcacgacctggtgaatggattccgctgcgattgcgcagggacaggttatgagggcactcactgtgaacgggaggtccttgagtgtgcttctgctccatgtgagcataacgcctcatgcttagaagggctgggatccttccgatgcctgtgctggcccggatattcgggtgagctctgtgaggtcgacgaagatgagtgtgcgtccagtccttgtcagcacggagggcgttgcctacagagatctgatcctgcattgtacgggggagtgcaagctgccttcccaggagcgttttcctttaggcacgcggctggcttcctatgccattgtcctccgggttttgaaggggcagattgtggggtggaggtcgacgagtgcgccagcagaccctgccttaacggcggacactgccaggacctcccgaacggcttccaatgccattgccctgatgggtatgcgggacctacttgtgaggaggacgttgatgaatgtctgagtgacccctgtcttcacggcggaacctgtagtgatacggtggctggctacatttgtcggtgtcccgagacctgggggggtagagattgtagcgtacaactgaccggttgtcagggacacacctgtccgctagccgcaacctgcatccccatcttcgagtctggtgtgcacagctacgtatgccactgccctccgggaacccatggtcccttttgcggtcagaacactacattctctgtgatggcaggttcgcccatccaggcttctgtcccagccggaggcccattgggtctcgccctcaggtttcgcacaactctccccgctggaacgctggcaaccaggaacgatacaaaagagtctctcgagttggcactcgtcgccgctactctccaggcaaccctttggtcctatagcaccactgtgctggtactgaggctgccagacctggccctgaacgacgggcactggcaccaagtagaggtggtgttgcacctcgctacactcgaattgcgcttgtggcacgagggctgcccagcaagactatgtgtggctagtggacctgtcgccctggcgtcaacagctagcgccacccctctcccagctgggatatcatctgctcagcttggtgacgcgacattcgcaggatgtctgcaagacgtgagagttgatggacacctgttattaccagaagatcttggcgaaaacgtgttgctcgggtgtgagaggcgggagcaatgtaggccgttaccctgtgtccacggcggaagttgcgtcgacctgtggacgcactttcgctgcgattgtgccagacctcatcgcggtcctacatgcgcagatgagatccccgcagccactttcggtcttggtggcgcaccctcaagcgcttcattcctgctgcaagagctacccggtccgaacttgactgtcagtttcctgctgaggacccgcgaatccgcaggcttgcttcttcagttcgctaatgactctgctgctggactgactgtcttccttagtgaagggcgtatacgggcagaggtcccagggtctccagccgtggtgctcccaggcaggtgggacgacgggctgcggcacctcgtgatgctgtcctttggccctgatcagctccaggatttgggacagcatgtgcatgtgggcggtagactcttggccgcagactcccagccgtggggcggaccattccggggttgcctgcaagacctgcggctggacggctgccatctcccattcttccccctcccgctagacaacagcagccagcctagtgagctgggcggtcggcaatcctggaatctgacagccggttgtgtgtctgaggatatgtgcagccctgatccttgctttaatggtggcacatgcctcgtcacttggaatgatttccactgcacttgtcctgctaacttcaccggaccaacctgtgctcagcagttgtggtgccccggtcagccctgtttgcctcccgctacctgcgaagaggtacctgacggattcgtgtgcgttgcagaagccaccttcagagaaggtcccccagctgccttctccggccacaacgcctcaagcggccgtctccttggaggactctccctcgctttccgcacaagggattcggaggcctggctgttgagagctgccgctggggcactggagggcgtatggttggccgtgcggaacggatccctggcgggtggtgtgagaggtgggcacgggctgcccggagcagtcctaccgatcccgggacccagagttgccgacggcgcttggcacagagttcgcctggccatggagagacctgccgctaccacctctagatggttgctgtggctggatggtgcggctacgcccgttgccctgcgcggattggccagtgacttgggctttctgcagggtccaggagccgtacgtatacttttggccgaaaacttcacaggctgtctcggtcgcgtggccctgggtggcttgcctctaccgttggctagaccacgacccggtgccgctcccggtgccagagagcatttcgcaagttggccgggtacgccagctcctatactgggttgtaggggagcccctgtgtgcgctccgtctccatgcctgcacgatggggcttgtcgtgacctctttgatgctttcgcctgtgcctgcggccctgggtgggaaggcccacggtgcgaggcgcacgtcgacccctgtcactccgctccatgtgcgaggggcaggtgccacacccatccagatggacggttcgagtgtcgctgtccccctggttttggcggtcccaggtgtaggtgggatggctgggccggaggctgggccgctaacgccccttggggctatgggggagcggaaaagagcgcgagatcggtggatgagtctctgccatttcccggtccacacgtgctaatctgtgacatgcggaggactgtctag

SEQ ID NO: 219373 - DNA, 2862 bp, synthetic construct
  misc_feature 1..2862: note = Description of Artificial Sequence: Synthetic coding sequence
  source 1..2862: mol_type = other DNA
atggccatggagcccggtgccctttggactttcctgggacacctgtggctccttgcgggacccacttgcgaagaggacgtggacgagtgtttgagcgacccatgcctccacggaggtacttgctctgacacagtggcaggctatatttgtagatgtcctgaaacttggggaggaagggattgcagcgtccagctgacaggttgtcagggacatacgtgccctctcgccgctacatgtatccctattttcgaatccggcgtccatagctatgtatgtcactgtccaccgggaacacacggacccttctgcggtcagaatactacatttagcgttatggccggatcccccattcaagcttctgtgccggcaggcggaccactggggttagcccttcgcttccgaacaactcttccagcagggactctggctacacgtaacgataccaaagagtccctggagttagccctggtggctgccaccttacaagctacgctgtggagctacagtacgactgtgctggtgttgcgcctccccgacctggctctgaacgatggacactggcatcaggtagaggtggtgctgcatcttgctactctggaactgaggttgtggcatgaaggatgccctgctagactttgtgtagctagtggacccgtggccctggcatccaccgccagcgccactccactgcccgcagggatctcctccgcacagctgggggacgctacattcgctggctgcctccaagatgttagagtggacgggcatctgctgctgccggaagacctaggtgagaatgttcttctcgggtgcgagcgccgagagcagtgccgccctttaccgtgtgtacatggtggatcatgcgtggacctgtggactcacttccgctgtgactgcgcaaggccccatcgcggacccacttgtgcagacgaaattcccgctgccacgtttggacttggcggagcaccaagcagcgctagtttcttgctccaagagcttccaggacccaatctgactgtctctttcttgttgagaactcgggagtcagctggcctcctgctgcagttcgctaatgacagtgctgcaggtctcacagtttttttgtctgagggcagaatcagggccgaggtgcctgggtcaccagccgtggttctgccaggtcgatgggacgacgggcttagacatctggtaatgctctcttttggacctgaccagttgcaggacctggggcagcatgtgcatgtgggcggacggttgctggcagctgattcacaaccctgggggggaccattcagagggtgtctacaggatctgagacttgacgggtgccacctgccatttttcccactccccctggacaactctagccaaccttctgagcttggaggtcgccagtcatggaacctcactgctggctgcgtttcagaagacatgtgcagcccagacccgtgttttaatggcggaacctgtctggtcacatggaacgattttcactgtacctgtccagcaaacttcacagggccaacatgcgctcagcagctttggtgccctggacagccctgtctccctccggcaacctgtgaagaggtgccggacggttttgtctgtgttgccgaagcaacattcagagaagggcctcccgctgcctttagcggtcacaatgcttcttctgggaggttgctcggaggcttgtccctggcgtttcgtaccagggacagcgaggcatggcttttgcgcgctgctgcaggagctttagaaggggtgtggctcgctgttaggaacggaagcctcgcaggtggggtcaggggcggtcatggcctgcctggggctgtgttgcccatccccggacctcgggtggctgacggcgcttggcatcgcgtccggctggccatggagaggcccgctgcaactacttcaagatggctactgtggctcgacggggctgctacccctgtagctttaagggggctcgcttccgacctcggcttcctgcagggccctggagcagtgcgtattctccttgcggagaattttacaggttgcctggggagggtggccttaggcggactacctttgccgctggctagaccccgacccggagccgctcctggggcaagggagcattttgcaagttggcccggaacaccagcaccaatcctgggatgtaggggtgctccggtctgcgctcccagcccatgtttacacgacggtgcgtgcagggacctgttcgatgcgtttgcttgcgcgtgtggcccaggatgggaaggccctagatgtgaggcacatgtcgatccttgtcattccgccccatgcgcaagaggccgatgccacactcatccagacggaagatttgagtgccgctgccctcccggtttcggtggcccacgttgtcgtctgcctgtccccagcaaggaatgcagcttgaacgtaacatgtctggatggctcaccgtgcgagggtggatcccctgccgcaaattgctcttgtcttgagggacttgccggacagaggtgccaggtgcctactctcccctgcgaagctaacccatgtctcaacggaggcacatgcagggctgcaggtggcgtttcagaatgtatctgcaatgctaggttcagcggtcaattttgtgaggtcgctaaagggttgccactccccctcccattccccctgttggaggtggcagtacctgctgcatgtgcttgcttactgctgctgttgctcggactcctctcaggtatcctagccgcacggaaacggaggcagtccgagggaacatactctccaagccagcaagaggtagcaggcgctcgtctggagatggactccgttctgaaggtcccacccgaagagaggctcatttag

SEQ ID NO: 219374 - DNA, 3858 bp, synthetic construct
  misc_feature 1..3858: note = Description of Artificial Sequence: Synthetic coding sequence
  source 1..3858: mol_type = other DNA
atggctctggcccgtccgggtaccccagacccacaagctctcgcatcggtgcttttactgctgctgtgggctcctgccctaagcctgttggccggtacggtgcctagtgagcccccatctgcctgtgccagtgatccatgcgcgccaggtaccgagtgtcaggccactgagtccggcggttacacttgcgggccaatggaacccaggggttgtgcgacccagccttgccaccatggtgccctttgcgtgccacagggacctgacccaactgggtttagatgctactgcgtgccaggcttccagggcccacggtgcgaacttgacattgacgagtgtgcttccagaccatgccatcacggggcaacttgcagaaatctggccgatcggtacgagtgccactgtcccctcggttatgccggagtaacgtgcgaaatggaagtagatgaatgcgcatctgcaccttgcttgcatgggggaagctgtctggacggcgtagggtcttttaggtgcgtgtgcgcaccagggtatggcggaacacgatgccagctggacctcgacgagtgtcagagccagccatgcgctcatggtgggacctgtcacgaccttgtgaatgggttcagatgtgactgcgccggaacaggatacgaaggcacacattgcgagagagaagtgttggagtgcgcctctgctccgtgtgaacacaatgcttcgtgtcttgagggtctgggctctttccggtgcctatgctggcctgggtactctggtgagctttgtgaagtggacgaagatgagtgcgcctcatccccatgccagcacggcggtcggtgtctgcaacgctcggaccccgctctttatggtggtgttcaggccgcttttcctggggcattctcttttagacacgccgctggctttctgtgccactgtcctcccggattcgagggggctgattgcggtgtcgaagtggacgaatgcgcatctcgtccatgcttgaatggcggtcattgccaggacctgccaaatggatttcagtgtcactgtcctgatggttatgcagggcctacatgtgaagaagacgtcgacgaatgcttgagcgacccatgcctgcacggaggaacctgctctgatacggtagcgggatatatttgccgttgccctgaaacgtgggggggacgcgattgctctgtccagttgaccgggtgccagggccacacatgtcccctggcggcaacgtgcatcccaatctttgagtcaggggtgcacagctatgtgtgccactgtcctcctggcacccatggccctttctgtggccagaacacgacattctctgtcatggctgggtcccccatccaagcttctgtgcccgctggcggaccgctcggactcgcgttgaggttcaggaccaccctccctgcgggaactctggcaacgaggaatgatactaaggagtcacttgaactcgcactggtcgcagccacattgcaagcaacgctgtggagctactccactactgtcctggtgctgcggctgcctgatttggcccttaatgatggtcactggcaccaggtcgaagttgtgctccatttagcaaccctcgagctgcgactgtggcacgaagggtgcccagccaggctctgcgtggcttcaggtccagtcgccctcgcaagtacagcaagtgcgacccctcttcccgctgggattagcagcgcccagctgggggacgcaacttttgccggatgccttcaagacgttagggtcgacgggcacctgctcctccctgaagacctgggtgaaaatgtgttgctaggatgcgagcgccgtgaacagtgccggcctctcccctgcgttcacggtggatcttgtgttgatctgtggacccattttcgctgtgactgtgcacgccctcaccggggacccacctgcgccgatgagatccccgcagccacctttggactgggaggtgctccttcttctgccagtttcttgctacaggaacttcccggaccaaatttgactgtgtccttccttctcagaacacgcgaatcagcgggtctgttgctgcaattcgccaacgatagtgctgctggcctcactgtatttctgagcgaagggaggatccgcgctgaagtgccaggctcaccggctgtcgtactgcctgggagatgggatgatggcctgcggcacctggtcatgctgtccttcggaccggaccagctgcaggatctaggccagcatgtgcatgtgggcggtcggctgctggccgctgattcccagccctggggtggcccttttcgcggttgcttacaggacctgagactggatggttgtcacctgcccttcttccccttgccactcgacaactccagtcagccttcagagctggggggacgccagtcttggaacctgaccgctggctgcgtttcagaggacatgtgcagccctgacccttgtttcaatggcggtacatgccttgtgacttggaacgactttcattgcacctgtcccgcaaattttaccgggccaacctgtgcccagcagttgtggtgtcctgggcagccttgtctgcctccagccacctgtgaggaagtcccggatggctttgtgtgtgtagccgaagccactttccgggagggccctcccgctgcattcagcgggcacaatgctagctcaggaaggctgcttggcggtctctctctcgcattcaggacgcgtgatagcgaggcatggttgctcagggccgctgctggagccctcgagggggtctggttagctgtcagaaatggttcactggccggtggcgttagaggtgggcacgggctgcctggagctgtgctgcctatccctggtcccagggtagctgacggcgcatggcatcgggtccggctagctatggaacgaccagcagcaacaacatcaaggtggctcttgtggctggacggagcagcaacccctgtggcacttcggggtttagcctctgatctgggattcctgcaagggcctggcgctgttagaatcctgttagcggagaacttcaccggatgtctgggccgagtggcactagggggtctgcctttgcctctggcacgtcctaggcctggggcagcgcctggcgcaagggagcacttcgctagctggccaggcacccccgcacctatccttgggtgccgaggggcaccggtgtgtgctccatctccttgtctgcacgacggcgcatgccgtgacctgttcgacgcctttgcatgtgcttgcgggccaggctgggagggccctcggtgcgaagcacacgtagatccgtgccactccgcaccatgcgcgagagggaggtgtcacacccaccctgacgggaggttcgagtgtcgatgcccacctggttttggcggaccccgatgtagattacccgtgccatctaaggaatgctctctgaacgtgacttgcctggatgggtcgccgtgcgaaggtggaagccccgcagccaactgttcgtgcctcgagggcctggcgggacaacgatgccaggtgccgacacttccctgcgaagccaacccttgtctgaatggaggaacatgtcgggctgcaggaggggtgtctgagtgcatttgtaatgccaggtttagcgggcagttttgtgaggtcgctaagggtctgccattgcctctgccattccctctactggaagttgccgtgcccgcagcgtgtgcctgtctcttattgctgctgttggggctcttatccgggatcctcgccgcacggaaaaggcgccagtcggagggaacctatagcccttctcagcaggaagtcgctggtgcacgtctggaaatggattccgttttaaaggtgcctcccgaagagcgactcatttag

SEQ ID NO: 219375 - DNA, 363 bp, synthetic construct
  misc_feature 1..363: note = Description of Artificial Sequence: Synthetic coding sequence
  source 1..363: mol_type = other DNA
atggccaacccaggtctgggcctgcttttagctctaggactgccttttctgctggcgcgatgggggagagcctggggtcagatccaaaccacatcagcgaacgaaaattcaactgtgctgcctagctcaacttcaagctctagcgacgggaatctgaggccggaagcaatcacagctattattgtggtcttttcgttgcttgccgctcttcttctggcagtcgggctggccctgctggtgaggaagctacgagagaaaagacagacagagggaacctatcgtccgtcctcagaggagcaggtaggcgcaagagtccctcccacacccaatctgaaactcccacctgaggagcggctgatctag

SEQ ID NO: 219376 - DNA, 372 bp, synthetic construct
  misc_feature 1..372: note = Description of Artificial Sequence: Synthetic coding sequence
  source 1..372: mol_type = other DNA
atggcaaaccctgggctcggtctcttgctggccttaggcctgccattcttgctcgccagatggggcagagcatggggccaaattcaaacaacctccgccaacgaaaacagtacggtcctccccagtagcactagctcttcatccgacggcaatctgagaccagaagcgattacagctatcatcgtcgtgttcagcctgctcgccgctctgctactggcagtcggcttggcgctcttggtgaggaagctgagagaaaagcgccagactgagggcacttataggccatccagtgaggagcagttttcgcacgccgctgaggcacgcgctcctcaagattctaaagagacagtccagggctgcttacctatttag

SEQ ID NO: 219377 - DNA, 363 bp, synthetic construct
  misc_feature 1..363: note = Description of Artificial Sequence: Synthetic coding sequence
  source 1..363: mol_type = other DNA
atggcgaatcctggcttgggactactgttggccctggggttgccttttctgctggccaggtggggcagggcctggggtcagattcagacaacaagcgccaacgaaaacagcaccgtgttgccaagctctaccagctcctccagcgatggcaacctccggccagaggctatcacagccattattgttgtatttagcttattggccgcactcctgctggctgtaggcctagccctcttagtgcgcaaactcagagagaaaagacaaaccgaaggaacataccggcctagcagtgaagaacaagtgggcgcacgcgtgcctcctaccccgaatctcaaattacctcctgaagaaaggctaatctag

SEQ ID NO: 219378 - DNA, 1599 bp, synthetic construct
  misc_feature 1..1599: note = Description of Artificial Sequence: Synthetic coding sequence
  source 1..1599: mol_type = other DNA
atgcccgcacctccgggacggacccacacctggttcctcctccagtccttggaggacctggacacatctctgcgcaagctgaacagcagactgttcgtcgtcagggggcagcccgctgatgtgttccctcggctcttcaaggagtggggggtgactaggctgacctttgagtacgacagcgagcctttcggcaaagagcgggatgccgctattatgaagatggccaaagaagctggggtcgaggtggtgaccgagaattcccatacgctgtacgacctcgatcgcattatcgagctaaatggacagaagccccctcttacatataagcgcttccaggccattatcagcagaatggagctgcccaagaaacctgtgggactggttacctctcaacagatggagagctgcagggccgagatccaggagaatcatgatgagacttatggtgtgcccagcctcgaggaactggggttccccacggaagggttgggccctgctgtttggcagggcggtgaaactgaggctctcgcacgacttgataagcatcttgaaaggaaggcatgggttgccaactatgagcggcctcgcatgaacgccaacagcctgctggctagcccaacaggcctctccccttacctccgcttcgggtgcctgagttgtcgtctgttctactaccggttgtgggatctttataaaaaggtgaaaagaaattctaccccccctttaagccttttcgggcagctcctgtggagagagttcttttataccgccgcaaccaacaatccccgatttgaccggatggagggtaatcctatttgcattcagatcccctgggaccggaatccagaggctctcgcaaaatgggccgagggaaaaacaggattcccttggatagatgcaattatgacccagctgcgccaggaaggatggatccatcacctggctcggcacgctgtcgcatgcttcctcactcgtggagacctgtgggtgtcttgggagtctggggtccgcgtgttcgatgagctgctgcttgacgcggactttagcgtgaacgctggctcctggatgtggctgtcatgtagtgcattctttcagcaattcttccactgttattgccccgtcggtttcgggcgaagaaccgaccctagtggcgactacattcgacggtatctgcccaaactgaaagcatttccaagccgatatatttacgaaccttggaacgcaccagaatctattcaaaaagcagccaagtgcatcatcggggttgattatcccaggcctatcgttaatcacgcagaaaccagtcggctgaacattgaacgcatgaaacagatctatcagcagctctctcggtaccgaggactttgcctgctagcttccgtcccttcttgcgtggaggatctgagccacccagtagccgagccatcaagcagccaggctggatccatgtcctcagctggacccaggccactgccaagtggaccagctagccccaagagaaaattggaggctgcggaggaacctcctggcgaggagctgagcaagcgggcaagagtggctgagctgccaacacctgagcttccgagtaaggacgcctag

SEQ ID NO: 219379 - DNA, 1845 bp, synthetic construct
  misc_feature 1..1845: note = Description of Artificial Sequence: Synthetic coding sequence
  source 1..1845: mol_type = other DNA
atgggtggggtgcacgttgcatacagaggaggggcaggcgttgccggtgccgtgtggaccgtcatggcagctactgtggccacagcagccgctgtcgctcctgctcctgcgccagggactgatagcgcatcatcagtccactggttccgcaaaggacttcggctgcacgataacccggcactgctagcagcagttcgaggcgcaaggtgtgtgaggtgtgtgtacattctcgatccatggttcgctgctagcagctcagtggggatcaaccgctggagatttctcctccagtcactggaggacctggatacttctttgcgtaagctcaactcccggcttttcgttgttcgaggacagccggctgatgtgttccctcggctgttcaaagagtggggcgtcactcgactcacattcgaatatgactccgagcctttcggaaaagagagggacgccgcaatcatgaaaatggccaaagaagccggtgtggaagtggtgacggagaatagtcacacactctacgacctcgatcggattatcgagctcaatgggcagaagcctccgttgacctacaagcgttttcaggcaattatctcccggatggagttgccaaaaaaaccagtgggactcgtgacttcccaacagatggagagctgcagagccgagatacaggaaaatcatgacgagacgtacggtgttccatctttggaagagctcggattcccaacagagggcctcggaccggcagtatggcaaggcggagaaacggaagctcttgctcgactcgacaaacatctggaacgaaaagcatgggtggccaactacgaacgccctcgaatgaacgccaattctctgctcgcttcgcccaccggcttgtcaccttacctgagatttgggtgcttaagttgcaggctattctactacagattgtgggatctctacaaaaaagttaaacgcaactcaactccgccactatccctctttggacaacttctgtggagggagttcttttacacagctgccaccaataatcctcgatttgataggatggagggtaaccccatttgtatccagatcccctgggacagaaaccccgaagcactagccaaatgggcagaagggaagaccgggtttccctggatcgacgcaatcatgacacagctgcgccaggagggatggatacatcatttggccagacatgccgtggcatgttttcttacacgaggcgacctctgggtgtcctgggagagcggggttcgggtttttgacgagctgttactggacgccgacttcagcgtaaacgctggcagctggatgtggctatcctgctctgctttcttccagcagttcttccattgctactgtcccgtcggattcgggcgtcgcactgacccatcaggcgactacattcgtagatacctccctaagctcaaggctttccccagtcgctacatctatgaaccgtggaacgccccagaaagtattcagaaagccgcaaagtgcattattggagtcgactatcccaggccaatcgttaaccatgctgagacctcgcgcttaaacattgagagaatgaagcagatttatcaacagctgtctaggtatcgcggactgtgtctgttagcgagcgtaccgtcctgcgtggaggacttgtcccatcccgtagcagaaccaagttcatcacaggccggttccatgtcctccgcaggcccaaggccgctgcccagcggcccagctagtccgaagcggaaactggaagcggcagaggagcccccaggggaggagttgtccaaacgggcacgggttgccgaactgcctacccctgagcttcctagtaaggacgcctag

SEQ ID NO: 219380 - DNA, 522 bp, synthetic construct
  misc_feature 1..522: note = Description of Artificial Sequence: Synthetic coding sequence
  source 1..522: mol_type = other DNA
atggatgtcactatccagcacccttggtttaagaggaccttagggccattctacccatcaaggctctttgaccagttcttcggcgagggcctgtttgaatatgacttgctcccatttctgagcagtacaattagcccatattatagacagtctctgttcagaactgttctagattctgggatttcagaagtgaggagtgatagggacaaatttgtaatctttctggatgtgaagcacttctcccccgaggacctgacagtgaaggttcaggatgattttgtagaaatacatggaaagcataatgagaggcaagatgaccacgggtacatctcacgggaatttcaccgccgttataggctgccaagcaatgtggaccagtcagcgctcagctgtagtctgagtgcggatggtatgctcaccttttgcgggccaaaaattcagactggcctggacgcaacccacgccgagcgggcaatcccagtcagtcgcgaggaaaagcctactagcgctccctcatcatag

SEQ ID NO: 219381 - DNA, 570 bp, synthetic construct
  misc_feature 1..570: note = Description of Artificial Sequence: Synthetic coding sequence
  source 1..570: mol_type = other DNA
atggcgctggtccggggaggctggctctggcgccagtcaagtattctgcgccgatggaagagaaattggttcgccctgtggctggatgggacccttggctattaccacgacgaaacagcgcaggacgaagaagatagagttcttatacatttcaacgtgcgagatataaagataggtcctgagtgtcacgatgtgcaacccccagagggcaggtctcgtgacggactactcaccgtaaacctacgtgagggtgggcgattgcatttatgcgccgagaccaaggacgatgccttggcttggaaaaccgctctcctcgaggcaaattctactcctgtgagggtctactctccctaccaggattattacgaggtggttccacctaacgcccacgaagctacctatgtacgatcatattacggcccaccctacgcagggccaggcgtcacacatgtgattgtgcgcgaggatccttgttatagcgcaggggctccgttggcaatggggatgctcgccggagccgctacaggggcagccctcggatcactaatgtggagtccatgctggttctag

SEQ ID NO: 219382 - DNA, 528 bp, synthetic construct
  misc_feature 1..528: note = Description of Artificial Sequence: Synthetic coding sequence
  source 1..528: mol_type = other DNA
atggacattgctatccaccacccatggatcagacgacccttctttccatttcattccccctccagacttttcgaccagtttttcggagaacacctcctggagtctgacctttttccaacatccaccagcctgtcccccttttatctgaggccaccatcttttctgcgagccccaagctggttcgacacagggctttccgaaatgcgcctggagaaggatagattttctgtgaatctagacgtaaaacatttctcacctgaggagttgaaggttaaggttctcggtgatgttatcgaggtgcatgggaagcatgaggagaggcaggacgagcatggatttatcagtagggagttccataggaaatatcgcattcccgcagatgttgatccactgacgatcacgagctcactgtcctcggacggggtgttaacagtgaatggtccaaggaagcaggtctctggtccagagcgaaccatcccaatcacacgcgaggaaaagccagccgtgactgccgcaccaaagaaatag

SEQ ID NO: 219383 - DNA, 525 bp, synthetic construct
  misc_feature 1..525: note = Description of Artificial Sequence: Synthetic coding sequence
  source 1..525: mol_type = other DNA
atggacatcgccattcaccatccgtggattcggcgaccctttttcccctttcatagtccgtcccggctatttgatcagttcttcggagagcacctcctggaatctgacctgtttcccaccagcacaagtctgagccccttctatctgcgccctccatctttccttcgggcaccaagttggttcgatacaggcctgtccgagatgagactggaaaaggatcgcttcagcgttaatttggatgtgaagcatttttctccagaggaactgaaagtgaaagtgctcggcgacgtgatcgaggtccacggcaagcacgaggaacgccaggacgaacatggcttcatctctagagagtttcatcgaaagtatcgcatccctgccgatgtggacccgcttaccatcacctcatcattgtcatcggatggtgtgctcacagttaatggtccccgtaaacaggtgtctgggccagagagaacaattcctataacacgagaggagaaacccgcagtaactgccgctcccaagtag

SEQ ID NO: 219384 - DNA, 528 bp, synthetic construct
  misc_feature 1..528: note = Description of Artificial Sequence: Synthetic coding sequence
  source 1..528: mol_type = other DNA
atggacattgcgatccatcacccctggatccggaggccgttcttccccttccattcgccttcccggctcttcgatcaattcttcggcgagcacctcttggagagcgacttgtttcccaccagcacctccctctcaccattctacttgcggccacctagttttctgagagctccatcatggtttgacactggcctgagcgaaatgcgccttgagaaagataggttctcggtgaatttagatgttaaacacttctcaccagaagagctgaaggtcaaggttttgggggacgttattgaagtccacggtaagcacgaggaaagacaggatgagcatgggtttatcagcagggagttccataggaagtatcgaattcctgcggatgttgacccgctgaccatcacttcctcgctgtcatccgacggggtcttgacagtgaatggcccacgaaagcaggtgagcggccctgagaggaccatccccatcactagagaggagaaacccgctgtgaccgccgctcccaaaaagtag

SEQ ID NO: 219385 - DNA, 234 bp, synthetic construct
  misc_feature 1..234: note = Description of Artificial Sequence: Synthetic coding sequence
  source 1..234: mol_type = other DNA
atggacattgcgatccaccacccttggattagacgcccattcttccccttccattcaccttctcgcctgttcgatcagttttttggagaacacctgcttgagagcgatctgttcccgacctcaaccagtttgagccccttttatttgcggccaccgtccttccttagggctccgtcctggttcgacactggactgtctgagatgagactggaaaaggaccgcttttctgtctag

SEQ ID NO: 219386 - DNA, 393 bp, synthetic construct
  misc_feature 1..393: note = Description of Artificial Sequence: Synthetic coding sequence
  source 1..393: mol_type = other DNA
atggacattgctatccatcacccctggataaggcgcccattctttccttttcattctccttcccgcctcttcgatcaattcttcggggaacaccttctggaatccgacctcttcccgacatcaacttctttgagtcccttctatctgcgaccacctagctttctcagagccccatcctggtttgatacaggcctgtcggaaatgcggctggaaaaggatcgcttttccgtgaacttggacgtgaagcactttagtcctgaagagctcaaggtaaaggttctcggagatgtgatcgaggtacacggcaagcacgaggaacgacaagacgaacacggcttcataagccgggagttccatcgcaagtatagaatccccgcagacgtcgacccctag

SEQ ID NO: 219387 - DNA, 528 bp, synthetic construct
  misc_feature 1..528: note = Description of Artificial Sequence: Synthetic coding sequence
  source 1..528: mol_type = other DNA
atggatattgctatccatcacccctggatccggagaccatttttcccctttcatagcccaagtaggctcttcgaccaattctttggcgagcacttactggaaagtgacttattccccaccagtacgtctctgtcaccattttatctacggcctccgagtttcctcagggccccttcctggttcgatactggactctccgaaatgcggctggaaaaggacaggttctccgtcaatctggatgtgaagcacttctcgcccgaagagttgaaagtcaaggtgttaggggacgtgattgaagtccatgggaaacacgaggaacgccaagatgaacacggctttatctccagggagtttcataggaagtatcggatacctgcagatgtagatccactcacaatcacatcatcccttagctccgacggcgtgttaacagtcaacggtcctcggaaacaggtctcgggcccagaacgtaccatccccattacacgcgaggaaaagccggcagtgactgccgctccaaagaagtag

SEQ ID NO: 219388 - DNA, 528 bp, synthetic construct
  misc_feature 1..528: note = Description of Artificial Sequence: Synthetic coding sequence
  source 1..528: mol_type = other DNA
atggacatcgctatacaccacccttggatcaggcggccattttttccctttcacagtccttcaaggcttttcgaccagttttttggcgaacacctcctggagtcagatcttttcccaaccagcacatcactgagcccgttttacctcaggcccccttctttcctccgcgctccctcctggtttgacactgggctgtcagaaatgcggttggaaaaagatcgctttagcgtgaatttagatgtgaaacattttagccccgaggagttaaaggtgaaggtgctgggagatgtcatcgaggtccacggaaagcacgaagagcgccaggatgaacacgggtttatcagcagagagttccatcgaaagtaccgtattccagccgacgtggaccctcttacaatcacatcttccctctcctccgatggagtgcttaccgttaacggcccacgcaaacaagtctctggccctgagcgtaccataccgatcactagagaagagaagcctgcagtaactgccgctccaaagaaatag

SEQ ID NO: 219389 - DNA, 210 bp, synthetic construct
  misc_feature 1..210: note = Description of Artificial Sequence: Synthetic coding sequence
  source 1..210: mol_type = other DNA
atggatatcgctattcaccacccatggatccggaggcccttcttcccatttcacagtccttcacgcctgtttgatcagttcttcggcgagcatctgctggagtcagacctgtttccaacatcaacatccctttcccctttctacctgagacctcccagctttctgcgggctccatcctggttcgacacggggctatcagagatgcgttag

SEQ ID NO: 219390 - DNA, 2148 bp, synthetic construct
  misc_feature 1..2148: note = Description of Artificial Sequence: Synthetic coding sequence
  source 1..2148: mol_type = other DNA
atgcacctcctgcctgcacttgcaggagtgctcgcaacgcttgtgttagcccaaccatgcgaaggaactgatccggcttctccaggcgctgtcgagacttccgttttgcgcgactgtattgctgaagctaaactgctggtggatgcggcttacaactggacccaaaagtctattaaacagagactgcgtagtgggtcagcctctcctatggatctcctcagctacttcaagcagccggtcgctgcaacacgtacagtggttagggccgcagactacatgcacgtggccttgggacttcttgaagaaaagttacagccacagagatctgggccattcaacgtcaccgatgtgttaaccgagccacaactcaggctgttgtctcaagcttctggttgtgccctgcgtgaccaggcggaacgatgttctgacaaatacaggactatcactggcagatgcaacaacaagcgcagacctttactcggagcgagcaaccaggccctggcccgatggcttccggctgaatacgaagatggattaagcctacctttcggctggaccccatcccggaggcgcaatgggttccttttgcctctggttcgcgcagtttccaatcagattgttcgctttcccaacgaaaggttaacgagtgacaggggcagagccctgatgtttatgcagtgggggcagtttattgaccacgacctggatttctccccagaatcccctgcgagagtagccttcaccgccggagtagattgcgaaagaacgtgtgcccagctcccaccgtgctttcctattaaaatcccccctaacgaccctcgcataaaaaaccagagagattgcattcctttttttcgcagtgcacctagttgtccccagaataagaaccgcgttcggaaccagattaatgctctcacctcatttgtggatgcttctatggtgtatggaagcgaagtctcactgagcctgaggctgaggaatcggacaaattacctgggcctcctggcaatcaaccagagattccaggacaacgggagagcattactgccgttcgacaacctgcacgacgacccgtgtctcctgaccaaccgatctgcaaggatcccatgttttttagccggagatacacgtagtacagaaactccaaagctggccgctatgcacacactctttatgagggaacacaatcggcttgccaccgaacttcggagactgaacccccgatggaatggtgataagctgtataatgaggccaggaaaatcatgggagctatggttcagatcattacatacagggatttccttccattagttttagggaaggcacgcgcacggagaactttgggacattacagaggttattgttccaacgtagacccacgggtcgccaatgttttcactctcgcatttcggtttggccataccatgcttcagccgtttatgtttcgattggattcccagtacagggcttcggctcccaactcccacgtgcctctcagctctgccttctttgcgtcttggcgaatcgtttacgaagggggtatcgatccaatcctgaggggcttaatggccaccccagcaaagctaaataggcaggatgccatgcttgtggacgaactgagggataggctcttccgccaggttcggcgtatcggcctcgaccttgcagccctgaacatgcagcgcagcagagatcacggcctacctggatataatgcttggcggaggttctgtggcttatcacaacccagaaacttagctcagctatctcgggtactgaaaaaccaggacttggccaggaagttcctgaacctgtatggtacacctgacaatatcgacatctggatcggggctatcgcggagccgctgcttcctggggctcgcgtgggtcccctcctcgcttgcttattcgaaaaccagttcagaagagctagagatggcgacaggttttggtggcagaaaagaggggttttcactaaaaggcagcgaaaggcattgagtaggataagcctgagtaggattatctgcgacaacactgggattaccacagtttcaagggatatcttcagggccaacatctaccccagaggctttgtgaattgcagtcgaatcccccgtttgaatctgtctgcatggagagggacctag

SEQ ID NO: 219391 - DNA, 594 bp, synthetic construct
  misc_feature 1..594: note = Description of Artificial Sequence: Synthetic coding sequence
  source 1..594: mol_type = other DNA
atgtccagtgctcctgccccagggcctgccccagcctcgttaacgctgtgggacgaggaagactttcaggggaggcgatgcaggctgctctctgattgcgccaatgtatgcgagagagggggactgcctagagtgaggtctgtgaaggtggaaaatggggtgtgggtggcttttgaataccctgatttccagggacaacagtttattttagagaaaggcgattaccccagatggagtgcatggagcggcagctcatcccataattccaatcagctgttgtcctttcgccctgtgttgtgtgcgaaccacaatgacagcagagttaccctgtttgagggcgataatttccaggggtgtaagtttgacctggtggacgactatccatccctgcctagtatggggtgggctagtaaagacgtcgggtcactcaaagtgtcttccggtgcctgggtagcgtatcaatatccaggctatcggggataccaatacgtcctcgaacgcgatagacacagcggtgagttctgcacgtacggcgagctcggcacccaagcccacacaggccagttgcaaagcatcagaagagttcaacactag

SEQ ID NO: 219392 - DNA, 594 bp, synthetic construct
  misc_feature 1..594: note = Description of Artificial Sequence: Synthetic coding sequence
  source 1..594: mol_type = other DNA
atgagttccgcacctgccccagggccagcccctgcatcactcactctgtgggatgaggaggatttccaagggagacgctgtagattattatccgattgcgctaacgtgtgcgagcggggtggactccctcgagtgcggtccgtcaaggtagaaaacggtgtgtgggtggcattcgaataccccgattttcagggacagcaattcatcctggagaaaggcgactatccgagatggagcgcctggtccggctcttcatcgcacaacagtaaccagctacttagttttcgccctgttctttgcgcaaaccacaatgacagcagggtgaccctgttcgaaggagacaactttcagggctgcaaattcgatctggtggatgactaccctagtctgcctagcatgggatgggcgtccaaagatgtgggaagcctgaaggtttcttccggcgcatgggtcgcataccaatatcctgggtaccgaggatatcagtatgtcctggaaagagaccgccattctggagaattttgcacctatggcgaactcggaactcaggcccatacaggccagttgcagtcaattcgacgggttcagcattag

SEQ ID NO: 219393 - DNA, 390 bp, synthetic construct
  misc_feature 1..390: note = Description of Artificial Sequence: Synthetic coding sequence
  source 1..390: mol_type = other DNA
atgtcctccgcgccagccccaggtccagctcccgcatcactgaccttgtgggacgaggaagacttccagggacgaagatgccggctcctgagcgactgcgcaaacgtctgtgaaagaggaggactcccacgcgtcaggagtgttaaagtcgagaacggggtgtgggtggcctttgaataccccgactttcaaggtcaacagttcatactggaaaagggcgattatcctcgctggagcgcctggagtggaagcagttcccacaatagcaatcaactcttaagctttagaccagtcctgtgtgccaatcacaatgacagtcgggtgacgctgtttgagggtgataatttccagggttgtaagtttgaccttgtggacgattatccaagctag

SEQ ID NO: 219394 - DNA, 591 bp, synthetic construct
  misc_feature 1..591: note = Description of Artificial Sequence: Synthetic coding sequence
  source 1..591: mol_type = other DNA
atgaccctgcagtgcaccaagagcgccggaccctggaaaatggtcgtctgggatgaggatggcttccaaggcagacgccacgagtttactgcggagtgtccgtcagttcttgaactcgggtttgaaacggttcgctctctgaaagtgctttccggggcttgggtcggcttcgagcacgccggattccagggccaacagtatattctggagcggggagagtatccatcttgggacgcttggggtgggaacacagcgtaccctgctgaaagattgacatcattcagaccggcagcctgtgcaaatcaccgtgactctcgcctgaccatctttgaacaggaaaattttctgggaaagaagggagagctgtccgacgactacccctctcttcaagctatgggttgggaagggaacgaagtcggctcattccacgtccatagcggagcatgggtttgtagtcagttcccgggataccgaggattccagtatgtgctggagtgtgatcaccattctggcgactacaaacattttagagagtgggggagtcacgctccaaccttccaggtgcagtctattcgtcgaatacagcagtag

SEQ ID NO: 219395 - DNA, 1614 bp, synthetic construct
  misc_feature 1..1614: note = Description of Artificial Sequence: Synthetic coding sequence
  source 1..1614: mol_type = other DNA
atggaaagggtgaatgatgctagctgtggacccagcggctgctatacctatcaggtgagtcggcactctacagaaatgttgcataatcttaatcaacagcgtaagaatggtgggagattctgcgacgtgctcctgagagtcggagacgagtcattcccagcccacagagccgtgctcgctgcatgctcggaatacttcgagtccgtcttttccgctcagctgggggatgggggagctgcagacggagggccagccgatgttggcggtgcaactgcagctcccggtggaggagctgggggaagcagagagctggagatgcatactatatcctcaaaggtgttcggtgatattcttgactttgcatacacttctagaattgttgtcaggctcgaatcttttcctgaactgatgacggccgctaagtttctcctcatgcggtctgtaatagaaatctgtcaggaagtgataaaacagtcaaatgttcaaatcctggtgcctcctgcccgtgctgatatcatgctgtttcgcccaccaggaacctcggatctgggttttcctctggatatgactaacggcgctgccctggctgcaaattctaatggcatagccggatccatgcagcccgaggaagaggcagccagggctgcaggagctgccatagccggacaggccagcctgcccgtgctcccaggggtggatagactccccatggttgccggtccactgagcccccagctgctgaccagtcccttcccatcggttgcctcgagtgcaccaccgctcacaggaaagagagggcgtgggcgtccccgaaaggcaaatctgttagattctatgttcgggagccctggaggtctgcgcgaggctggtatcttgccatgtggactgtgtggcaaggtgtttaccgacgcaaaccgtttgagacagcacgaggcacaacacggggtcactagcctgcagcttggctatatcgatttgccgcctccacgactaggagagaatggactgcctatctccgaggatcccgatggtccacgcaaacgctctaggaccagaaagcaggtcgcttgtgaaatttgcggcaaaatctttagagacgtttatcacctgaataggcataaactttcccatagtggtgagaagccctattcttgccccgtctgcggcctaagatttaaacggaaagatcggatgtcctaccacgtgagaagccatgatggttcagttggcaagccatacatttgccagtcttgcggtaagggtttcagccggccagaccacctgaatggtcacatcaaacaggtgcacacgagtgaacggccacataaatgccaggtgtgggtgggaagctcctccggcctgccaccactcgagccattgccgtccgatctgcccagctgggattttgcccaaccggcattatggaggtctagccactcagtacccgatactgccttttcacttagcctcaagaaatcctttccagcactagagaatctgggtccggcacacagctctaacacgttgttttgccctgctccgcctgggtatttgaggcaggggtggacgactcctgagggcagccgcgcattcacccagtggccagttggctag

SEQ ID NO: 219396 - DNA, 618 bp, synthetic construct
  misc_feature 1..618: note = Description of Artificial Sequence: Synthetic coding sequence
  source 1..618: mol_type = other DNA
atggcgtctgatcaccagacacaggccggaaagcctcagtccctgaacccgaagatcattatcttcgaacaggagaactttcagggccacagccacgagttgaatgggccatgtcccaatctgaaagagaccggtgtggagaaagcgggttcagtgctcgtccaggcaggtccatgggtggggtacgagcaggccaattgcaagggagaacagttcgttttcgaaaagggagaatatcctcggtgggactcatggacgagctcaagacgcacagattcgctatccagtctacggcctataaaagtggactcccaagagcacaaaatcattctctacgagaatcccaactttacagggaaaaaaatggaaattatcgatgatgatgtcccttcatttcacgcacatggctatcaggagaaggtgtcatctgtgagggtccagagcggcacttgggtaggataccagtacccagggtatagagggctccagtacctgttagagaaaggcgattataaagattccagtgactttggagctccccacccgcaggtgcagagcgtgagacgcattcgtgacatgcaatggcatcagcggggagcgtttcatccaagtaactag

SEQ ID NO: 219397 - DNA, 1284 bp, synthetic construct
  misc_feature 1..1284: note = Description of Artificial Sequence: Synthetic coding sequence
  source 1..1284: mol_type = other DNA
atgagacatctgggggcttttctgttccttctcggggtgcttggggctttgacggaaatgtgtgaaatacctgaaatggattcccacttagttgagaaactgggtcagcacctcctcccctggatggaccgcctttccctcgagcacctaaatcctagtatatacgtggggctccgactgtccagtctgcaggccggtactaaggaggacctgtacctgcactccctcaagttaggatatcagcagtgtcttcttggttctgcgtttagtgaagatgatggcgattgccagggaaaaccttctatggggcagcttgcattgtatcttttggccttgagagccaattgcgagttcgtgcggggacataagggagatcggctcgtgtcccaactgaaatggttcctagaagatgagaaaagagctatcgggcacgatcataaaggacaccctcacacatcctattaccagtacggcctcgggatcctggccctgtgcctgcatcagaaacgcgtgcacgactccgtcgtggataagctgctatacgccgtggagccttttcatcagggacatcactctgtcgacactgccgctatggcaggattggccttcacttgtttgaagcgatcaaacttcaatccaggccgaagacaacggatcacaatggctatccgcacagttcgggaagagattctgaaagcccagacaccagaggggcactttggcaatgtatactcaacaccactcgctctccagtttctgatgacctctcctatgcgcggtgccgagctggggacagcctgcttgaaggcccgagtagcactgctggccagcctgcaggatggtgcctttcagaacgctctcatgatctcacagctgctgcccgttcttaatcacaaaacttatattgacctaatttttcccgactgtctggctcctagagttatgcttgagcccgcagccgagactatccctcagacccaggagatcatcagcgtgaccctgcaagtccttagtctgctcccgccatacagacagagtatttcagttctggcgggaagcactgtcgaggatgtcttaaagaaggcccatgaattgggtgggttcacctacgaaacccaagcatccctctctggaccttacttgacctccgtgatggggaaggccgcaggggaacgggagttctggcaactgctgcgtgatcccaacacccctctgctacaagggatcgccgactacaggccaaaggatggggaaaccatcgaactccgcctagtaagttggtag

SEQ ID NO: 219398 - DNA, 525 bp, synthetic construct
  misc_feature 1..525: note = Description of Artificial Sequence: Synthetic coding sequence
  source 1..525: mol_type = other DNA
atgggcaagattaccttctacgaggatagagattttcagggccgatgttacaactgtatttccgactgccccaaccttcgggtgtacttctcccgttgcaatagcatcagagtagacagtggctgctggatgctgtatgagagacccaattaccagggacatcaatacttcctccggagaggaaaatatccagattaccaacactggatgggcctgtctgattctgtccaatcttgtcgaatcattccgcacacctcctctcacaagttacgcctttacgagagagacgactacaggggtctaatgtccgagctgacagatgattgtgcatgcgtaccagaattgtttagactccctgaaatttatagcttacacgtgctggagggttgctgggtcctttacgagatgcccaattatagagggaggcagtacctgctgcgtcccggagactaccgcaggtatcacgattggggtggagcagatgcaaaggtcggcagcctgcggcgtgttaccgacctttactag

SEQ ID NO: 219399 - DNA, 528 bp, synthetic construct
  misc_feature 1..528: note = Description of Artificial Sequence: Synthetic coding sequence
  source 1..528: mol_type = other DNA
atgggaaagattaccttttacgaggaccgagccttccaaggcaggtcctatgaatgtactacggactgtccaaacttacaaccctacttttccaggtgcaatagtattcgggtcgagagtggctgctggatgatttacgagcggccaaattatcaggggcaccagtattttctgagacggggtgagtaccctgattatcagcagtggatgggcttgtctgattcgatccgaagctgctgtctgataccacctcactctggggcataccgaatgaagatctacgaccgagacgagctgaggggacaaatgtccgagctaacagacgattgcatttctgtgcaagatcggttccatctcaccgagattcatagcttgaacgtgctggaagggtcctggattttgtacgagatgcccaactatcggggtcgacagtatctgctgaggcctggggaatacaggcgctttctggactggggtgcccctaatgctaaggtagggtcactgaggcgcgttatggatctttactag

SEQ ID NO: 219400 - DNA, 525 bp, synthetic construct
  misc_feature 1..525: note = Description of Artificial Sequence: Synthetic coding sequence
  source 1..525: mol_type = other DNA
atggggaagatcacattttacgaggacagggccttccaggggagatcttacgagacgacaacagattgccccaatttgcagccatatttttccaggtgtaattctattagagtggaatccgggtgttggatgttatatgaaaggcccaactaccaaggccagcagtacctcctgagacgcggagagtaccccgactaccagcagtggatgggcttatccgatagcataagaagttgttgtcttatcccacaaacagtctctcaccgtttaaggctttacgagagagaggatcacaaaggactgatgatggagttgagcgaagactgtcccagcattcaggaccgcttccacctgtccgaaatacgttctcttcacgtgcttgaaggatgttgggtgctatacgaactccctaactacaggggcaggcagtacttactgaggccacaggagtacagacgatgccaggattggggagctatggacgccaaagctgggtcccttcggagagtggtcgatttatactag

SEQ ID NO: 219401 - DNA, 525 bp, synthetic construct
  misc_feature 1..525: note = Description of Artificial Sequence: Synthetic coding sequence
  source 1..525: mol_type = other DNA
atgggaaaaataacactctatgaggataggggctttcaggggcgacattacgaatgctccagcgaccatccaaatctgcagccctacctgtctaggtgcaatagcgccagagtggatagcgggtgttggatgctttacgaacaaccgaattattctgggctccaatacttcctcaggaggggggactacgccgatcaccagcagtggatggggctgtcagactctgtgcggtcatgcaggttgattcctcactcgggaagtcacagaattcgcttgtacgagcgagaagattaccgtgggcaaatgattgaatttacagaagattgcagctgtctgcaggaccgattcaggtttaatgaaattcactccctgaacgtacttgaagggtcttgggtgctatacgagctcagtaattatcgtggccgtcagtacctgttgatgccgggagactatagacgctatcaggattggggagccaccaacgcacgcgtcggctcactgcgtcgcgttattgatttctcatag

SEQ ID NO: 219402 - DNA, 537 bp, synthetic construct
  misc_feature 1..537: note = Description of Artificial Sequence: Synthetic coding sequence
  source 1..537: mol_type = other DNA
atgtccaaaacggggactaaaatcactttctatgaggacaaaaacttccaaggaaggagatatgactgcgattgcgattgcgctgatttccatacctatttatccaggtgtaactctataaaagtggagggcggaacatgggcggtgtatgagaggccaaacttcgcaggctatatgtacatcctcccccaaggggagtatccagaatatcagaggtggatgggtcttaatgaccgcctcagttcctgccgcgcagtgcacctgccctccggaggtcagtacaagatccagatttttgagaaaggcgacttcagtggacagatgtacgaaaccactgaagactgtccgtctatcatggagcagttccacatgcgtgagattcactcttgcaaggtactcgagggagtgtggatattctacgagttgcccaattatcgaggccgtcagtacctcttggataaaaaagagtataggaagccaatagattggggggctgctagccccgctgtccagtccttcagaagaattgtggaatag

SEQ ID NO: 219403 - DNA, 537 bp, synthetic construct
  misc_feature 1..537: note = Description of Artificial Sequence: Synthetic coding sequence
  source 1..537: mol_type = other DNA
atgagtaagactggaaccaagattacgttttacgaggacaagaatttccaggggcgacgatatgactgcgattgcgattgtgccgacttccacacatatctgtctcgttgtaattccattaaagtggaaggtggtacatgggccgtgtacgaacgtcccaattttgctggatacatgtacattctccctcagggcgaataccctgaataccagcgctggatgggtcttaatgatcggctcagtagttgtcgagctgtgcacctgccctctggagggcagtataaaatacagatttttgagaagggcgatttcagcggtcagatgtatgaaacaaccgaggactgtccatctattatggaacagtttcacatgcgggagattcactcctgcaaggtgctggaaggagtctggatcttctacgaacttccaaattacaggggaaggcagtatttattagataagaaggaatatcggaagcctatcgactggggggcagcctcacctgccgtgcagtccttccgcaggattgtagagtag

SEQ ID NO: 219404 - DNA, 960 bp, synthetic construct
  misc_feature 1..960: note = Description of Artificial Sequence: Synthetic coding sequence
  source 1..960: mol_type = other DNA
atggcaagttcggccgcaggctgtgtggtcatcgtcgggtcaggagtcattggccgatcatgggccatgctgttcgccagtggtggattccaagtaaagctgtatgacatcgaacaacagcagatcagaaatgccttggagaacattaggaaagagatgaagttgctcgaacaggccggaagtctgaaggggagcctctctgtcgaggaacagctgagcctgattagcggttgcccaaatatacaggaagctgtcgaaggcgcaatgcacattcaggaatgcgtccccgaggatctggagctgaaaaagaagatcttcgcccagctggactccatcattgatgatcgggtcattttaagcagtagcacgtcctgcctcatgccttcaaaactgtttgcgggattggtgcacgtgaagcagtgtatcgtcgcccacccagtgaaccccccttactatattcccttagtcgagttagtcccacaccctgagaccgctcccacgaccgtggacaggacacacgcactgatgaagaagattggccagtgccctatgcgcgtccagaaggaggtggccggattcgtgctgaacagactccaatacgctatcatctctgaggcgtggaggcttgttgaagagggtatcgtgagtccctctgatctggacttagttatgagtgaggggctggggatgcgatacgccttcatcggccctctcgaaaccatgcatctaaatgccgaagggatgctgtcttattgcgatcgatacagcgaagggatcaagcacgtgctccagacttttggccctattccagagttctcgcgtgcgaccgcagagaaagtgaatcaggacatgtgtatgaaggttcccgacgaccctgaacatcttgccgcacgtcgccagtggagagatgagtgtctcatgaggctcgctaaacttaagtcccaggtgcagccccagtag

SEQ ID NO: 219405 - DNA, 2346 bp, synthetic construct
  misc_feature 1..2346: note = Description of Artificial Sequence: Synthetic coding sequence
  source 1..2346: mol_type = other DNA
atggccaagacgccttccgatcatctcctgtccactctggaggaactcgtgccctacgactttgaaaagtttaaatttaaactgcaaaatacctcagtgcagaaagaacacagccgcatacccaggtcacagattcagagggccaggccagtgaagatggccaccctgctcgtgacgtactatggtgaggagtatgctgttcaactgactctccaagtccttagagccattaatcagcggctactggctgaggagctgcacagggcggctatccaggagtatagtacacaggagaacggcaccgatgatagcgccgcaagctcatctctcggtgaaaacaagccgagatcactcaaaacacctgatcaccccgaggggaacgagggtaacggtccaagaccctacggcggtggagccgcatctttaaggtgttcccagccagaggcgggacgaggactttccaggaaacccctgtctaagaggagagagaaagcctcagagggccttgatgcccaggggaagccacgcacacgatctcctgcgcttccaggcggtaggagtcctggcccttgccgggctctggaagggggacaggccgaggtgaggctgcgacggaacgcaagttcggctgggaggctgcaggggctggctggcggagccccaggtcagaaggaatgtcgtcccttcgaggtctacctcccttccgggaagatgaggcccagatctctcgaagtaaccatctctaccggcgaaaaggctcccgctaaccccgagatcttgcttaccctggaggaaaagaccgcagccaatttggattcggctaccgagccacgcgcacgccctactcctgacggtggagcgtccgctgacctgaaagaaggccctggcaaccctgagcatagcgtgacagggaggcccccagataccgctgctagtcccagatgtcatgctcaggaaggggaccccgttgatgggacctgcgtccgggactcatgcagtttccccgaggccgtgagcggacacccccaggcatccggttctcgttctcccggttgcccccgatgtcaggactcgcacgagcgcaaatcacccggttccctgagcccccagcctcttccgcaatgcaagcgccacctaaaacaagtccagctgctcttctgcgaggaccacgacgagcccatatgcctcatctgtagcctgagccaggagcaccaaggccatagagtgcggccaattgaagaagtagcccttgagcataaaaaaaagatccagaaacaattggaacacctaaagaagctcagaaagtccggggaggagcaacgtagctacggagaggagaaggccgtatcctttctgaaacaaaccgaggcactgaaacagcgggtacagaggaaattggagcaagtctattactttcttgaacagcaggagcactttttcgtggcctcattggaggatgtgggtcaaatggtggggcagatcaggaaagcatatgatacccgtgtcagccaggatatagcactgttggacgctttaatcggagagctcgaggcaaaggagtgccaaagtgaatgggagcttctgcaggatattggcgatatactgcatagagcaaagaccgtgccagtaccggagaaatggacaaccccacaggagattaagcagaagattcagttgctgcaccagaagtcagaattcgtagaaaaatctactaaatacttttccgagacgctgcgaagcgaaatggaaatgtttaacgttcctgaattgataggagcacaggcacacgcggtgaacgtcattctggacgcggaaacagcttatcccaacctgatcttttcagatgatctaaagtctgtgcgcctgggaaataaatgggagcgcctgccggatggtcctcaaaggttcgatagctgcattattgtcctgggaagccctagcttcttgtctggtaggcgttactgggaagtcgaggtcggtgataaaactgcttggatcctgggggcatgcaaaacttctataagcaggaagggtaacatgaccctgtccccagaaaatggctattgggttgttattatgatgaaggagaatgaatatcaggcatccagtgtaccccctacccgactcctgatcaaagagccccctaagcgtgtgggtatattcgtggactatcgggtcggcagcataagcttttataacgtgactgcccgttcccacatctacacatttgccagctgttcatttagtggacctctgcaacctatcttcagcccgggaaccagggacggcggtaagaataccgcgcctctcactatctgcccggtcggcggtcaaggcccagattag

SEQ ID NO: 219406 - DNA, 945 bp, synthetic construct
  misc_feature 1..945: note = Description of Artificial Sequence: Synthetic coding sequence
  source 1..945: mol_type = other DNA
atgtccagagtgccggcattcctgtcagcagcagaagtagaggaacacctgagatcaagctccctattgattcccccactcgaaacagctttagctaacttcagttccgggcctgaaggtggggtcatgcaaccggtacgcactgtggtcccagtgactaagcaccgaggctacctcggggtcatgcctgcatattctgcggcagaggacgcgttgactaccaaattggtcaccttttacgaggatagaggcattacctcggttgtgccctcacatcaggcgaccgtgctgctcttcgaacccagcaatgggactcttctggccgttatggatggcaatgtgatcaccgcaaaacgcaccgccgctgtatctgcaatcgctacaaagtttttaaaaccaccgagctcggaggtactgtgcatactgggtgccggagtccaggcctattcacattatgaaatctttactgagcaatttagcttcaaggaggtgcggatatggaataggactaaagagaatgccgaaaagttcgctgatacagtacagggcgaagtgcgtgtgtgttcttccgtccaggaagcggtggcgggagccgatgtgatcatcactgtcacactggccactgagcctattttgttcggagagtgggtgaaaccaggtgcacatattaacgccgtcggcgcttcacggcctgactggcgtgaactcgatgacgagctgatgaaagaagccgtcctgtatgtggattcacaggaggcagccctgaaggagtccggtgacgtgctgctgtcgggggcagaaattttcgctgagctgggggaagtcatcaagggagtgaaacctgcgcattgcgagaagaccactgtgtttaagtccctcggaatggcggtcgaggacactgtagccgctaaactgatctatgacagctggagctccggtaaatag

SEQ ID NO: 219407 - DNA, 819 bp, synthetic construct
  misc_feature 1..819: note = Description of Artificial Sequence: Synthetic coding sequence
  source 1..819: mol_type = other DNA
atgcaaccagtaaggactgtcgttcccgttacgaagcatcgtggttaccttggagtgatgcctgcctactccgccgctgaggatgctctgacaacgaagctggttaccttctatgaagacagaggaattactagcgtcgtgccgagtcaccaggccaccgttctgctttttgagccgtccaacggcacgctcttggcggtcatggacggaaatgtcataacggcaaaaaggactgccgcagtgagcgcaatcgcgaccaagttcttgaagcccccatcaagcgaagtgctatgcatcctcggcgcaggggtccaggcctactcccactacgaaatattcactgagcagttttcatttaaagaagtgcggatctggaataggacaaaggagaacgctgagaagtttgccgataccgtacagggggaggtccgagtatgcagctctgtgcaagaggctgtcgcaggggctgatgttatcatcaccgtgactcttgcgaccgaacctatactgtttggagagtgggtgaaacccggtgcccatattaatgccgtaggcgctagtcggcctgattggcgtgagcttgatgatgaactgatgaaggaggccgtgctgtacgtcgactctcaggaagccgcactcaaggagtctggcgatgtcctgctgtcaggcgcagaaatctttgccgaactcggtgaggtgattaaaggcgtaaagccagctcactgcgagaaaacaacagtttttaagagcctcggtatggcagtggaagacactgtcgcggctaaactgatttacgactcctggtctagcgggaagtag

SEQ ID NO: 219408 - DNA, 945 bp, synthetic construct
  misc_feature 1..945: note = Description of Artificial Sequence: Synthetic coding sequence
  source 1..945: mol_type = other DNA
atgagtcgagtcccagctttcctgagtgctgccgaagttgaggaacatctgcggtcctccagcctattaatcccccctctcgagacagctctcgccaatttcagtagtggacccgagggcggagtaatgcagccagtgcgcacggtggtgcccgtgacaaagcataggggctatttgggcgttatgcccgcttatagcgcagcagaagatgcactgacgacaaaacttgtgacgttttatgaggatcgcggaatcacttctgtcgtcccatcacaccaggctaccgtgttgctgtttgaaccctcgaacggaactctcctagcagtgatggatggcaatgttataacagcgaaacgcacagccgctgtcagcgccatcgccacaaagtttctgaaaccaccaagctcagaggtgttgtgcatcctgggcgctggagtccaggcctactcccactacgaaatattcaccgagcagttttccttcaaagaggtccgaatttggaaccgaactaaggagaatgctgagaagtttgccgacaccgtccagggtgaagttagagtgtgcagcagcgtgcaagaagcggtggccggagcagacgtgatcattacggtcacactcgcgactgagcccattctgttcggcgaatgggtcaagcccggtgcccacataaatgccgtcggagcttcacgccctgactggagggagctggatgacgaactcatgaaggaggctgtgctgtatgtagactcacaggaggccgcactcaaggagagcggcgatgtgctcctgtcaggggctgagattttcgcagaactcggggaagtgataaagggcgtcaaacccgcacactgtgaaaaaactacagtgtttaagtccctgggaatggccgttgaggacactgtagcagcaaaacttatctacgacagttggtccagtgggaagtag

SEQ ID NO: 219409 - DNA, 990 bp, synthetic construct
  misc_feature 1..990: note = Description of Artificial Sequence: Synthetic coding sequence
  source 1..990: mol_type = other DNA
atggccaccggacagaagttgatgcgggctgtgagggtcttcgaatttggcggacctgaagtcctcaagttgcggtccgacatcgctgtcccaatccctaaagaccatcaggttttaattaaggtccatgcttgcggagttaatccagtcgaaacatatatccggagcgggacttattcgaggaagccattgctgccatacacacctgggtctgacgtggcgggagtcattgaggcggtgggagacaacgccagcgctttcaagaagggggacagggtgttcacgtcgagtaccatatctggcggatacgccgaatatgctttggctgcggatcacacagtttacaaactgccagagaagctcgactttaaacagggcgctgcgataggtatcccctacttcactgcctacagggcgttaatacactctgcctgcgtcaaggctggggaaagtgtcctggttcacggtgcctcgggcggagtggggctggctgcctgtcagatcgctcgagcctacggcctgaagattctcggtacggccggaacagaggagggtcaaaaaatagtattacaaaacggagctcatgaggttttcaatcatagagaggtgaactacatcgacaagattaagaaatacgtaggcgaaaaaggaatagatatcattatcgagatgctagcgaatgtgaatctgtcaaaggacttgtccctgctaagccatggcggaagagtgattgtggtggggtctcgaggcacaatagagatcaaccccagagataccatggccaaagagagctcaatcatcggagtcacgctgttctccagcacgaaagaagagttccagcagtacgcagccgctttacaggcgggtatggagattgggtggcttaagcctgtgatcgggtcccaatatcccctggagaaagtagcagaagcgcacgagaacattattcacggtagcggcgcaacaggtaaaatgatcctgctcctgtag

SEQ ID NO: 219410 - DNA, 732 bp, synthetic construct
  misc_feature 1..732: note = Description of Artificial Sequence: Synthetic coding sequence
  source 1..732: mol_type = other DNA
atggcgactggacagaagctcatgagggctgtgcgcgtcttcgaattcggaggacccgaagtgttgaaattgaggtctgacatagccgtcccaatccctaaagatcaccaggtgctaatcaaggttcatgcgtgcggagtgaacccagtcgagacatatattaggagcggaacatatagccggaagcccctgctgccttatacgcccggtagtgacgtggccggtgtcatcgaagctgtgggcgacaacgcatcagcctttaaaaagggcgaccgcgtgtttacgtccagcacaatttctggaggttacgccgagtacgcactcgccgcagaccacacggtgtacaaacttccggagaaactagacttcaaacagggagctgcaataggaattccatacttcacagcctatcgtgccctgattcatagtgcttgtgtgaaagcaggtgagtcagtgctcgtgcacggggcaagcgggggtgtagggttggctgcctgccaaatcgctcgagcgtacgggctaaaaattctagggactgcaggtaccgaagagggtcagaaaattgtacttcagaacggggctcatgaggttttcaaccaccgggaagtgaattacatcgacaagatcaaaaagtacgtgggggaaaaaggtattgacatcatcatagaaatgctcgccaacgtgaacttatctaaggatctgagtctgctgtctcacggtggcagagtttag

SEQ ID NO: 219411 - DNA, 888 bp, synthetic construct
  misc_feature 1..888: note = Description of Artificial Sequence: Synthetic coding sequence
  source 1..888: mol_type = other DNA
atggccacaggccagaagctcatgagggccgtgagggttttcgagttcggcggaccggaagtcctcaaactgcgcagcgatatagccgtcccaatacctaaagatcaccaggtgctgattaaagtccacgcctgtggggtgaaccccgtcgagacgtacatacggtccggtacctatagccgcaagcccttgttaccatacacccctggcagcgacgtggcaggagtcattgaggccgtgggggataatgcaagcgcatttaagaagggcgatcgcgtgttcacgtctagtacaatctcaggtgggtacgccgagtacgctctcgctgccgaccacacggtctacaagctccctgaaaaacttgacttcaagcagggagccgcaattgggatcccctatttcacagcatacagggctttaatacactccgcttgcgttaaggccggagagagtgtactggttcacggcgcttcaggtggcgtaggcctcgccgcttgccaaatcgccagggcttacgggttaaagatcttgggcacggcgggaactgaagaaggccaaaagatagtgctgcagaacggggctcatgaagtgttcaaccatcgggaagtgaattacatagataagattaaagtggtcgggtcccggggtactattgagatcaacccaagggacactatggccaaagagtcctccattataggagtaacactcttctcttccacgaaagaagagttccagcagtacgcagccgcactgcaggctggaatggagattggatggttaaagcctgtcattgggagtcagtacccccttgagaaggtggcggaggcacacgagaacataattcacggttctggagccaccggaaagatgatcctgctgctttag

SEQ ID NO: 219412 - DNA, 579 bp, synthetic construct
  misc_feature 1..579: note = Description of Artificial Sequence: Synthetic coding sequence
  source 1..579: mol_type = other DNA
atgcacctgctgagttccgcctgtgtgaaggccggagaatccgtgctagtgcatggcgcatccggcggagttggtctagcggcatgccagatcgcccgtgcttacgggttgaagattctgggaaccgccggtacagaggaaggtcagaagattgtgctgcagaatggagcccacgaggtttttaatcacagggaagtaaattacatcgataagatcaagaagtacgtgggggagaagggaattgacattattatcgaaatgctggcaaacgtgaacctgagcaaggacctcagcctactttcccatggcggacgagtgatcgttgtgggtagccgaggaaccattgagattaatccccgagatactatggccaaggaaagttcgattattggcgttacccttttctcaagcactaaggaagagttccagcagtatgcagccgcactacaggcgggaatggagattggatggctgaaacctgtaattgggtcccagtatcccctggaaaaggtggcagaggcgcatgaaaacattatccatggatccggcgcaactgggaagatgattctgcttctgtag

SEQ ID NO: 219413 - DNA, 990 bp, synthetic construct
  misc_feature 1..990: note = Description of Artificial Sequence: Synthetic coding sequence
  source 1..990: mol_type = other DNA
atggctacaggccagaagctgatgcgagctgtaagggtgttcgagtttgggggaccagaggtactaaagctcagaagtgatatcgcagtgcctatccctaaggaccatcaggtgctgattaaagtgcacgcatgcggggtaaatcccgtagaaacttacatccgaagcgggacatatagtagaaaaccactcttgccctacacacccggatcagacgtggccggtgtgatagaagcagttggggataatgcaagcgcgttcaagaagggagatcgcgttttcacttcctcaactatctccggtggctatgccgagtatgcactggcagccgatcataccgtctataagctgcctgagaagctggactttaagcagggggcagcaatcggcattccctattttactgcttacagggcactcatacactccgcctgcgtgaaggctggcgaatccgttctagtgcatggggcatccggaggtgtcggactggccgcttgtcaaatcgccagagcctatgggctgaagatcctggggactgcgggtactgaggaggggcagaaaatagtcctccagaatggagcacacgaggtcttcaaccacagggaggtgaactacatcgacaaaatcaagaagtatgtcggagagaagggtatcgacatcatcatcgagatgctggcaaacgtgaatctgtcaaaggacctgagtcttctgtcgcatggaggcagggtaatagtggtcggaagccggggaaccatcgagattaaccctagagacacgatggccaaagaatcttcaatcataggtgtgacactcttctcttctactaaggaggagtttcaacagtacgcagccgcactgcaggccggaatggaaatcgggtggttgaaacccgtgatcggatctcaatacccacttgagaaggtggccgaggcccacgagaacattattcacggcagcggggctactggcaagatgattctgctgctgtag

SEQ ID NO: 219414 - DNA, 621 bp, synthetic construct
  misc_feature 1..621: note = Description of Artificial Sequence: Synthetic coding sequence
  source 1..621: mol_type = other DNA
atggccacggggcaaaagctgatgagagctgttagggtattcgaattcggagggcctgaggtgctaaaactacggagcgatatagcggtccctatcccaaaagaccaccaagtcctcattaaggtgcatgcctgcggcgtaaacccagtcgaaacctacattagatcgggcacatacagcagaaagcctcttctgccttacactccaggctcagatgtggcgggagtcatagaagctgtgggcgataacgcctcggcttttaagaaaggagatagggtgtttacaagttctacaatctcaggaggttacgccgaatatgcgctcgcagctgatcatactgtctacaagctacccgaaaagttggatttcaagcagggcgcagcaattggcattccttacttcacggcttatcgcgctctgatccatagcgcctgtgttaaagcaggtgagagcgttctcgtgcatggcgctagcggcggagttggtctcgcagcatgtcagattgccagagcctacggcttaaaaatcctgggcaccgccggtacggaagaagggcaaaagatagtattgcagaatggggcacacgaagtgtttaaccaccgggaggtgaactatatctag

SEQ ID NO: 219415 - DNA, 1050 bp, synthetic construct
  misc_feature 1..1050: note = Description of Artificial Sequence: Synthetic coding sequence
  source 1..1050: mol_type = other DNA
atgaagggattgtatttccagcagtcctctactgatgaggagattaccttcgtcttccaagagaaggaggacttgcccgtgacagaggataactttgtgaaattgcaagttaaggcctgcgccctcagtcagatcaataccaaactgctcgctgagatgaagatgaagaaggatctattccctgtagggcgagagatcgctgggatcgttctcgacgtcggttcaaaggtgtcttttttccagcccgacgatgaagtggtgggtatattaccgttggactccgaagacccagggttgtgtgaggtcgttagagtgcacgagcattatctggttcacaagccggagaaggtcacatggaccgaggccgctggctcaatccgcgatggagtgagggcatatacagccttacattatctgagtcatctgtcacccggaaaaagcgtcctgattatggacggggcaagtgcatttggtactatagccatccagttagctcaccataggggcgctaaggtaattagtaccgcctgtagcctcgaggacaaacaatgtcttgagaggtttcgtcccccaattgccagggtgattgacgtgtccaatggcaaggtacacgtagcggagagctgtctggaggagaccggcggattgggcgtcgatatcgtgctagatgcgggtgtgcggctttactccaaggatgacgaaccagctgtgaagctgcagctgctcccccacaagcacgacattataacgttactgggggtgggtggccactgggtgacaacagaagagaatctccagctcgatccgcctgattcccactgtctctttctcaagggggctactctggcctttttaaacgacgaagtgtggaacctcagtaacgtgcaacaggggaagtatctatgtatattgaaggacgtcatggagaaactctccaccggcgtgtttcgaccgcaactcgatgagcccatccccttatatgaggctaaagtgtccatggaagcagttcagaagaatcaggggcgtaagaagcaggtagtgcagttttag

SEQ ID NO: 219416 - DNA, 546 bp, synthetic construct
  misc_feature 1..546: note = Description of Artificial Sequence: Synthetic coding sequence
  source 1..546: mol_type = other DNA
atgaagggcctctattttcagcagtctagtaccgacgaagagatcaccttcgttttccaggaaaaggaagatctccccgttacagaggacaattttgtgaaactgcaagtcaaggcctgcgcactcagccagattaacacgaagctgttggcagagatgaaaatgaaaaaggacttgtttccggtaggccgtgagatagcaggcatcgtcctggatgtcggttcaaaagtttccttctttcagccagatgatgaggtggttggcatactgccactcgactccgaagaccccggactttgcgaggtcgtgcgcgtacacgagcactaccttgtccacaaacccgagaaggttacctggaccgaagcagccggttctatcagggatggggtaagggcctacacagctctgcactacctttcccacctcagccctggcaaatcagtgcttatcatggatggggcttcagcattcggaactatcgccatccagttggctcaccaccgcggagccaaggtcattagtacagcctgttctttagaggactag

SEQ ID NO: 219417 - DNA, 60 bp, synthetic construct
  misc_feature 1..60: note = Description of Artificial Sequence: Synthetic coding sequence
  source 1..60: mol_type = other DNA
atgaagggactgtacttccagcaaagctccactgacgaagaaataacattcgtgttctag

SEQ ID NO: 219418 - DNA, 597 bp, synthetic construct
  misc_feature 1..597: note = Description of Artificial Sequence: Synthetic coding sequence
  source 1..597: mol_type = other DNA
atgaaagggttgtatttccagcagagctccacggatgaggagatcacgttcgtgttccaagagaaagaggatctgcctgtgactgaggacaactttgttaagctccaggtgaaggcttgtgccctctctcaaatcaacacgaagctgctcgctgagatgaaaatgaagaaagatctgttcccagttggtcgggagattgcaggtatcgttctcgatgtggggtccaaggtgtcttttttccagcccgacgacgaggtagtcggcattttacctctggactcggaggaccccggtttgtgtgaagtcgttagggtgcacgagcactatctggtgcacaaacctgaaaaagtcacgtggaccgaagccgcagggtctatcagagacggtgtaagagcatatacagcactccactatctaagtcatttgtctcccggaaagagcgtattaattatggacggcgcatcagcgttcggcactatcgccatacaactcgcgcaccaccggggagcaaaggtcatcagtaccgcatgttctctggaagataagcaatgcctagaacggttccgaccacctatcgagaatagcactattgcttag

SEQ ID NO: 219419 - DNA, 2916 bp, synthetic construct
  misc_feature 1..2916: note = Description of Artificial Sequence: Synthetic coding sequence
  source 1..2916: mol_type = other DNA
atggagctaagtgacgctaaccttcagactttaacagaataccttaagaaaacattggatcctgacccagccatcaggagaccagccgaaaaatttctggaaagtgtcgagggaaaccagaactaccccctgttgctgctaaccctgctcgaaaaatcgcaagataatgtcattaaggtgtgcgcatctgttacctttaagaactacatcaaacggaactggaggatcgtcgaagatgaaccaaataagatttgcgaagcagacagagtggccataaaggccaatattgttcacctcatgctttcatcgcctgaacaaatccagaaacagttatccgacgctatatccatcattgggcgtgaagactttccacagaagtggcccgacctgctgacagagatggtaaatagatttcagagcggggacttccatgtgattaacggcgtcctgcggactgctcacagcctgttcaagcgttacagacacgaattcaagtctaacgagctgtggactgaaatcaagttggtactggacgctttcgccttacccttaactaacctgtttaaagcgactatagagctctgtagtacgcacgccaatgatgcgagtgcgctgagaattctgttctcttccctgattctgatctccaagctcttttactctcttaactttcaggacttgccagagtttttcgaagataatatggagacgtggatgaacaactttcacaccctgttgacattggacaacaagctgcttcagaccgatgatgaggaggaggccggactcctggagctgttgaagtctcagatctgcgacaatgcagctctttatgcccagaaatatgatgaagaattccaaaggtacctgcctagatttgtaaccgccatctggaatctgcttgtaaccaccggccaggaagtcaaatatgacctgctggtgtctaatgccatccaattcctcgcttctgtctgcgaacggcctcattataaaaacctcttcgaggaccaaaacactctcacctcaatctgcgagaaggtaatagtgcctaatatggagtttagggctgccgacgaggaagcattcgaggacaactcggaagaatatatacggagggatttggagggtagcgatatcgatactcgtaggcgtgctgcttgcgatctggtccgcggtttgtgtaaattcttcgaaggaccagtgaccggaatattctccggctacgtgaattcaatgctgcaggagtacgcgaagaatccaagcgtaaactggaagcacaaagacgccgctatttatttggtgacctccctggcatcaaaggctcagacacagaagcacggcataacccaggcaaacgagctggtgaacctgactgaattctttgtcaatcacattcttcccgatctgaagagcgcaaacgtgaacgagtttcctgttttgaaagccgacgggattaaatatatcatgatctttagaaatcaggtgcccaaagaacacctcctggtgagtattcctttgttaataaatcatctgcaagcagaaagtatagtcgtgcacacctatgcggctcacgcccttgagagacttttcaccatgagaggtccaaacaacgccaccctgttcacggcggcagagatcgctcccttcgttgagatactgttgaccaatctctttaaggctctcaccctgcccggttcctctgagaacgagtatatcatgaaggcgataatgcgctccttcagtctcctccaggaagctattatcccttacattcccactttgattacacagctgactcaaaaactgctggcagtgtccaaaaacccatcaaagcctcactttaaccactacatgtttgaggccatctgtctgtcaatccgcatcacatgcaaggcgaacccagccgcagttgtgaatttcgaggaggccctcttcctggtgtttacggaaatactccagaacgacgtgcaggaatttattccatatgtgtttcaggtgatgagcctgctgctcgagacccacaagaatgatataccaagtagttacatggctttgtttccgcacctgttacagcccgtgctttgggagcgaaccggaaacataccagcgctggttaggctgttgcaggcctttttggagagaggcagcaacacaatcgcctccgcagcagccgacaaaattcctggtcttctgggtgttttccagaagctgatcgcatctaaggccaacgatcatcaaggtttctacctcttgaattccattattgagcacatgccacctgaaagtgtggaccagtatcgcaaacagatcttcatacttctgttccagaggttgcaaaacagcaagaccactaaatttatcaaaagctttctcgtttttatcaatttgtactgcatcaagtacggggctctcgccttgcaagagattttcgatgggatacaacctaagatgtttggcatggttttagagaagatcatcattccggaaattcaaaaggtcagcggtaacgtcgagaagaagatctgcgctgtgggtatcacaaaactcttgactgaatgtccccctatgatggacactgaatacactaagctatggacccctctgctccagtctctgatcggcttgtttgaactgccagaggatgataccattccagacgaagaacatttcatcgacatcgaggacacacctggctatcagaccgccttcagccagcttgctttcgccggtaagaaggagcacgacccagtgggccagatggttaacaatccaaagattcaccttgcacagagccttcataagttgtctaccgcgtgccccggaagggtaccttccatggtcagcacttccctgaacgctgaggctctgcaatatcttcaggggtacctgcaggcagcgtccgtgactctcctgtag

SEQ ID NO: 219420 - DNA, 2748 bp, synthetic construct
  misc_feature 1..2748: note = Description of Artificial Sequence: Synthetic coding sequence
  source 1..2748: mol_type = other DNA
atggagttgagcgacgccaatctgcaaactctaactgagtacctcaagaagactctggaccctgatccagccattcgcagacccgctgaaaagtttttggagtctgtcgagggtaaccagaactatccactcctgttactgacactgctggaaaaatcacaggacaacgtgattaaggtttgtgcttccgtaacattcaagaattacattaaaagaaattggcgcatcgtcgaggatgaaccgaataagatctgcgaagccgatcgggtggctatcaaagccaatattgtgcacctgatgttgtcatcacctgaacagatccagaagcagctttctgacgccatttccatcatcggcagggaggactttccacagaaatggcccgacctccttacagagatggtaaaccgctttcagtccggcgacttccatgtgatcaacggagtgctccggactgcacacagtctgtttaagaggtatagacacgagttcaaatcgaatgaattatggaccgagatcaagctggtgttggacgctttcgctctgcctctcacaaatctcttcaaggctacaatcgagctatgttccacccacgctaacgacgcctctgccctgagaattctgtttagctctttaatactgatctcaaaattgttttatagccttaattttcaagacctacctgagttttttgaggataatatggaaacctggatgaataacttccatactctcctgactctggataacaagctgcttcaaactgatttggtgtcgaacgccatccagttcctcgcctccgtttgcgagaggcctcactataaaaatctcttcgaggaccaaaacaccctgacctcaatttgtgaaaaagtgattgtccccaacatggagttcagagcagccgatgaggaggcctttgaagataactctgaagagtacattcgcagggacctcgaagggagtgacatcgataccagacgtagagccgcttgcgatcttgtcagagggttgtgcaaattcttcgaagggcctgtgaccggcatattttcaggctatgttaattccatgctccaagagtatgccaaaaaccccagcgttaattggaaacacaaggatgccgctatttatctcgtgacatctctggcttcaaaggctcagacccagaagcacggcatcacacaggccaatgagcttgtgaatctgactgaattttttgtcaaccacatcttgcctgatctgaaaagcgcaaacgtcaatgaattcccagtcctgaaagcagatggcatcaaatatattatgattttccgtaaccaggttccaaaggaacaccttctcgtgtcaataccactactgataaaccacctgcaggctgaatcaattgtagtccatacctacgctgcccacgctctcgaacggctcttcacaatgcgagggcctaacaacgccactctgtttacggccgcagaaattgccccatttgtggagattctgctgactaacctctttaaggccctcaccctcccaggctctagtgagaacgagtacatcatgaaggctatcatgaggagtttctctctccttcaggaggctatcattccctacatacccacactgatcacccagcttactcagaagctcttggctgtatctaagaacccctccaagcctcacttcaatcattacatgttcgaggcgatttgcctctcaattaggataacatgcaaagcaaaccccgcagccgtagttaattttgaggaagctctattcctcgtcttcacggaaattcttcagaacgacgtccaggagttcatcccctacgtgttccaggtgatgtccctgcttctggagacacataaaaacgatatccccagtagctacatggctctgtttccacacttactccagccagtcctgtgggaaagaaccgggaatataccagcactcgttaggctgctgcaggcctttctggagcgcggaagcaatactattgcatctgctgccgctgacaaaatacctgggctgttaggggtgttccagaagctgatagcctctaaggcaaacgatcatcagggcttttacctacttaattcaatcatcgagcacatgccccctgagtctgtggatcagtaccggaagcagatctttatcctgctattccaacgccttcagaacagcaagacgacgaagtttatcaaaagttttttggtgttcatcaatttgtactgtatcaagtacggcgcactagcactgcaggaaatctttgatggtatccagccgaagatgtttggcatggtgcttgagaagatcattatcccagaaatccagaaagtgtctggcaatgttgaaaagaagatctgtgcagtaggaattacaaagctgctcaccgaatgccctccgatgatggatactgaatataccaagctttggactccactactgcagtcattgattggactcttcgagctgcctgaagacgacacgatcccggacgaagaacactttattgacatagaggacaccccaggctaccagacagcattctcacagctcgccttcgctgggaaaaaggaacatgacccagtaggacagatggtgaacaatcctaaaattcaccttgcacagtccctgcacaagcttagtaccgcatgtccaggtagagttccatcaatggttagcactagcctaaacgccgaggcgctgcagtaccttcaggggtatcttcaggccgcatcagtgactttgttatag
